United States Patent Application Publication US 2007/0060743 A1 - sequence listing, part 3

SEQ ID NO: 3880 - DNA, 1444 bp, Homo sapiens
  SIMILAR (537)..(4): 1001254mologous to Homo sapiens hexokinase IR,accession number AF016365,Smith-Waterman Score=887.
ttagctgcttgcctctgtgcgtaaccgcacgcccacggccgtgatgagggcggcccccttgccgctgccatcctcagacaggaggaaggacacgttacattttggtgacagttccttcaccgtctggtgcatgattctggagaagtgtggatgaagcttgtagagtgtcccgtccactcccacagtcacattcagacggtccagtcctctgttctcgcggatcttatccacaaccgcagccatgcctgcgccacacagctgtgcggccctcctggacaccaccccgcacactgtcttgacgaggatactgtcatcgcaggtgctattcagacctagctgctggaggatagcccggacctggagcagtgctaatcggtcactctcgatctgagagagaaacttggtctcaaagatgccccgggtcttcagcgtctcagagatctgccctcggaagaggaatcccttcttggtgaagtcgattaagatgttgcggacgatttcacccaggtacataccactgatcatcttctcatacctgggctccagccaggaaagcactaacccgtagcccctggaaagccgcaggctggccaggagctctggtggctgggctggaatcacaggcactcccatgaacattttcacagggccagatcctgggccatctgagaggtctgcacaacccagggtgtgggacagcacctgctgccttaagagcaactgctggttccggaaggtcaaggccaccacgccaccaatgagctccatgatgaggcagatcccaaggatgtacatgaatgcttggagaaggtacaggttgtcacggagggacgccagcacaccaatgaaggagaccatgaacatgacgacgcccaggaggatgaggatgatggctggagccaggaaggcactttcaagggttttatatttctgccgctcaacctctgcatagatgcccacagacaggaccagggccccaatcagacctgtaatcccagcactttgggaggccgaggcgggcggatcacgaggaccctcagctgcaggtctgttggagtttgctagaggtccactccagaccctgtttgcctgggtatccgcagcagtggctgcagaacagcggattttcgtgaaccgtgaatgctgctgtctgatcgttcctctggaagttttgtctcagaggagtacccggccgtgtgaagtgtcagtctgcccctactgggagaatgccttccagttaggctgctcagggacggtcacagttggtagcacgacagtgactctagctgagtgtttaaaatggctgacaactttccagctggtttccatcggcttggccgcagtggcgatggacgtgctgaacacaggcgatgttgtctggcttctcaacgttgctgctgagtggaacagttttgtgaatatcccaaatgacagtctctcatga

SEQ ID NO: 3881 - DNA, 503 bp, Homo sapiens
  SIMILAR (343)..(501): 981254mologous to Homo sapiens Similar to KRAB-zinc finger protein SZF1-1,accession number BC006247,Smith-Waterman Score=300.
ggaccggaactccagtgtcgacgatttcgtggtgctgctacctcgtttgcttattgcttgcgtgcgtgcgcgcgcagatgtgggccccgcgggagcagctactgggctggactgcggaagctctgcctgccaaggattctgcctggccctgggaagagaagcctatatatctgggaccagtgactttcgaggatgtggctgtgcttttcactgaggcagagtggaagagactgagccttgagcagaggaacctatacaaagaagtgatgctggaaaatctcaggaatctggtctcattggcagaatcaaagccagaagtccatacctggcctttttgcccttctgggctttgggagtcagcagttcctcagccaagatgagctacacaatcatcctattccaggtttccatgcaggaaatcaactccacccaggaaatccctgcccagaggatcagccacagtcacaacatccttctgataaaaatcacaggggggctgaagc

SEQ ID NO: 3882 - DNA, 5406 bp, Homo sapiens
  SIMILAR (1522)..(1830): 601254mologous to Homo sapiens Human myelin oligodendrocyte glycoprotein gene,accession number AAZ29204,Smith-Waterman Score= 300.
tgtttttctcacaatttcatggattatgggtttgggacaggaagaccacaaagataaagggccattttcattatatcatattaaaggtacatgtgatcaacatgacatcactgtttatgttaaccttgatgatgaccttgttttcatctggtttctccactataagttactcctctcctcacttcccatttccagactctgctctctggaaggaagtcactgtgtgtagcccatatttaagtgatagaaagtaatgttctacctccttgaaccaggggtattatccacataaattatttggaattcttctgcacaaaaaacttacctcttctcctctacatattaatttattcaatcacttacatatatcagtgtagactcatagatacttattttgtactttagcttataatttggcttttctttctttctttttttttttttttttgctctatttgttacaactttagctgtgggagctctttcaggtggctcttgtgtcccttttactccctcagtgtgtgtgtgtctgtgtgtgtgtgtgtgttgagcattttcttactttctggcactgaaagatatatctggtataaaagacaaacgatacacctatctacatggggcacttactgtgaatagaacttgcaggactggaagttgctttcggtgagtcattgagtgagtggtgggtgaatgtgaaggctcagttcattactgtacactactgtagactttataaatactaaggatacacacgaaatttattttaaaaaactatcttcaataattaaccttggcttattgtaacttttcattttataaactttttaattttttgaaactttttactcttttgtaatcacacttagcttaatcacaaacatgtatagctgtacaaatttttttctttttttctttttttttttttttgagacagggtcttgctctgtcatccaggctggagtacagtgacgcgatcatgggtcactgcagccttgacctctctagctccagtgatcctcccacctcagcctcttgagtagctgggaccacaggtgcacgccaccacacccagctaatttttgtattttttgtagagacaagttcttcctgcgctggccaggccagtttcacacgcctgggctcaaacagtcctcctgcctcaatctccccaagtgctaggattgcaggtgtgagctgccacatctggctttttactttgtatccttattctataagctcttttcttttcttttttcttttttttttttgagacggagtctcgctctgttgcccaggctggagtgcagtggcgcgatctcggctcactgcaagctccgccttccgggttcacgccgttctcctgcctcagcatcccgagtagctgggactacaggtgcccgtcaccgaattttttttgtatttttagtagagatggggtttcaccgtgatctcgatttcccgacttcatgatctgcccgagggattacaggcgtgagccactgcacccggcccttttctttttttttttttttttttttttttgagacggagtctcactctattgcccaggctggagtgcaatggcgctatcttggctcgctgcaacctctacctcctgggttcaagcaattcgcctgcctcagcctctcgagtagctgggattgcaggcatgcaccaccacgcccggctaattttttgtagttttagtagagacggggtttcaccgtgttagccaggatggtctcgatctcctgaccttgtgatccgcccgcctcggcctcccaaagtgctgggattacaggcgtgagccaccgcgcctggcctatacgcttttttctgttaaaaaatatttttaagtttttaaacttttgttaaaaattgagacagaagcaaacacattacttactaggcctacacagagccaggattatcagtatcaatcccttccgcctccacatcatgtcccactggaaggtcttcggggcagtaacggacatggagctgttatctcctaacatgccttcttctggaatacctcctgaaagacctgcctgaggctatttaacagttaactttttttttatatgtaagtaggagtactctaaaataacaatataaaatgtagtacaataaaataaataagccagtaacgtagttgtttattatcaagtatgtactgtacataattgtatatgctagacttttatacagctggcagcacagtaggtttatttataccagcacctccacaaacatgtgagtaatgctttgcacttgaccttctgtcagctatgacatccctaggttgcaggatttttcagcttcattataatcttatgggaccatcttcatatgtgagtggtctcttgacccaaacattgttatgtagcacatgactgtaaattttggaatcaccttgtcagtatttacaaaatagctttctgagatttagtggcaggatctcagctcactcctacctgcacctcccaggttcaagcgattcttatgcctcagcctcccaagtaactgggattatagacgtgcaccaccaagcatggctaatttttgtatttttagtagagacagggttttgccacattggccaggctggtctcaaactcctggcctcatgtgatctgcccgcctcagcctcccccagagtgctgggattacaggtatgagccactgcgcctggccaaaattgcctaaatttttaaaatcctaaattggtgttgaattttgtcaaatgctttcctgcattgattttgatgatcacttgatttttctccattcttttgttaatgtgctaaattatgttgcttaatttttgaatgaaaaaataatcttacattcctgaaataatttcggtttggttgtgatgttttattcattctatttcgtgctgaattcagtttgctaatattttgtttaggaattttgcatctatgttcatgagacagatcggcctgtaattttacttttttgtaatgtccttgtcaggtttaggcctcaaagttatgttgactttataaaatgaactgtgaagtatttcctcttttttatgctttagtttgagtaagattgattttttttaaaacttatgtcgtccttaaatatttattagaattcactagggaagttatcttggcctgttactttctttcttgagtaaattttgttttcattctttttttatagttaagtatattgagttagaatgcatacacaaacaaatgcacacaacttaaagtccagttctatgaattttgactaatgtataaacctgtttaacttccactgtaagcaaaatatagtgaattttcgtcaactaaaaagtccccttgtacccatttaccttcagtacctatccctaccccagccacaggcaacaaatgattttcatgtgcttatttgccatctgtatacctctttggttagttttctgtttatatcttttgcccatttatttttttttttttttgagacagagtcttgctatgttgcccaggcaggtcttgagctcctgggcttaggggatcctcccgcctcagcctcccaagtagttgggactacaggcacacactactactcttggtttgcctatttttaaatcaggttgtttgttttcttattattgtgttctctacactgtaggatattctacctttcctagaatttcatgtaaatggactcagacatactgttgtgtctggcctcttttgttcagtgtaatgtttttgagcttcatccttgcatgttatgtgtatcagtgattgattcaatttttattgctgcatagtattggattgtatagctataccacaatttgtttattcattctcctgttgatggaatattggttgtttccagtatttagctattattattattattttttttttttgagacggagtcttgctctgtcaccaggctggagtgcagtggtgcaatctcggctcactgcaacctccgcttcccaggttcaaacgattctcctgcctcagcctcctgagtagctgggactacaggtttgtgccaccacgcccagctaattttttgtatttttagtagagacggggtttcaccatgttagccaggatggtctcgatctcctgacctcgtgatccccccccctcggcctcccaaagtgctgggattacaggcgtgagccaccgcgcctggtcttttttgtttgttttgttctttttttagacagagtctcactctgtagcccaggctggagtgcagtggcatgatctcggctcactacaagcctgcgcccctcaggttcaagagattcttgtgccccagcctcctgagtagctggggttacaggcgtgtgccaccatgcctggctaatttttgtacttgtagtagagactgggttttgccatgttggccaggctggtcttgaactcttgacctcaagtgatcttcctgccttggcctcccaaagtgttgggattacaagcgtgagccaccacacccggccagggatgtcattttttataactagccataaactttagctttgaagtaaaactatttctagcaagtgattcttacctgatattttttgttgttcttgcccatattttaattgggttgtgttattatggttctctatgtattctagatttaagtttttgtatatggtgtgaggcaagtgtcaagtttaattttttttctacaaacatcctgttgttccagtaccttttgatgataagactgtcttttcccccattgaattatcttaacgccctcatgaaaagcaattggccatatgtatgtggatctacttttggactctcaattctgttccagtgatttatatgtccacccttatgtcaataccacattattttgattattgctgctttatagtaagtgacatcatgttgcctgaaatcacgttttccacctttattcttctgttgatggttgctttggcaattaggggtcctttgcattttcgtagacattttagaatcaacttatctattgctactaaaaatgcttgattgggattgtggtaaatctagaaactaatttaggaagaatggtcatattaacagtttcaagtttcagatccatgagcatattttcactctccattaggtcttttaaaatttatcctagcagtgttttatggtttttactgtagaggtcttacacattttgttacatttgttgctatgtgtttgaccttttttgatactagtgtaaatggaaattttttcttttatgttctagttgttcattattacactaaatcatctttgggtgactactaaacattctattgaaaatttgtgaatggcgtgaacccgggaggtggagcttgcagtgagccaagatcgcgccactgcactccagcctgggcgacagagcaagctccgtctc

SEQ ID NO: 3883 - DNA, 1493 bp, Homo sapiens
gacagagtgagactctgttcaaaaaaaataaataagaattatgaatattacttttataatattctcaccactgggaaaaatgcactattctgtgtctaagtagctgcttaccttaaccaagtgatatttgggcaaggggatcgttgccttttgctactggttgagacgaagcatggcaccccctagtagagaaggatcccaattacttccaatttgtgatgtacacattttagaaagatacaggctattgccacagagatagaccaaaacatctcattttctttctttgtaaacctagatctgatttcccaactaagtctgtttcctttgtgaatgctgtgggtatgatccacagaaaggctacataatgaaatgatagctttacaattaatttggctgtagagttgtagactagttagcatatcattgcatatttgtttatttaaaaatgatggccaagtgtggaacctcactgggtgcctgcttggcttggtactaatcctagcattcaaagaatcaaaaggaatgatgaatgatggtaagtataaaatgcacttaataattatagatcagttaaaacatggacattggaaaacaaaaaagcttcttgaaaatgtggctcttttttagtaaaagggacactgtcagatgataaaggttcacatttcttgatggatacaacttaaatcttctttgctaaaaattgcaaaactactactgtaaaaactgtagggtgtcacgaatcacactccagtcatatggctcccagcaaagagaaattaccactttttgtgaaatgtttttcagattccgtgtctggtgactgtaactttaagatgccttttataaggcacataaataatctggcacaaatctttatcattttgacagagtttcttttatgcttgtgttggtgattttgttgcatttaaccccatgggggacttacatctctgcttttccaatcaggagcttggttctaaccttttgggagatgattaaagagagaggttgagagagagagagagagagagagagagagagagagagagagagatgtttcgtcctcagcttttgcttccattttttttttaagaactctgggctaataacttctaatctttatagaatatttcaaagaaatatatttgttcttaaagatacataggtttgagatattgagtgctacaagcatttattttggttttaccttaacatattatgattcctcagttttgttggcatttagtaattatgtttatgtttttatcttatcaaaaaatgtcttcttacctttgatatttataatcactcctcggtcatgtaaatagtttgctttatattttactgttttaaagtctgtgaccttacctgccctcttctgtagcaaagtgcagcatttaactcaggaagctatattccccccaagtgtcattaatatttgcataagattaaaaacactccaccgcgcccagccaagtaaaattaaatat

SEQ ID NO: 3884 - DNA, 1127 bp, Homo sapiens
  misc_feature (1)...(1127): n = a,t,c or g
ggaaccgccggangatggcagactgctctacttcccatcttccagtgggggttaaaaaaaaaaaaaggccacaataacaacagaaatttaactgaaagtgatgtccaaactcaaagtagagtataataccacctggtaattaatgtcatacctgacagagatatataaaaagaatgaatgactacagtcaaattcaacttaaagtttaagcagaatcccaaatttaagtaagtctcttttcattacatagatatttgatctgatcagagcaatttgctttgagaccaaagagatctggcattttacttattcattaggaattgaaaaaagaagacctttggctttctaaccagccatttcattcatggcatcaacagccgatggcagccacatggaaatgtatgctggatatttggatagtttaaatattatgtacaaggaatagcttataaccagtgaaaataataagaacataattcagcataagtgtccaagataagatacaaaaaagcagagaaagtgcttgagtctacaggtcttccctgaaagtttcaaaaatgtttaattcttaagcaggtaggccttttaatagaatttgcatagcagcatacaaggtaatttgcattaaaatatatgaacagagattcttccatggcttggaaaccaaatatatcccacatgcatataagttaagcaagaagacctggaatttctcacaaaattaaaaaaaagaatctattatgaccttttctcacactttcgcccatcaaaaccatttacagcaaaacctgtttctaggagaaacatagccttgtccagattccacacagcttaaatttttttttaagcataatttctggggccaggtgcagtggctcacatctgtaatcccagcactttgggaggctgaggcagaaggactgcttgagtgccaagagttcaagaccagcacagtgaaagatttagcttaaagggtggaggcgggcagattgctacaattggtttttaaagacagtatgtggaaagtcagaataattttagattaccaagcaattagggggcacagagaaagaacagcaggagatggcagactgctctacttccatcttcagtggggttaaaaaaaa

SEQ ID NO: 3885 - DNA, 384 bp, Homo sapiens
atgtagacaaaaatccctgccctggagcagcttacattctagcatggcaaacaggcagtaaacagcccattctggctgctgtattgagaagagaatgtggtggacagatatagaagcatggaaacctgataggactattgcaatcactcagaaaagaggcgatggcagcttggacctgttggaagcagtagagtggttaccagaaaatttaaagttacgccagtcactcccattctattgctgagagaaaatacagagcggtgaagagcttacagtcggcttgttgaagatgcatatagactaccggaaagaaatgacttcttcttgcactttatgaatcaattttatttttaaaataaaaaaattaaacatcaaaaaaaaaaa

SEQ ID NO: 3886 - DNA, 565 bp, Homo sapiens
aagacaaaacttcacccttctggtgtctgtgggaacaagtcctgtcttctgcgacctagccagagttgatcctaagatatccgcccgaccccaaagtctccctttgcaatgtcactatgtgtactgctcaccaacactccaggaagagccggccatggcaggcggggactgtgtggcaagcctggttctgggcgccggcggaccggggctccggcgcggacatggcaaggtggccatgagggggacaaaatggggcgggaaggcgcagagtctcaggcgcaggtccagcttcttactgcgtcgccgccagcttgtcctgcagcctccttttcctccagtccaagtagcgcctccgcagtcggttcgcctgccagcccagggagtactccacaagcgaaggctactagcacggacaactgcagtgtcctctctgacacatccgccatggctggctcttcctggagtggtgcttgttgaagatgcatatagactaccggaaagaaatgacttcttcttgcactttatgaatcaattctatttttaaaataaaaaaattaaacatctg

SEQ ID NO: 3887 - DNA, 2799 bp, Homo sapiens
  SIMILAR (97)..(1614): 1001254mologous to Homo sapiens zinc finger protein,accession number AF027514,Smith-Waterman Score=2784.
ttccgctccaggaaggcgaggtcggatctgagatatctcccagggaggttcatcttccccggaactctgccttttcccagaaggaggaggggaaaaatgaccaagttccaggaggcagtgacattcaaggatgtggctgtggccttcactgaggaggagctggggctgctggactctgcccagaggaagctgtaccgagatgtgatgctggagaactttaggaacctggtttcagtgggacatcagtccttcaaaccagatatgatatcccagttggagagggaagaaaagctttggatgaaggagcttcaaacccaaagaggtaagcattcaggagacaggaatcaaaatgagatggcaactcttcacaaagcaggattaaggtgcttttcactgggagagctttcatgctggcaaatcaagagacacattgcgagcaaattagccagaagtcaagactccacgataaatattgaaggaaagagctctcagttccccaagcaccatgattccccctgtcaagtgggagcaggagaatctattcaagcttctgtggatgacaactgtctagtgaatcacataggggatcattccagtatcattgaaaatcaagaatttccaactgggaaagttccgaattcttggagtaaaatatatctgaatgagacacagaattatcagagaagttgtaagcagactcagatgaaaaacaaactatgtatatttgctccatatgttgacattttcagttgtatttcacaccaccatgatgataatatagtgcacaaaagagataaagttcatagcaatagtgattgtggtaaagataccctaaaggtatcacctcttacccagcgtagtattcacacaggacagaaaacctaccagggtaatgaatgtgaagaagccttcaatgatagctccagtcttgaacttcataaacaggtacacttgggaaagaagtctccagcgtgtagtacacatgagaaggacaccagttatagctcaggtattcctgttcaacaaagtgttcgtactgggaaaaaacgctattggtgtcatgaatgtggtaaaggtttcagtcagagctcaaatctgcaaactcatcagagagtccacacaggggagaaaccctatacatgccacgagtgtggtaagagctttaatcagagctcacatctttatgctcatttgcctattcacacaggagagaaaccctatagatgtgacagttgtgggaagggcttcagtcgtagcacagatcttaacattcattgcagagttcacactggagagaaaccttataaatgtgaggtgtgtgggaagggcttcactcagagatcacatcttcaggcccatgaaagaattcacactggagagaaaccatataaatgtggggattgtggtaaacgctttagttgtagctcaaatcttcatacccatcagagagtccacactgaagaaaaaccatacaaatgtgatgagtgtggtaagtgctttagtttgagctttaatcttcatagtcatcaacgagtccacacaggagaaaaaccatataaatgtgaagagtgtggtaagggttttagttcagcctcaagtttccagagccatcagtcagccagaggtcaaatcttcaagtccatcagataattcacactggagagaaaccatttaaatgtgaggaatgtgggaaagaattcagttggagtgctggtctcagtgcccatcagagggtccacacaggagagaaacccctatacgtgtcagcagtgtgggaagggcttcagtcaggcctcacattttcacacacaccagagagtccacactggagagaggccttacatatgtgatgtctgttgtaagggcttcagtcagaggtcacatctcatctaccatcagagagtccacactggagggaatctgtagaaatgagaggtgtggttcagccttcagttagagctcacatctttgtctccgttgggaagtccatgctgatgattgtgaaaagttcctttaaaactagaagcttcaaagaatcttgacaggaaagaagtctctccaaatgctgtgttttagacttggttaggacatgaattctttacaaacgtcatatttcacagatgcgagaaaactttggttctgtaaatatgatcagtgtttatatcagagtaccaggtgtcccggttctcaagatgtaacacagcagaaaagtcttgtcggagtctgcacaggagagaggccttcctttaacaaaagtatgattgacagaaaaaatggatgtcaactaaaatgtaacctctatgtaaggaggtgtttttcacccactctatctctaccatgtagaaattgtgcttggctcataatagggcccagcaattactgaagaaagtgaagaaaatacctataattaggacaaatacttgaaaattctagtctgttttctactctaaatttatattaatttatattcaaaaggaatcctgcaagtagccttaataacgttagtttcagtaagtactgaaaagtatataatactgccatccatactaacacaaatttggaaaaaagacatgaatggctcccatccttcagccttagttctttgtacagtgtatcatcagttgtgtacagtatgatttttagtgtcagtttatagactgaacaatactgtttttatctaatgtgaccctgcaatttacatgattagaatttttggacactaagctgtactgtaactctgaaagtgttaaaagtagttactgatgacaaaaagtttcttagtaaacttgaattgttaaa

SEQ ID NO: 3888 - DNA, 2878 bp, Homo sapiens
  SIMILAR (931)..(1458): 1001254mologous to Homo sapiens PACAP precursor,accession number X60435,Smith-Waterman Score=912.
atgcacagcagcgtctacagctcacctgccgccgccggactccggttccccgggatcagggtgagcattacagaggagggtgttttcaagacaatgtcatcagaacccctcctgaataatggaagtcgggattcagaagatgaagagacttccctacatgggaccagacaggtcccgctgcagcttctcctggaggtaattggcgctgagttccctggcggtagtccagctggggcggcagcccagcggggacagaaccccagctcggacccctgccacgctgctttgcgcccttacaggagccacttccctcacggccaaggccagattttcatgaataggaaagctctcctgcagagagatgtcaaacatgcccagctagacaatggccatgagcaacaaaagatctcggtagcagcagcagaagccgcagcttcagaggcagccggagagacctcggagcagagaaggcgccgccgaccctcgcggctgcctggcccgcggctcctacaaaggcgggctagccgcccgccctctcccttgccttcctccccttcttttctgactttccctctttcccttaatcgcctgcttcttcctccgggtggacttacggccaccttgctcctccgcgcttcacctcatcgccccctctttctttcttctgcctctctctctgcgcccccttctctccgtgtcacgctccctcctggttctgcgcgtctacaaacttttgagcagaacacgagcctcggcaaacgagtcccgcagctcctcctgctgctcccgctggttcctgcggcttctgctcagacaccaacgccagacggcgatgcctctcgggtggtgactccagcgcaggaacttgaagaagcgctttgcccgccgtcctacctggcagctctcctggcagcgggaggagttgaaggaatgaccatgtgtagcggagcgaggctggccctgctggtctatgggataatcatgcacagcagcgtctacagctcacctgccgccgccggactccggttccccgggatcaggccagaggaagaggcgtacggcgaggacggaaacccgctgccagacttcggtggctcggagccgccgggcgcagggagccccgcctccgcgccgcgcgccgccgccgcctggtaccgcccggccgggagaagagatgtcgcccacgggatccttaacgaggcctaccgcaaagtgctggaccagctgtccgccgggaagcacctgcagtcgctcgtggcccggggcgtgggtgggagcctcggcggcggcgcgggggacgacgcggagccgctctccaagcgccactcggacgggatcttcacggacagctacagccgctaccggaaacaaatggctgtcaagaagtacttggcggccgtcctagggaagaggtataaacaaagggttaaaaacaaaggacgccgaatagcttatttgtagcgatgggttaccagctaccctgtgtatacagccctgacgcaatgaaaagtcgttttccaaactgactcaacagtcatcgctcgtgtgttctatccaaacatgtatttatgtaatgaagtaaagccattaaatgaatattttgataataatattgtttttctttctacaaagcactagagaatgcacagatatactttgtggaccaattattgatatatattataaatatatataaagaatatatatatatatatatatataaagtatagagagaagttcatacaaagcgtgcacaaggattgaaaattcgcccgagctgtttatgtttttataaaaataaatagaaaagtagacaatcattgttttgaatattactcctatttttgtaaactggaattaaaaggatagtatttttatccatgacaggcctgaagatattactacttaccatttgctactgtacataaacaatgatgccctgctccagggagattttgaggtaaagatatggagaattgctgaagggcattctttcccagtgagtctctggggcaggctgcttcaatcccagcctaactcaactgggctctgtccccctggttgggtggcaattccaatatttctgctttctttgattctccttttatgtgtagttgtctctcttcagactctcagcccagaagaaaattctcctgataaaacaacagctcgatccaaattgtgcttctccccagaattcacgcctctccctaggagaagagttgaggaactgtacagaaaagggcggcttcgttagaccgctctcttttctgtacttcctgagtggccagggaatctaatatccccaaattagggcaattggaacaaagtgaaggacatagaggtatatttggaagaggcagagccttgaggtggtaggaggaggaccctggaaatggactggtttgagattgccccaggtctgggaagcctgagggcaaatccagtcccaatggtcctgactttgggcgctgggtattggaaatggatgcaaagtacaatgtgtttttctccagtgctgtccatgcttctcatcttgtgaaatggccaggatcctctcctttgaaacctgctctgtaggagctacccttttcctttgtggttttatggagacctctccttcctaccctcctgcactgtttaagtactgtttaccatttttcattcacttctcttaaacttgtgaatgcttctcactttttttttttgtttgatgcaggcacttattgtaaattttagaaacccctctgtagccacctagtaagtaattatgcactaaatatgaaccctttgtttcttgtttattgagtttgtaggtaaaatgtatttttctacattattgcttattgcttagtaaaatttatttcataaaaccaaa

SEQ ID NO: 3889 - DNA, 826 bp, Homo sapiens
ggtcccattcggctgtttcccccaccagaccccagggaagccggggcccactccgatccgcctgggctcagctaagcacggaagccaagggggctgtgccgtgaagctgggctcgcgccggggctctgggtgtgtgcgcttggcgtgcagggtggacgcgtggggttccgtgtccccagcagtgagggccctagaggacgccttctcccatgggtactgatctccacgggttttcacatctttgtactgggcctgcctcaacttcccctaacagatatgcatattccttccagatgcctcagtgctacaccacagtgggcctggtcccaggacaggaatgcggttcaaacccaggggcttgaaactttctgagaaactgtatcatatccagccccctaaaaatgttacaaatgttaacttgttcaagtcccaaacaaaaaaacaggttcccttaatgtttcctgccctttctccaacccagggtcgctcccatcaccccaaacaaaagaacaaggtttgcccaggatgtcccgaagtgcccccctggcccctggctctcgtgtgcatggacgtgccctgaggggtcccgggcacggccatacgcaggacccctgtgcccggggaggcgctgcagggattccccatccggtcgtccttggggccagcccgtcttatggactctgccttgctttgcttatgtttagctgtttctctgctacctttcgagcagacttctttactacactgcactggattggtatatttttaaccagaaataaaccaaagattagagcatgttccagttaataagaaaaaaaaaaaaaaa

SEQ ID NO: 3890 - DNA, 791 bp, Homo sapiens
  SIMILAR (540)..(355): 981254mologous to Homo sapiens Human secreted protein sequence encoded by gene 15 SEQ ID NO:75,accession number AAB44776,Smith-Waterman Score=317.
ctcaggcagggcaggagagtcaggttgagactgggtgcattcgtaccggggggacgaggatgggcagaaagtgggacacgaatgagtgacaaagacaaaactactctggtgacaggaagaaggtaggagattcacaggcagaggctccccagagtgtttttccacagtgtgaaagaaaggatgagaaaagaatcaggaaggtttaggggagtcagggttgtggggccctggaaaggactcatagcctgggccactgggacgtgagcttggacagcagagcgtgtggattcagtgcagtacgtgtgacacagagaggactgcatctggtggagcagtgggtgcggggccaggtcaagaagggaggacacacctgagaacacgaattaggccagtggcagaatcgcaggtggtgctgagagaacgcagcatggtgcaggtgggacagtaccgtgctatgcagtagaggaggaaagcaggagaaacgaccaacctgggcccaggagctgggagctgggagagcagagggtgagtttgcagcatatgggagagcaggacagaggagaggtgttccccaatgggcaagaagaatgagttggagcaggttatggaggccagcagcttacagaggtgagcttgttgagaggatcagggaatgtactgcagcaagggaggcatgccaagagcaagagtgtgggtgtgaacgtagagaatcctcctttttgcccaaaaggggcgaagtgtttgatgcaggtcatggaggagaaagcatggtgtgggtaagacacggaagg

SEQ ID NO: 3891 - DNA, 870 bp, Homo sapiens
tttttttttcaaacaaagaaatacagcaactcagtttattacatgcagattcttctgcattgttgctaacagttcactggtccaaaattactaaaatacttaaaaaactatacattatgtaaacaaaacataaataagacagcatagttccttgtaacatatatttagtacaggttgttagggattctggaatatgtacaatttttacatccatggactgcatttttccacaatgcataaatatatatatgtattttttttttttacagaaacaaaaataagatttcacctaatgacactgaatccccatatcatagatatggctgcaacagtcccaaattcaaagaagaaacatgtcaatgtaaatgtgcaaaaggctagcttactctaaactattcaaactttgttcactttatgttctacagacaggtaaatcctgactttaaacacagaaccttgaaaccctcctcagaacagtaagtgaaatggaacagatctttccctccccaagaaaacaaagccttgttgcaagctaatgaaaagatacattaaaacacacacacacacacacacacacacacacacacacacacacacacacacaatgtatagtatgctttcaacagtataataaacattgcaaaatttttatgggagtcaaaacaatgccccattatttaaaaactggctcttttagtctaaattcaagatgcagctctgtcaggcttctctaagcccgacgactgaaaagcagggaagacagacgcaggacttcgactggcagatacaacaatctgagagagagatggagagagtgaagaaaccttagatgctggagtatttatggtattcaaaatggctccttctggg

SEQ ID NO: 3892 - DNA, 2363 bp, Homo sapiens
  SIMILAR (138)..(2123): 1001254mologous to Homo sapiens protein kinase A anchoring protein,accession number AF037439,Smith-Waterman Score=3405.
gcggcttgttgataatatggcggctggagctgcctgggcatcccgaggaggcggtggggcccactcccggaagaagggtcccttttcgcgctagtgcagcggcccctctggacccggaagtccgggccggttgctgaatgaggggagccgggccctccccgcgccagtccccccgcaccctccgtcccgacccgggccccgccatgtccttcttccggcggaaagtgaaaggcaaagaacaagagaagacctcagatgtgaagtccattaaagcttcaatatccgtacattccccacaaaaaagcactaaaaatcatgccttgctggaggctgcaggaccaagtcatgttgcaatcaatgccatttctgccaacatggactccttttcaagtagcaggacagccacacttaagaagcagccaagccacatggaggctgctcattttggtgacctgggcagatcttgtctggactaccagactcaagagaccaaatcaagcctttctaagacccttgaacaagtcttgcacgacactattgtcctcccttacttcattcaattcatggaacttcggcgaatggagcatttggtgaaattttggttagaggctgaaagttttcattcaacaacttggtcgcgaataagagcacacagtctaaacacaatgaagcagagctcactggctgagcctgtctctccatctaaaaagcatgaaactacagcgtcttttttaactgattctcttgataagagattggaggattctggctcagcacagttgtttatgactcattcagaaggaattgacctgaataatagaactaacagcactcagaatcacttgctgctttcccaggaatgtgacagtgcccattctctccgtcttgaaatggccagagcaggaactcaccaagtttccatggaaacccaagaatcttcctctacacttacagtagccagtagaaatagtcccgcttctccactaaaagaattgtcaggaaaactaatgaaaagtatagaacaagatgcagtgaatacttttaccaaatatatatctccagatgctgctaaaccaataccaattacagaagcaatgagaaatgacatcatagcaaggatttgtggagaagatggacaggtggatcccaactgtttcgttttggcacagtccatagtctttagtgcaatggagcaagagcactttagtgagtttctgcgaagtcaccatttctgtaaataccagattgaagtgctgaccagtggaactgtttacctggctgacattctcttctgtgagtcagccctcttttatttctctgagtacatggaaaaagaggatgcagtgaatatcttacaattctggttggcagcagataacttccagtctcagcttgctgccaaaaaggggcaatatgatggacaggaggcacagaatgatgccatgattttatatgacaagtacttctccctccaagccacacatcctcttggatttgatgatgttgtacgattagaaattgaatccaatatctgcagggaaggtgggccactccccaactgtttcacaactccattacgtcaggcctggacaaccatggagaaggtctttttgcctggctttctgtccagcaatctttattataaatatttgaatgatctcatccattcggttcgaggagatgaatttctgggcgggaacgtgtcgccgactgctcctggctctgttggccctcctgatgagtctcacccagggagttctgacagctctgcgtctcagtccagtgtgaaaaaagccagtattaaaatactgaaaaattttgatgaagcgataattgtggatgcggcaagtctggatccagaatctttatatcaacggacatatgccgggaagatgacatttggaagagtgagtgacttggggcaattcatccgggaatctgagcctgaacctgatgtaaggaaatcaaaaggatccatgttctcacaagctatgaagaaatgggtgcaaggaaatactgatgaggcccaggaagagctagcttggaagattgctaaaatgatagtcagtgacattatgcagcaggctcagtatgatcaaccgttagagaaatctacaaagttatgactcaaaacttgagataaaggaaatctgcttgtgaaaaataagagaacttttttcccttggttggattcttcaacacagccaatgaaaacagcactatatttctgatctgtcactgttgtttccagggagagaatggggagacaatcctaggacttccaccctaatgcagttacctgtagggcataattggatggcacatgatgtttcacacagtgaggagtctttaaaggttaccaa

SEQ ID NO: 3893 - DNA, 346 bp, Homo sapiens
  SIMILAR (1)..(345): 1001254mologous to Homo sapiens CSaids binding protein,accession number L35264,Smith-Waterman Score=605.
ctgaagattctggattttggactggctcggcacacagatgatgaaatgacaggctacgtggccactaggtggtacagggctcctgagatcatgctgaactggatgcattacaaccagacagttgatatttggtcagtgggatgcataatggccgagctgttgactggaagaacattgtttcctggtacagaccatattgatcagttgaagctcattttaagactcgttggaaccccaggggctgagcttttgaagaaaatctcctcagagtctgcaagaaactatattcagtctttgactcagatgccgaagatgaactttgcgaatgtatttattggtgccaatc

SEQ ID NO: 3894 - DNA, 399 bp, Homo sapiens
tttcgtgtgagcgggctcggttttgggccgcggcggtagcgggagtcgccgccactcgagtgcgcaggcgcctggcgattaccggtctcaccatggagcggaaagtgcttgcgctccatgcccgaaagaaaaggaccaaggccaagaaggacaaagcccaaaggaagtgagtcttgtaccccaacatcccattctttggattttcctccggcaccttctctgctctggtttcacgtcttgaacgtgcaccgggtttgggcaccctgtggctgcagccacatggcctcggggcagctcggagggtcgctctccagcaaccatgtggaagagagctgctgttgctgaacgccaggcctgggtcttaacagccccgggcctgctggaaagggctgtcggagg

SEQ ID NO: 3895 - DNA, 1017 bp, Homo sapiens
  SIMILAR (543)..(211): 821254mologous to Canis familiaris p38 mitogen activated protein kinase,accession number AF003597,Smith-Waterman Score=464.
tcaggcccctcttccatagggctgctgcagtttgctgggggtccactccagactctttgcctgggtccctcctgtacctggaggtgtcaccagtggagactgcagaacagcaaagatggctgcctgttccttcctctgggagctccgtcccagaggggcaccaacctgatgccagtgggaatgctcttgcataaggtgtctggcgacccctgtctggttgtaatgcatccagttcagcatgatctcaggagccctgtaccacctagtggccacgtagcctgtcatttcatcatctgtgtgccgagccagtccaaaatccagaatcttcagctcacagtcttcattcacagctagattactaggttttaggtcctgtgattttatgtgtttgaattttccattagaaaagttgtttacttgtttgtttaagccctttagacctcggagaatttggtagataaggaactgaacatggtcatctgtaagcttctgacatttcacaatgttgttcagatctgcccccatgagatgggtcaccagatactgttgtttattgttatctgcttgtacaatgttcgtggaggacagggttattttttgttccctgtagtatctaaagtaccgagaacagtgtacatcattgaattcctccagagaccttgcaggtgtaaaaacgtccaacagaccaatcacattttcatgtttcatatgtttaagtaaccgcagttctctgtaggttcttttcgcatgaatgatggactgaaatggtctggagagcttcttcactgccacacgtaaccccgtttttgtgtcaaaagcagcactttttgttatgttgccatgggaatctatgtttgcaggaaaacttattttctgcaacctgatgatagagcagtaaaagagggggagctccatgtccaaccagtgtcctatatcaccttcttcaggtttttgctcaattgttactttatcaatgatgcttaccgtattcacctttcttaaaagtgcaacagccat

SEQ ID NO: 3896 - DNA, 1281 bp, Homo sapiens
  SIMILAR (694)..(1254): 361254mologous to Homo sapiens Nuclear localization signal at AA 569-573, 576-580, 579-583; acidic transcr. activ. domain 620- 640,; homeobox motif 653-676,accession number L02785,Smith-Waterman Score=268.
atgggatttcgacagagttttgaaaaaaaaaaaaaaaaaaaaaggcccggagagagctcccttcctggtcagttttgttcagatgaccgcagtcttcgggttgggctgtgcccttctgcttctcccggcagttccccgagcttgtctgctcagaggacccagggtccggagccccagcgtgggcgcatcacgggagagggtccttctgctccaggtaggcagggagacccccaaggaagcggcccttcccccggtgcctgttgccgagcagcaaccctccgagaggggaaggcgcagggtgctagccagaaccgagctccagcaccaccacctacctctcgcagcggacctgagtgctgcacacggtggaccgcatacctgcgacacgaggcctggcaccaaataggccctcgatcaagaatagcaaaacctcggagagagaaggagccttggtatacaggtttaccaaataccaaggggatcccacgactcaggtatgaggagggcgacccaggccacaacggctcgggaaccgccgccggtatccgcgtccgcagcgccgccagccaggcgagagccgtgtgggatcccagcgcccgcactcccgcccccgccaaggagccaggaatggcacaactagagaggagcgccatctctggcttcagctctaagtccaggcgaaactcattcgcatatgatgttaagcgtgaagtatacaatgaggagacctttcaacaggaacacaaaaggaaggcctcctcttctgggaacatgaacatcaacatcaccaccttcagacaccacgtccagtgccgctgctcatggcacaggttcctacgatgcgtgcttacaatctttcccttcctagaatggatgtgtatgtatcgattaaaggattggcttctgggagacttacttgctggtataagtgttggccttgtgcaagttccccaaggcctgacacttagtttgctggcaaggcaactgattcctcctctcaacatcgcttatgcagctttctgttcttcggtaatctatgtaatttttggatcgtgtcatcaaatgtccattggttccttcttcctggtgagtgctctgctgatcaacgttctgaaagtgagcccattcaacaacggtcaactggtcatgggatctttcgtcaagaatgagttttcggccccctcctaccttatgggctataataaatccttgagtgtggtggcaaccacaacttttctgactgggattattcagaaatcatctaccactgatttaggatga

SEQ ID NO: 3897 - DNA, 3758 bp, Homo sapiens
  SIMILAR (3396)..(3043): 1001254mologous to Homo sapiens CSaids binding protein,accession number L35263,Smith-Waterman Score=611.
aaatttgaaaaataggctttattttaaccagtggtattgtctgacatcctatacggcataactgattacagccaagttcatgaatacaaataaaatagcaatttccctcattctctcttttgttttctgttcagagaaatcaggagatgggagcattatgctcagaaaccgaagagctcttccaagagctccagcttagagtccaggcttccagagcatgcagcctcctaacacgtatgtggtcacatgtgcaaagacctttattacaaaatattcagagcagtatttctgtaggaaatcacacgagcatttacaaccaaacatggctgataaaattcatcttgctgtggatggtgaggatttgaactgcaataaaggagatgaggcctttactttaaaggttcactttccttgaaagggggagagtcccgggtgagagggaatcgccatcagtctgcctccttccttcttgctccagttgactcagggggtccaccctgtccctctggagtacatgtatcactgcactgattgagaaatggaaacaccttggcccaaatacaagattctgtcacacagccaacactggaagtgactttatactttcttattacacaaaaggcttaaatatatgagtcctcatgtagaacaaaatgcctgaaattcagcaagttatgaaaacgacacttctccacccctgaggatattttatctttataaagttgaaaatacaaaatattaaaataatttgccctttctccccatcaaaaggaatcacattctcaaagggattcctacaatatacaaaattctgaaacaaaatttatttctccccaaaccaagaagtcaatgttaagctgccaagaagacccttttccataggagtggaaaagacaccttgttacttttttattttaaagtaatcatatttagagaaagacagcaaaaggagtttctggccttatgggctttaattttttactttgattttcagcatttcttagcattagttattgggagtgaagagaataacttgtttccgaagtttgggatattcctgggaaaagccctggtcttttcccatgataattcctcaaaaatagttggttgaaaacagatggcatgaataaaaatgctatacatccacctgttcctcttttcatgattttcacatcaaaagcacctgaagtatcaattgtgttcaacacagaatagcactaggggctgaagagaggtgatatcacttgccataatatcagctgaggtgacatgggatctaaactacccaagaagtcttcactggcaaacctgcctgacaccagggcctcctgaagagagcaggacaagcagctgtgcatgctcaaatagcaagacgtgcaaaacacatcctcactctgctagaaataaagagtacacaggaagtacatgacatcaagaacctgcttctgactactggggcagatattcaagaaacctctgcaccaaaggtgaagggtaagcagagaaatggcaacacctgggggtgagggagaaagagagacgcacatatacgcatgtgctcacatgcacacatgaccgcctatgaaggctgcctgattactccgggcccacaagcagctgtccaacagccctctcgacttgcccggctcagaacttcagcagctgcagtcttttaactatctacactttcttctctccttttaaggcacaaacatatttacagtttcaaatatactgtcaagatctgagaaccatactaagcaagttaatcacaggctagtgcacagaagccagttggtcctttttggctgtacgtatcactgagggacggtgtcaggtctgaagcaaccagaaggtatgggccttctctccgtgccactgtgggatgttgtcaagtctacgccccaccgtcaaggtggggtcacaggagaagccaaagtggcaaaagcatgaccgggattggggacaattcatatttttttactttgcattgaacatattcctaaaaggacagcagctcttgtctgcctgagccaactctcagaaagaagagcaaggtggaggctgccctggagcatccacaacctcctgtaaagtcactgtgatcatagtttgttcatattgtcttaccctcccacaaagacagacacacacatgcacacacactaacacgcacgcacacgcacgcacacccccttccaccatggaggaaatctctgcaacaagaggcacttgaataatatttggagagttcccgtgaaaaggccttcccctcacagtgaagtgggatcaacagaacagaaaccaggtgctcaggactccatctcttcttggtcaaggggtggtggcacaaagctgatgacttcatcataggtcaggcttttccactcatctataaggaggtccctgctttcaaaggactgatcataaggatcggccactggttcatcatcaggatcgtggtactgagcaaagtaggcatgtgcaagggcttgggccgctgtaattctcttatctgagtccaatacaagcatcttctccagcaagtcgacagccaggggattggcaccaataaatacattcgcaaagttcatcttcggcatctgagtcaaagactgaatatagtttcttgcctcatggcttggcatcctgttaatgagataagcggggggtgttcctgtcagacgcataatctgctgaagctggttaatatggtctgtaccaggaaacaatgttcttccagtcaacagctcggccattatgcatcccactgaccaaatatcaactgtctggttgtaatgcatccagttcagcatgatctcaggagccctgtaccacctagtggccacgtagcctgtcatttcatcatctgtgtgccgagccagtccaaaatccagaatcttcagctcacagtcttcattcacagctagattactaggttttaggtccctgtgaattatgtcagctgaatgtatatactttagacctcggagaatttggtagataaggaactgaacatggtcatctgtaagcttctgacattttcacaatgttgttcagatctgcccccatgagatgggtcaccagatacacatcattgaattcctccagagaccttgcaggtgtaaaaacgtccaacagaccaatcacattttcatgtttcatatgtttaagtaaccgcagttctctgtaggttcttttcgcatgaatgatggactgaaatggtctggagagcttcttcactgccacacgtaaccccgtttttgtgtcaaaagcagcacacacagagccataggcgccagagcccactggagacaggttctggtaacgctcgggcacctcccagattgtcttgttcagctcctgccggtagaacgtgggcctctcctgagacattttccagcggcagccgccgggcaagaaggtggccctgtggggcccccgcctgcacccgcaccctctccccggcccttgctgcccgcccagccgggcggggaccttgcgctggtcgcccgcgcaggtgcggctgccgcgaccccgcagactcccgcgcgcgcggctgctgtcagccgcagcggctggatgtgcccctgcgactggggcaagccccgctaagggcagggacgcgctccggcgctcaagactgcgcccgccgcgatctccctgcaccttcgcccctacaaggccgactccgggctgcgtcgcagtactcccgttccagctgctgcgcccgctaaggctccagtggtcgcggttcc

SEQ ID NO: 3898 - DNA, 4074 bp, Homo sapiens
  SIMILAR (2168)..(2251): 391254mologous to Homo sapiens solute carrier family 26 member 6,accession number AF288410,Smith-Waterman Score=57.
gtgattggtctgttggacgtttttacacctgcaaggtctctggaggaattcaatgatgtacactgttctcggtactttagatactacagggaacaaaaaataaccctgtcctccacgaacattgtacaagcagataacaataaacaacagtatctggtgacccatctcatgggggcagatctgaacaacattgtgaaatgtcagaagcttacagatgaccatgttcagttccttatctaccaaattctccgaggtctaaagggcttaaacaaacaagtaaacaacttttctaatggaaaattcaaacacataaaatcacaggacctaaaacctagtaatctagctgtgaatgaagactgtgagctgaagattctggattttggactggctcggcacacagatgatgaaatgacaggctacgtggccactaggtggtacagggctcctgagatcatgctgaactggatgcattacaaccagacaggaatggcacaactagagaggagcgccatctctggcttcagctctaagtccaggcgaaactcattcgcatatgatgttaagcgtgaagtatacaatgaggagacctttcaacaggaacacaaaaggaaggcctcctcttctgggaacatgaacatcaacatcaccaccttcagacaccacgtccagtgccgctgctcatggcacaggttcctacgatgcatgcttacaatctttcccttcctagaatggatgtgtatgtatcgattaaaggattggcttctgggagacttacttgctggtataagtgttggccttgtgcaagttccccaaggcctgacacttagtttgctggcaaggcaactgattcctcctctcaacatcgcttatgcagctttctgttcttcggtaatctatgtaatttttggatcgtgtcatcaaatgtccattggttccttcttcctggtgagtgctctgctgatcaacgttctgaaagtgagcccattcaacaacggtcaactggtcatgggatctttcgtcaagaatgagttttcggccccctcctaccttatgggctataataaatccttgagtgtggtggcaaccacaacttttctgactgggattattcagctaataatgggcgtattgggtttgggcttcattgccacttaccttccggagtctgcaatgagtgcttacctggctgctgtggcacttcatatcatgctgtcccagctgactttcatctttgggattatgattagtttccatgccggtcccatctccttcttctatgacataattaattactgtgtagctctcccaaaagcgaattccaccagcattctagtatttctaactgttgttgttgctctgcgaatcaacaaatgtatcagaatttctttcaatcagtatcccattgagtttcccatggaattatttctgtgcttgcgctccaggcccgaaagaaaaggaccaaggccaagaaggacaaagcccaaaggaaccacatggcctcggggcagctcggagggtcgctctccagcaaccatgtggaagagagctgctgttgctgaacgccaggcctgggtcttagcagccccgggcctgctggaaagggctgtcggaggaggaccagagcccgcccgctttctgcttcctgtaacaccagatttcagccttcttcccaagataattttacaagccttctccttatctttggtgagctcctttctgctcatatttctgggcaagaagattgccagtcttcacaattacagtgtcaattccaaccaggatttaatagccatcggcctttgcaatgtcgtcagttcatttttcagatcttgtgtgtttactggtgctattgctaggactattatccaggataaatctggaggaagacaacagataaaattacaacaggctaacctgagaggtgtcccatctcaactatgcagagtgacaaaatgtcagagagctatcggaattgaaactggggttgcccggggaatgagtcagcattcagacgccagagaaacagtggcagaggtcaaagacaagcttctgctgcagaaacatagtaaaagaaaaattgacatgcttctcaccaagcagaaggcctcagttgcagacagggaccaatacgttcctgatggtttctctccaactggctctgtctcctcagtttgcatctctggtaggcgcaggtgtgatgctgctcctgatggtgaagatgggacactttttctacacactgccaaatgcagaataactgctggagcacactcctctctggagcacaaaaccggaggtcagaaaggggaaacagcaagaaataaaaggtggaggatagaatgtgatgagaggaggacccaggagaggcaaagaaatatgaaaggggataacttttggagccagatccctgaggagctaagaggggacggagctaagattcttctcctgggtcaaatccctaacaccaacatttatagaagcatcaatgattatcgggaggttgatatggtaaaggtgcctcttaaagaagaagaaattttcagcttgtttaattcaagtgacaccaatctacaaggaggaaagatttgcaggtgtttctgcaactgtgatgatctggagccgctgcccaggattctttacacagagcgatttgaaaataaactggatcccgaagcatcctccattaacctgattcactgctcacattttgagagcatgaacacaagccaaactgcatccgaagaccaagtgccatacacagtatcgtccgtgtctcagaaaaatcaagggcaacagtatgaggaggtggaggaagtttggcttcctaataactcatcaagaaacagcttcaccagggactgcctggatgtgggcggaaagcaggggggagggagatcactcatcccttactcagatgcgtctctacttgcccagtgtccacaccatcatcctgggtttctccatggtacattacgtggatttcacgggggttagtcgtattaagacagatatgcaatgcctttcaaaacgccaacattttgatactcattgcagggtgtcactcttccatagtcagggcatttgagaggaatgatttctttgacgctggcatcaccaagacccagctgttcctcagcgttcacgacgccgtgctgtttgccttgtcaaggaaggtcataggctcctctgagttaagcatcgatgaatccgagacagtgatacgggaaacctactcagaaacagacaagaatgacaattcaagatataaaatgagcagcagttttctaggaagccaaaaaaatgtaagtccaggcttcatcaagatccaacagcctgtagaagaggagtcggagttggatttggagctggaatcagaacaagaggctgggctgggtctggacctagacctggatcgggagctggagccttgaaatggagcccaaggctgagaccgagaccaagacccagaccgagatggagccccagcctgagactgagcctgagatggagcccaaccccaaatctaagccaagagctcacacttttcctcagcagcgttactggcctaatgatcatccgactatggctgccacccagtctcagactcatactcggacatggtcagtggagaggagacgccatcctatggattcatactcaccagagggctacagcaatgaagatgtctatgagacgaactataaatagggggtcagaataatgctggcaaatcctccctacccaaaaaggggtcaattgtcccagagacctagactggatacgaactagcagtacttccttcctgactgtgactcctactacctgccagccttcttccattgctctgcggctgggatcatactcccaaatcacattactaaatgccaacaattatctctgaattccctatccaggctcccctcatttcaccttcagcatatattctagtcatgaatttccttcttcacacaccccacatctctgggctttgtgccagaccatctctaacttaatcctctcatccctgttcccctttctccaaagagatgaagctcaaataaaatgtataactct

SEQ ID NO: 3899 - DNA, 701 bp, Homo sapiens
caggagtgagaggcaagactacccccttgctctggcacctcctggaaggtgagtgctccgacctgggccctggaccacagccacatgcagggggcggagggcctgtgcacaggggcagcagctttggctgctgcacttatttagccttgggccagctgccttttcagaaacgtgccacctcattccccatccgaccaggcccatgtccgtcttcaactgtgggagatccctgcctgtgacctgctcctgaggggcccagccccacaaaggccttagacttctagtggcttgggagtaaaggagaaggacacaggggcatcctgccctgccttcccttccccctaacaaagctgaaagacacgtatttgtatgtagtctcccatttgtgacagatacatgtgagctgaaatggctttaaaagcacagctgtgcagaccaaaccacgcccatcccaccgagggctcaggttaggcacccaaaagatgcaaacaacccaaatgtctgtcaactaatgaacaggtaaacaaaacatggcctgtccacacaacagaatattattcctccaaaaaaaactagttctgatatgtgccacaacactgaacacattacactaagtgaaagaaaccacttgcaagactacattgtctgattctatttacatgaaatgtccaggattgcaagatgaatagatacagaaagga

SEQ ID NO: 3900 - DNA, 398 bp, Homo sapiens
tccatatcaaaacgagggctgatggaggaaaaaggctctctgtatgaagagatgggaccgtcatcagcacattccctagtgagcctactggctcctggcagcggcttttgtggaagactcactagccagaagagaggagtgggacagtcctctccaccaagatctaaatccaaacaaaagcaggctagagccagaagagaggacaaatctttgttcttcctcttctttacatacgcaaaccacctgtgacagctggcaattttataaatcaggtaactggaaggaggttaaacacagaaaaaagaagacctcagtcaattctctactttttttttttttccaaatcagataatagcccagcaaatagtgataacaaataaaaccttagctattcaaaa

SEQ ID NO: 3901 - DNA, 7763 bp, Homo sapiens
  SIMILAR (7514)..(3708): 991254mologous to Homo sapiens Human tyrosine kinase receptor Flt1,accession number AAY70751,Smith-Waterman Score=6549.
tatatgttcatgattttatttaactgattaataaataagagtgccacaggatgttttaacgggttcaaaggagaatacaaagagcagagaatatataggcagacattcatgctgaaatgaatttgcttaataaaggcaaaactagccaatatccatagggtcgatggtcaaatatatctacactggataatttgcattttcatggacaggaattattggcaatttacacagttgtgaaataggtaaaacaaacaaaaagtgaaaggttcagaaaccccatacaatcagctaaactaacatttagttttccattgaaaatatttagcaattttttgagaccatttcaaagtttttcttaatttttctctgctctaaacaaggataaatttgagtttattttaggaaaaaaaagagctttttctttgttgaattagtattttgaaaaatttatggaaggagacagaacataaaagcagttgccaagtttatcaattaagttggtacgattacaaatcccaattaagaaatatttttaagtatattatatgaagatggtatacaaaatacattcatcatgactagaaatataggaccaaaccatgtctgtcttatatctgtagcatatattcttggtttgtataaaagtaactttaaaattccagtttccttaaatagttatgcacaaaacacacatacacccacacccacacacacacacacacacacacacacacacacacacacacagttacaccactgtcggcccaaagatgccactccctcctttaaatcaatttaaatgagggctaggcgaggtatctgtttgatgtttgcattcttgtgggggctagggaaacaagggcacggggtccctaaaattaacatctgcggtgtmcacytcytggatctgacaagagcacagacttgcacatggtttcagascccattccacccagactgttcccacgtacattatctcagaaactctgaaaggaagtgctcgttctttgttagtgccaaccatttttgtcataaatggcaaatgattggaatattatcagttaattcatgtttcaattttcagtgctattttaatgaacaagcactttgtaactagctcattattacaagtctccatttttctttctacattaagactccagatggaaccattctttgactgatggatggactcatgtatgctacaaacctgagtttgaaggagctgagtaacaattctaatggttttgcttttctcttgaaaaggagtatttattatggtctcttaatgattaagaattaattattgaaatcaagacatgaacagctaaggttttatttgttatcactatttgctgggctattatctgatttggaaaaaaaaaaaaaaaagtagagaattgactgaggtcttcttttttctgagtttaacctccttccagttacctgatttataaaattgccagctgtcacaggtggtttgcgtatgtgtaaagaagaggaacaacaaagatttgtcctctcttctggctctagcctgcttttgtttggatttagatcttggtggagaggactgtcccactcctctcttctggctagtgagtcttccacaaaagccgctgccaggagccagtaggctcactagggaatgtgctgatgacggtcccatctcttcatacagagagcctttaaacaaggatgtggcacataagaacagaggcatacattcttcggttacttagagctcaggttctacagttaaattacatggataaaaggaagcatactcttctccccaagaagcagcaatccactgttgcctctccagcttctgactggctgcagaaggtgcagacatcctaaatacatagaccctaacttgcataaatagcatcaaacagagccagcttagcgatccaaggcccacttgatctttagaccctgaagagtaggcgcatcctaaatacatagaccctaacttgcataaatagcatcaaacagagccagcttagcgatccaaggcccacttgatctttagaccctgaagagtaggcgccctttcctaccctgtctccctattcccatcatgctcagaccccaggcaagtttcaaagcagttgaaaatgggcttttcttctagtgatggctcattaactaatatcctgagtcccaactggagaaataccttgcataaattacataccacctttttactcaaggagcttaaagtgcttaatatgcgccagctaatgctcttccacatcctttcagattagtgtgagatagtggaatccccattaaatgaaaaggaaacgtgactgacttcctgtgttttgggtcccaactgtgttggtgaattggtttggttggtatagagacggggtcttcccttgaccttattgacctttttcctccatcagccctcgttttgatatggagaaaactctcctcaggactgcattttcattcttctcagctttctttcacaactaactgtgcaaaacagaataataccaagaaattgagttaagtgtctggactatatattaatacccaaaatagaatgtgacattttcagtgtaaggccatcatggcctggagacaacctaactctggctaagttttcagtgcatcttactagaggagccaaaagtatgggctcagagttgagtgccaccctcagtgctacaaatcaaaacatgccacgaatgagaatggacatagaaccacttccataggtaaaggtctaaaatttgctttagttccaaaaaagatatttgtccttttcttgcctcccagaatccagaaaatgtcccctcatcgctgtccatctgctcctggctgggccctcaaatgtagaagggtcagagctgggaagccactgaaatggcattgctgagccccgtccccctccgtgcccacatggtgcgtctcaaattctttctcatgccttctcccggtttctcttttctcccttgctttttgctttttttccttttcctcctcacatgtcttaggcctgctagaggactcccgagatgttgctcaggccagccagtgatcccctggggctaacgggcttgttgccctgggttttgggctgcagggctggcccagtggggtacgtgatgcattgggtgatcagtgcagctcctcaatcaaactggtcctgcgtgccctgaggtggcgggggttggagcagggaagtcattgggtttaggaaggatttctctaacactgagtaacatgaggatttagcagtagtgttcttcacttgtcactatttctctatctggagttacattcttgttagtcaaaaaaaaaaaagcactattaaaaaaatcacaaaaagcagctggctcccatggaaagataaaggtgtacaacttatgatatgcataatactggctgacgctagtttcctgggggtataaatacacatgtgcttcatagaaataaaggcttcgttaaaaacctctaagatgggtggggtggacttacaggcaccaccggagttgtagtctggggggcggggagcagcacgcgattttcctttccagctcagcgtggtcgtagggtgaacctgcgcttgccttcgctgacgtgcccacagctggaatggcagaaactgggcctgcttgacatcagacagccccgacttccttacttttactggttactcttcaagtcaatctttgagcgaggccttggggttttgcttgttcagtccaggggtgaagcgctttcagcatgggggagaggcccaacagagtgctgctgtcgccctggtagtcatcaaacatggaggtggcattcggtaaaagttcttcaaaggttttgattctttccaggctcatgaacttgaaagcatttacatatctgacatcatcagagcttcctgaattaaacttcggagctgaaatactttccttgaagaagtcctcagagaaggcaggagttgagtatgtaaacccactatttcctgtcagtatggcattgattgggatgtagtctttaccatcctgttgtacatttgcttgaagcaaatcacctagtttttccacaagttctgcaaatcttggcctttcttttgggtctctgtgccagcagtccagcatgatctgatagatttcaggagtagagtactcaggagctctcatcctcatgccttccctcaggcgactgcaaaagtcctcatccatttgtactcctgggtatggagacccacctaaggagaagatttcccacagcaatactccgtaagaccacacgtcgctcttggtgctgtagattttgtcaaagatagattcaggagccatccatttcagaggaagtcgagtatctccttttctcacataatcggggttcttataaatatcccgggcaaggccaaaatcacaaatcttcaccacgttgttctcagataaaagaatgtttctcgctgccaggtcccgatgaatgcactttctggaagacaggaactccatgcctctggccacttgaaaactgtaagaaatcagatcttccatagtgatgggctccttgtagaaaccgtcagaatcctcctcttcctcaacatcactcagacttttatcttcctgaaagccggagctcgcaaagctttcgctgctggtgacgctatctagtcttggtttcttgccttgttccaggcctggctccattttttctttcttaggctccatgtgtagtgctgcatccttgttgagaaaaaataagtcacgtttgctcttgaggtagttggagagatttccatatttgcagtattcaacaatcaccatcagaggccctccttgcttggtgcaggctcccagcaggttaaccacgttcagatggtggccaatgtgggtcaagatttttagctcagtcatcagagctttgtactcgctggccgtggccccctctttcagcattttcacagccacagtccggcacgtaggtgatttcttaatgccaaatgctgatgcttgaaccacttttccaaaagcccctcttccaagtgatttgcccagtttaagtctctcccgggcaaactcccacttgctggcatcataagggagccgctcacactgctcatccaaaggaacttcatctgggtccattataattgataggtagtcagtctttatttcagaagaagaccttttcatttttcggataaggagggttaataggagccagaagagagtcgcagccacacaggtgcatgttagagtgatcagctccagattagacttgtccgaggttccttgaacagtgaggtatgctgaactttccacagagcccttctggttggtggctttgcagtgatagacaccttcatcctcttctgtgactctttcaataaacagcgtgctgcttcctggtcctaaaataattccaggctcttgttgtattttgtggttgtttttaaaccaagtgatctgaggctcggggacaccattagcatgacagtctaaagtggtggaactgctgatggccactgtgtgatcactgaggtttcgcaggaggtatggtgcttcctgatctctgattgtaatttctttcttctggaggatttcttcccctgtgtatacattcctggctctgcaggcataggtgcctgaatcttgcagggaaacattcatgatggtaagattaagagtgatggagtgctccttagtgatggccattttttgcttgctaatactgtagtgcattgttctgttattaactgtccgcagtaaaatccaagtaacgtctctgtataagaacttgttaactgtgcaagacagtttcaggtcctctccttccgtcggcattttttccaagttaacatgaaacccatttggcacatctgtgatataaaagcttatgtttcttcccacagtcccaactttattggaagctatgcaaatgtagattccagaaattctagagtcagccacaaccaaggtgctagccatcttattctttccttctattattgccatgcgctgagtgatgctctcaattctgtttcccatgttgctgtcagcatccaggataaaggactcttcattattggaacaaaagtcacaccttgcttcggaatgattatggttacaggggtgccagaaccacttgattgtaggttgagggataccatatgcggtacaagtcaggatttgtctgctgcccagtgggtagagagccgggtctggaaacgatgacacggccttttcgtaaatctggggtttcacattgacaattagagtggcagtgaggtttttaaacacatttgactgttttatgctcagcaagattgtataattccctgcatcctcttcagttacgtccttgataattaacgagtagccacgagtcaaatagcgagcagatttctcagtcgcaggtaacccatcttttaaccatacaacttccggcgagggaaatgccttcactttcatagagagccggtaagaccgcttgccagctacggtttcaagcacctgctgttttcgatgtttcacagtgatgaatgctttatcatatatatgcactgaggtgttaacagatttgaatgatggtccactccttacacgacaagtataaagtcctttgtctttgttctgcattttgtcaatagtaagaacactgtagaatatgttggcatgggaattgctttggtcaattcgtcgccttacggaagctctcttatttttttcatcagggtaactccaggtcatttgaactctcgtgttcaagggagtggtagcagtacaattgaggacaagagtatggcctctaagtaatttgactgggcgtggtgtgcttatttggacatctatgattgtattggtttgtcgatgtgtgagatagtttgtcttatacaaatgcccattgactgttgcttcacaggtcagaagccctatttctttgtacgttgcatttgatatgatgaagccctttctactgtcccagattatgcgttttccatcagggatcaaagtgtcaagtggaaacttttttaaagtaacagtgatgttaggtgacgtaacccggcagggaatgacgagctcccttccttcagtcatgtgtataatttcggggatttcactgtacatctctacgaaaggtctacctgtatcactaataaatatatagattgcagattctgtttccttcttctttgaagtaggtacagctagatatttgcagctgtagaagccagtgtggtttgcttgagctgtgttcaaggttaaagtactgcagaattgtttgccatttcttccacaggcagatttagttatgctcagcctttcgctttccttactcaccatttcaggcaaagaccatttatgggctgcttcccccctgcattggagatgcagtgtctggcctgcttgcatgatgtgctgggtgccttttaaactcagttcaggatcttttaattttgaacctgaactagatcctgtgagaagcagacagctgagcagcgcgcacagcaggaccccggtgtcccagtagctgaccatggtgagcgcgacgcggcctgctcgcccggtgcccgcgctcccccggccaacgacccggccgccagagtccgtcctctcgttcgccgccgccggccccgcgccctgagcgcccgtctcgcggctccagccaggagacaaccacttccccgggtaatcctcgccgccaggcccgctggccgctgcacccgagccccggagcccgctccgagccgccgccgctgccggggaggagccgagaggagtgtccgc

SEQ ID NO: 3902 - DNA, 892 bp, Homo sapiens
caccctctttaacgctgttccccaggagctggggaaagggatgcttttgcccactcccatggcccctggaactggtggaaaccttttcctctaaacccagaaagcctcggatatcctttaattcacccaagggatccttggcgtggagtcttcctccctttcttcccaaagtctttctccggtgaacttttccttcctggacttttgttaaagcagaaccttcccagctctttgcctgtctccggttgtctcttccctgtattcatggcaacatcagctgacagccccaagttcacccctcggggcggaggatctcctgagtgattcatcagaaccccctgggctcaaccaagtgtcgtctgaagtgacctcccagctctatgcttctttgcgcctcagccggcaggcggaggccacggcccgagcccagctgtatttaccctccacctccccgcctcatgaagggttagacggcttcgcccaagaattgagtcgaagcttgtcagtcggattggaaaagaacttgaagaaaaaggatggttctaagcatatctttgagatggaaagtgttcggggtcagctccagaccatgctccaaacctcacgtgatacagcctatcgtgagggatcctctcattcctggcgctggctcagagagacgggaagaggactcctttgacagtgatagcacagccaccttgctcaacacccggcccctgcaagacttgtctccatctagctcagcccaagccctggaggagctgtttccccgctacaccagccttcggccagggcctccactcaatcccccctaccctctctcctctttgttctctcattgttgttattttaataaatgctcattagtctgtaaaaaaaaaaaaaaaacaaa

SEQ ID NO: 3903 - DNA, 2583 bp, Homo sapiens
  SIMILAR (46)..(867): 951254mologous to Homo sapiens protein kinase A anchoring protein,accession number AF037439,Smith-Waterman Score=1323.
atgaagactgaggtaggaacaggtttgggagaagatgacatgttcccttttagacaagtggaattatggaagatggcagtgaaaggcaaagaacaagagaagacctcagatgtgaagtccattaaagcttcaatatccgtacattccccacaaaaaagcactaaaaatcatgccttgctggaggctgcaggaccaagtcatgttgcaatcaatgccatttctgccaacatggactccttttcaagtagcaggacagccacacttaagaagcagccaagccacatggaggccgctcattttggtgacctgggcagatcttgtctggactaccagactcaagagaccaaatcaagcctttctaagacccttgaacaagtcttgcacgacactattgtcctcccttacttcattcaattcatggaacttcggcgaatggagcatttggtgaaattttggttagaggctgaaagttttcattcaacaacttggtcgcgaataagagcacacagtctaaacacagtgaagcagagctcactggctgagcctgtctctccatctaaaaagcatgaaactacagcgtcttttttaactgattctcttgataagagattggaggattctggctcagcacagttgtttatgactcattcagaaggaattgacctgaataatagaactaacagcactcagaatcacttgctgctttcccaggaatgtgacagtgcccattctctccgtcttgaaatggccagagcaggaactcaccaagtttccatggaaacccaagaatcttcctctacacttacagtagccagtagaaatagtcccgcttctccactaaaagaattgtcaggaaaactaatgaaaaaaagtcagggctttagattccctatacttcagcacacttcctgtagctatgtcaacctctgtggccacgacttcttcttcttgggactgcagtttctcttgtcagaaagtaggattcttggagctgctgtcattgctgctgtggctgctctgatgctgcctgggagtcgaaggagagaaaggaacaaaacaaaacaacccaggggatttcctccactctctttgatccgtatagaacaagatgcagtgaatacttttaccaaatatatatctccagatgctgctaaaccaataccaattacagaagcaatgagaaatgacatcatagccgggccggcgggcggctacgctaaccggcacagaccaccggatggactggccggcagccccgcaccagtgcacgaagtgggcgggacagaaacttctggggttggaagtccagtgaggctaaaagccgcaaggatttgtggagaagatggacaggtggatcccaactgtttcgttttggcacagtccatagtctttagtgcaatggagcaagagcactttagtgagtttctgcgaagtcaccatttctgtaaataccagattgaagtgctgaccagtggaactgtttacctggctgacattctcttctgtgagtcagccctcttttatttctctgagtacatggaaaaagaggatgcagtgaatatcttacaattctggttggcagcagataacttccagtctcagcttgctgccaaaaagggccaatatgatggacaggaggcacagaatgatgccatgattttatatgacaagtacttctccctccaagccacacatcctcttggatttgatgatgttgtacgattagaaattgaatccaatatctgcagggaaggtgggccactccccaactgtttcacaactccattacgtcaggcctggacaaccatggagaaggtaacccagaacttcaaacgtatcaaactacaagaagttttattggtagaactcataaaatataaggtgggaaaaccaagcagaatagcacagtggaaattgaagcagtccagcaaagtgattaagagcagaggccttgagtctggcctgaaaacagttaactgtaaaacagcttcagacaggtccttcaggaggtttccagaaggaggcattgttatcaaaggagatgacggctccatgcgtgttactgcccctgaagaccttccagtgggacaagatgtggagtccagtgtgaaaaaagccagtattaaaatactgaaaaattttgatgaagcgataattgtggatgcggcaagtctggatccagaatctttatatcaacggacatatgccgggaagatgacatttggaagagtcagtgacttggggcaattcatccgagaatctgagcctgaacctgatgtaaggaaatcaaaaggatccatgttctcacaagctatgaagaaatgggtgcaaggaaatactgatgaggcccaggaagagctagcttggaagattgctaaaatgatagtcagtgacattatgcagcaggctcagtatgatcaaccgttagagaaatctacaaaggatagtaagagactcactcactgcacttctgctcagttggcttctgcatcgggatcacacagccatcagcaggactgcccagttggtgagcacactccattgaccacgtggcgccagcgcttcctcaatgcacatgattga

SEQ ID NO: 3904 - DNA, 1131 bp, Homo sapiens
atggctggggaggtctcaggaaacttacaatcatggcagaaggaaaacgagaaacagacatcttctgcacagggcagcaaagtggaggtagtacaagcaagggaaataccagacacttataaaaccatcagatctcgtgaaactcactcattatctcaagaacagcatgggggaaactgccctcatgatccaattacctccacctggtcccgcccttggcacatggggattatgggatttacaattcaagatgtttacagccagtgtttacatgtgtttaccagtgtttacgtgtcttccatcaaccaagcactgaccttggctttggaatatgatgctaaatggcatacagtccagctcccaaggtactcagaagcctgggacagggaatctacttcaccctcaaatttcttaccctatggaggaatccttgtatttaacagagaccagccaacaaacagtgccccatactggaatgtcagaatgggaaggagagagaagatcacaagcgtcttgtgttgtgaacctcaaaccctgaaatctggcagcaccagggaagagtcctcagaaagaatggctctgtggttcccaaactctcccaaatccctattccctaagtgtaaccaatggggagcacaaagggctgtttttgtttcatgtgaagacgatgagcatgctatgaaccccgaagagctgttgtataggcaagtagaatgtgtttggctgtggtgtggtaaagctgactgtgttacacagagagtggtggaggaaggaggagaagcaagtgaagacaatgaagaggcaggattttgccacattgccaaggctggtcttgaaatctgctcagctaaacctcctaaactgctggggctacagagtgtaaaagactggatccttccaacaatattagtcacagtgtataaaccttggaaagcattattttatcatcttttggaagaatggagttctcacagcaggcttaaagcagtagagacttccaaagggggtcatggtggaaaaaaggaagagagtcgactatcatcctccaataatgccggcaaaaaaacttgtcagatcctcacacgaaagggaccttctaagaacaagatgcaagtagaatcatcagagtga

SEQ ID NO: 3905 - DNA, 2885 bp, Homo sapiens
  SIMILAR (292)..(576): 1001254mologous to Homo sapiens Human signal peptide containing protein HSPP-10 SEQ ID NO:10,accession number AAY87233,Smith-Waterman Score=531.
atgggggaaactgccctcatgatccaattacctccacctggtcccgcccttggcacatggggattatgggatttacaattcaagactaacaccacatctacagacactgaccctagatcacacctccaggagacaggagacaacatcttaacacttttcaccatgcatcctcctcttgaatcagagtggactatttgtaactttcgccagatatggctcttgtcttcatggtccaccttggagactagagctcagccattacactcctatttcagaaagctgaaaggaaggggcactgcaattgcgggcattgtttttggaatagtatttatcatgggggtcattgctgggattgccatatgcatctgcatgtgcatgaagaaccacagggcgacccgcgtgggcatcctcaggacgactcacatcaacaccgtctcctcctatcctggaccaccaccctacggtcacgaccacgagatggaatactgtgcagacttgcctcctccatactcccccaccccacagggtccagcacagcgttctccaccccctccttatcctggaaacgcaaggaaataatctatctcccagaacagaacatgtgccaatgggcgatcttgcctggaataaaatgcctctactcagaaacaggcaggaaagaattgctccaaggaatactttttggggtcagataatgtgtcaggtggaatatccctgctaggagatataggatttctactctgctcaaagctgaccccatctggagtattaatgtttggttctatgttaaccacattttaagagatctgctgatccacctaagcacattcagggaagagtaatgtaattgacaaaatatctgataatcatgttgtttaagggctaggtgaagaaagtttcagtattgatcctggaaaaaaagaagatctaagtaggatgggagaatgatttggcccacacaaggaagcaactttattctatatagctttaaaagtcagaactagaattgttcattctttcattcatcaataaatgtattttgagtgcctaagagtttactatgtgcctagcactgtttgaggtcctgatggaagttacaggatgggtactctggttttagtacaagaaagagcaatgactagattgctttgtgaagctcttggtagagacacgctccagaagggataacaaaatcaaatagtagatgggttcattgggcctcaaaagttctgctcgtattttaggggggtgtgaagtgaatttctatatgtccaggagtgaatacaacagaaagagttggatcttatttatttaattagggagttaaaacaagaccaaaaagactcaacagccgctttgaagccaaggaactctttccatgccagctactgccacctaaaaatcatctggctttatagtggatcagaataaaggttattctaactgtggggagaaaaaaaaaattgtatcaagttccacaggtagcagacacttcacttccaagtaaaagatgagaaatcaattattcccacaggattttaggtcagggagcaaaaatctcagaacttgaccatgaagatacacaacagactcggcaaaaataaagtgggaaatgaagttcagattcccttctgtagatttcccttaaaactattatttttttccttcttcgtaaaattttggataatctgttctcttaaaaaagttaatgacacaattaagatactgacatcaaattgttgccttttaccaaaatgcaaattttatgaagtgcctacctttatatgtataaagcatttaataaataattctaatgtgccatattttgctgtgagtgaccttaacatttatatttttatatgaattgtttcatgtatttataaaaattgtatattgaacattggaaatagatgattagatttttgtgtcattttacaattaaatctaaaatgcttaatccaatatcatcatcaaaattcagtgaaatcccaaaacagtgccaagaattttgctgaatgaaacaatcaaacaaagcattttaaggtgtaagttatagtacctgtacttgcagataagaagcttactatatcattattataagtagcatatattactttcaaatacctatattagaaagatattggatctgactgaaatataacctacctgccagtaaggtccaaaggctgaatttgttttgaatgagttccatgatctttaagcactgatgattttcttatatatgaggatgcaaagcattcaagagtttcagcctgttctggtgaggggctccctgtctttcataaagttttcagtgcaattttaatagtacatatgctttaatttatttttcttctgcgtgtggtcagacccaattacactgtggctaagactctcaaagtgccagggtttctgtgatgattctgagaatgctgaatacaaatataccttatattctttaaggaaaacggaaaggaaagatcagcagaaaatagggttttctcatcttcaccatcaataaacatttattgcgtacctcctatattctgcaaattttccccaaatagaagccagttcagtccacaccatctcttctttgagttgtttatggcctcccttaaggcattttacaaacccataagcctacaatagatgagtatttttactatttgtattaagtgtcataatagcatcaatgtgcacattaccagtatagactgttggagttcactgattgttttcatagatgatgcttcttggggaaaaatagtataggatgtgaaagttttgaattacggttatttaaaaactaacatttgctatggccaaagtgtttacaataagcaataaagtgaaagaacctattataacccaaaaaaaaaaaa

SEQ ID NO: 3906 - DNA, 1173 bp, Homo sapiens; identical to SEQ ID NO: 275
  SIMILAR (336)..(4): 1001254mologous to Homo sapiens membrane-type-5 matrix metalloproteinase,accession number AB021227,Smith-Waterman Score= 606.

SEQ ID NO: 3907 - DNA, 538 bp, Homo sapiens
  SIMILAR (65)..(178): 781254mologous to Homo sapiens metallothionein I-B,accession number M13485,Smith-Waterman Score=181.
ggaattcctgtcccgctgcgtgttttcctcttgatcgggaactcctgcttctccttgcctcgaaatggaccccaactgctcctgctcgcctgttggctcctgtgcctgtgccggctcctgcaaatgcaaagagtgcaaatgcacctcctgcaagaagagtgagtgcagggccttccctgcgaatctgggggatgggccaagttagagcagggaacccagagctctgcaggcaggggcaggccaatgaccagcttccccaaacccctccttcaacacctgattcagaatcagacctcaaattgccttaaaaatgggctgctgctcctgctgccctgtggggctgtggccaagtgtgcccagggctgcatctgcaaagggacgtcagacaagtgcagctgctgtgcctgatgccaagacagctgtgctctcaaatgtaaatagaggcaacctatataaacctggattttttttcaatacgatactgagccatttgctgcatttctttttatgttaaatatgtgaatggcaataaattcat

SEQ ID NO: 3908 - DNA, 1721 bp, Homo sapiens
  SIMILAR (344)..(979): 1001254mologous to Homo sapiens BCL-2-related ovarian killer protein,accession number AF174487,Smith-Waterman Score=1081.
ggggacgcgctgggctgtgccctccgcccccgccgcccacgcactcgtcttcgagggcgggcccggcggccccggagcaaaccgccgtctccccgcggccccaccggtccctggcagcctcggggaatgtctgtagctgaattcgggctctgaaagaaggtggcgctgggtttttaaagatttggggcacaaaaaacgagagcggacccggcgccggctacggcccttcccgagggccacgcccagcccggcgccccgcgcgccccgttccccgcgccgcctccctccacccggctgagcgcttgtgcccgcaggtgcggcgccccccacccgcgtcgccgccatggaggtgctgcggcgctcctcggtcttcgccgccgagatcatggacgcctttgaccgctcgcccacagacaaggagctggtggcccaggccaaggcgctgggccgggagtacgtgcacgcgcggctgctgcgcgccggcctctcctggagcgcgcccgagcgtgccgcgccggtcccgggacgcctggctgaggtgtgcgcggtgctgctgcgcctgggcgatgagctggagatgatccggcccagcgtctaccgcaacgtggcgcgtcagctgcacatctccctgcagtctgagcctgtggtgaccgatgcgttcctggccgtggctggccacatcttctctgcaggcatcacgtggggcaaggtggtgtccctgtatgcggtggccgcggggctggccgtggactgtgtgaggcaggcccagcctgccatggtccacgccctcgtggactgcctgggggagttcgtgcgcaagaccctggcaacctggctgcggagacgcggcggatggactgatgtcctcaagtgtgtggtcagcacagaccctggcctccgctcccactggctggtggctgcactctgcagcttcggccgcttcctgaaggctgccttcttcgtgctgctgccagagagatgagctgcccacctggcagtggccgcagcctggccctctgggcccaacgcaggaggccctcagcacccgaacacatcttcctcctccccacccgagcctggagcactctaaccctcggagaccccctaagccccgttcctccgcagacccaggccctccggaaggggtgagtggggaggggctttcctgagcctggagctgggctttggggcagcctgcgaccctccccgcttgtgttccctttctcctgtgatctctgtgtttttccttttctttcttgggggccaaggaagtcagggtcaactcccgggcctcagatgcaggggcccagaacacctgctctcacctgagccccaggtgaaggggcccgggaacacctgctctcacctgagccccaggtgaaggggcccgggaacacctgctctcacctgaaccccaggtgaaggggcccggaacacctgctctcacctgagccccaggtgaaggggctccggaacacctgctctcacctgagccccaggtgaaggggctccgggaacactttgcttcttcacctgaggccccaggtgaaggggcccgggaacacctgctctcacctgaaccccaggagaaggggcccggaacacctgctctcacctgagccccaggtgaaggggcccggaacacctgctctcacctgagccccaggtgaaggggcccggaaacacctgctctcacctgagcccctggagaaggggcccgg

SEQ ID NO: 3909 - DNA, 799 bp, Homo sapiens
  misc_feature (1)...(799): n = a,t,c or g
cgctgtttcacgccaggctctgggattgaatgatatccctggatcaggttcactggcgtcccctgctggcacagagcagcacaaagacttcgaaactggatacgctgataaatttatgaaatctccacaaactagagaacacgggctagnagatcccccaaacttgtatctggattttgatggtgatgttacaaaacttgaaacttttggagtaaccaccaccaaagcatcaaagccaagaagtccagcaagtacttccacagtaactaacgtgacagatgctcctacagcccccaaagcaggaactacacctgtggcaccaagtgcaccagacatttctgctaattctagaagtttatctcagattctcattgaacagtcgcaaaaggagaaacaactggtcactggtatggatggtggccctaaagagtgcaaaaataaagatgaccagggatttgaatcatgtggcaaaaaggtatcaaatactgacaagtcttcgaggcaagatagtgacttgaaaacatctgatgccttacagttagaaaattctcaggaaattgaaactgctaataaatatgatatgactatagatatggtacatgttgatgctgaaagacccaatgttctggaaaacctagacaactcaaaggaaaagactgtgacatcagaagcagctaaaactgaagatacagttctctgcagcagtgatacagataaggagtgtttaattattgatacagagtgtaaaaataatagtgacggaaagacagctgtcatgggttccaacttaaattcttga

SEQ ID NO: 3910 - DNA, 349 bp, Homo sapiens
  SIMILAR (7)..(96): 961254mologous to Homo sapiens unnamed protein product,accession number AK021958,Smith-Waterman Score=166.
ggcacgagcctgttattaccatatcatatccatcatggaagaataccttgtacttttccaccgaaatcactggataccacaacacaacaaaaggtaagatcttttttgaaattaaaggttcattaggttgtttattattcgtctatttcactgactttaccgtatttcaccctgatgttctcattgtcatattaatcacagcaccattctaaaagctatatccataggaagggtaaagttgtatgccatggtgagtccagtcttcgtggtagtggaacttttttatttttgcaagatttataagtcaactaaagaaaactctcttaggcttgcacagtagggtgtatgg

SEQ ID NO: 3911 - DNA, 690 bp, Homo sapiens
  SIMILAR (433)..(582): 981254mologous to Mus musculus protein kinase A anchoring protein,accession number AF021833,Smith-Waterman Score=269.
tacatggaaaaagaggatgcagtgaatatcttacaattctggttggcagcagataacttccagtctcagcttgctgccaaaaagggccaatatgatggacaggaggcacagaatgatgccatgattttatatgacaatgcggcgcaggtatcagcaccgcggctccgcgggcccggagcgcgccagcgtgcggcgggtctggggcagccgcagccccgggcccgggcggactctcatgccgagagaccggagcggaaactggggaagctgccgcgcggagccagggtcagcgaggcccggcccggcccctgccgctcatggcccggcctgccgccggccgctggctgtctggcgaagcggcctcggcgctgccgggccaggggtgccgtcaccgtcactgtccgcgcccagagccgcacacgcgctctgaggcagtacttctccctccaagccacacatcctcttggatttgatgatgttgtacgattagaaattgaatccaatatctgcagggaaggtgggccactccccaactgtttcacaactccattacgtcaggcctggacaaccatggagaaggtaacccagaacttcaaacgtatcaaactacaagaagttttattggtagaactcataaaatataaggaattacccaactctgtctttttggtgatggagattctagcataa

SEQ ID NO: 3912 - DNA, 2908 bp, Homo sapiens
  SIMILAR (1587)..(2114): 721254mologous to Homo sapiens unnamed protein product,accession number AK021958,Smith-Waterman Score=566.
tccaaatgcagagaagcttgtttccagatatcaccctcagatagctctaactagtcagtcattatttaccttattaaataatcatggaccaacgtacaaggaacagtgggaaattccagtgtgtattcaagtaatacctgttgcaggttcaaaaccagttaaagtaatatatattaattcaccacttccccaaaagaaaatgactatgagagagagaaatcaaatctttcatgaagttccattaaaatttatgatgtccaaaaacacatctgttccagtctctgcagtctttatggacaaacctgaagagtttatatctgaaatggacatgtcctgtgaagtcaacgagtgccgaaaaattgagagtcttgaaaacttgtatttggattttgatgatgatgtcacagaacttgaaacttttggagtaaccaccaccaaagtatcaaaatcaccaagtccagcaagtacttccacagtacctaacatgacagatgctcctacagcccccaaagcaggaactacaactgtggcaccaagtgcaccagacatttctgctaattctagaagtttatctcagattctgatggaacaattgcaaaaggagaaacagctggtcactggtatggatggtggccctgaggaatgcaaaaataaagatgatcagggatttgaatcatgtgaaaaggtatcaaattctgagcaagcctttgatacaagatagtgacttgaaaacatctgatgccttacagttagaaaattctcaggaaattgaaacttctaataaaaatgatatgactatagatatattacatgctgatggtgaaagacctaatgttctagaaaacctagacagcgtcaaaggaaaagactgttggatcagaagcagcaaaaactgaagatacagttctctgcagcagtgatacagatgaggagtgtttaatcattgatacagaatgtaaaaataatagtgatggaaagacagctgttgtgggttctaacttaagttccagaccagctagtccaaattcttcctcaggacaggcttctgtaggaaaccagactaatactgcttgtagtcctgaagagtcatgtgttttaaaaaaacctatcaaacgagtatataaaaaatttgatccagttggagagattttaaaaatgcaggatgagctcttaaagccaatttccagaatagtaccagaattgcccttaatgaatttagaaaattctaaacagccttctgtttctgagcaattgtctggtccttcagactcctctagttggccgaaatctggatggccttctgcatttcagaagccaaaaggacgattgccatatgaactccagttctatgatgcacgattcatcggaatacctacctcctggggaaggaaattgggtttataagtcatttagcctgcaagacctgttgttactcgtacgctgcagcgtccagaggatagagacaagaccacgttctaaaaaacggaagaaaatcagaagacaatttccagtttatgtactaccaaaagtagagtatcaagcttgttatggagttgaagctctgactgaaagtgaactttgtcgctttatggactgaaagtttattgcattccaacagctcattttatgttgggcatatcgatgcatttacttcaaaactttttctactggaagaaattacctcagaagaattaaaagaaaagctttcagcactcaagatttccaatttatttaacatcctccaacacattctaaagaaactaaagtagcttgcaggaggggttcctacttgttatctcatgcagcagaagattcttcactccctgatttataaggcctctgatggaaaagttactaggacagcatacaatttgtataaaacacattgcggccttcctgggtgtaccttccagtctctcagttcccggggtcccattaggatcccagcctggttattaccatatcatatccatcatggaagaatacccttgtacttttccacccgaaaatcactggataccacaacaccacaccaaaagattggtggaacgaggaatgccctacacgcagcccacaggaatcccagtttcccatggaaaccaaaagcgagttgctttgcctgctcagcaagttgaaactgaaggagtgggctccacataaaagaaaaataacttgaggactgtacccatgggaaaactaaatttaaaaaaacagttattaacagtgtttaatttaggataagtttgaggggaaaataatcagtaggcaagaggaacattttttcctgtagtagctagagtgcccttggaaaaaaatgtggttggctatggtggaaggaatatttccaactaaaatggaatggtatgcttttcacccttaaagtttgaggaggatctttgatatgttgttaacattatcatggcagggaaatatataaagaagaaaaatatttttacattaaacccttttcctaaaaattgtaaataggaaaataatttggttttttatcaagaacaaccacttatcgttatgtattgtgttagttatattgccgagtctgttgcgactgactcaaaaagttaaatgttgccactgctggaaggatgattatggagcatcgcaaactttgtttctgacccattttgacagtttttatatactcctttaaaatgatgaatgttacaggttaataaagttaatacctttaaaaacttggtgaaattccattacagaagccaaaaataaaaactccctgcctctgaaaagtcagattacctgacttcttgtttggcaaccatcagtttgtttaataaaagaaaaaatttggtggtataacatgttttgatgacagatggcctcctatctctaagattccaagcctgagttgttgaaatacactggctgaaag

SEQ ID NO: 3913 - DNA, 454 bp, Homo sapiens
tcatatttctactcaaacctgtccctcctgcagtcttctttgtgtcaaataatggcaactccattcttctagttgctcaggtcaaaaagtttggtaattggtgaacacgccgtccacgtgcgccttgctgtctctccattatcgcttgagatctccagccttaccgcggcttgaaatggaccccaactgctcctgcaccactggtggctcctgcacgtgcgccggctccagctgccaagtcacactttttcatctgcaggaatgattcacggcagagagacgttgtcatagactgacttcattccttcagacagcatttctcaaacacttatcctcagtgtactccagggacgccttgagttacccaatctctcgcagccagacccgcgggtctcccggaacccacctcggcgtcgggaggacgaaatcgtcgacccgggaattcgcggcgcgg

SEQ ID NO: 3914 - DNA, 1137 bp, Homo sapiens
  SIMILAR (1137)..(406): 991254mologous to Homo sapiens b4 integrin interactor,accession number Y11435,Smith-Waterman Score=1244.
tcagtaccaggaagtgcaggcgatgaggaagcgcacgtcgtccagcggcccccacgggctgggctcgggctggggctggggctggggctggggctggggctggggcggatgccggggctgttccgggccctccggcgccgcaggctggggctggggctggggctgggtttgcgcaggctccggggcgccgcggccgccgcttagctgagcccccatggtctcggcgtcgggaggagctggcgccgtgacgccaccaccgcgtaccgacctcaccctccgtgcgttggagcggaaagaagggactcgaccctgtgcttcggggcggggctccgcgaccgtcccccgccaatcccgccccagcgcctcaaggccccgccccgcgcaaggggacggaatgcgtcccaacagcctgtcaatgagggaatcccgcatgctggtggcaatggtgctaggctgggcttcattcagcttgaagacactctccaccactgacagctctgtgctggttgtgtccaggccacagaaggcacaccagtcattcaccaccatcccagcagcaatcacctcactgcctcggttcacagtccccgccacaagggggacttgaagaagagaggacagctcatcctggtcttcaattgaagtcttgggatgcaccagccctccctgattgctgaagacacagtagcttcctactagcacctggtcggccactgtctgtctgaagacttccaccttgagcacatctgccagaatttcttctgtctccctgtccaagtctgggtggaccaaggccacgtagtcattgcaggtggtgacattgcccaaggctgagagccgctcctccacccgcctaatctgcactgtgtctgggaggctgttgcgaatgtgttgcagctcctggtcggtggtattgttgggtaccaggagaccgtgcctgttccccacacacatgcgcccgatgatgcggcagccggcgatagacgcgtgcaccacggggatggtatcggagagctcgccctcgaacacactgtagaagttctctgagcctccgatcgctaccagacagtaggtgttggtgagcttggcaaagcagccgatctcacagttgttctcgaacgaagctcggaccgccat

SEQ ID NO: 3915 - DNA, 591 bp, Homo sapiens
gagctcttcatatttctactcaaacctgtccctcctgcagtcttctttgtgtcaaataatggcaactccattcttctagttgctcaggtcaaaaagtttggtaattggtgaacacgccgtccacgtgcgccttgctgtctctccattatcgcttgagatctccagccttaccgcggcttgaaatggaccccaactgctcatgcaccactggtggctcctgcacgtgcgccggctccacccactcaagagccgatggcagccaacaggcaatgctgcgccattaaggtgtttgtcaagaagctaagctgggcattgtgggcgatcctgagggccctttttagattggcagctgccaagtcacacttttttcatctgcaggaatgattcacggcagagagacgttgtcatagactgacttcattccttcagacagcatttctcaaacacttatcctcagtgtactccagggacgccttgagttacccaatctctcgcagccagacccgcgggtctcccggaacccacctcggcgtcgggaggagctggcgccgtgacgccaccaccgcgtaccgacctcaccctccgtgcgtt

SEQ ID NO: 3916 - DNA, 1818 bp, Homo sapiens
  SIMILAR (1036)..(1719): 921254mologous to Escherichia coli IS5 39.3kDa protein,accession number U70214,Smith-Waterman Score=1122.
atgaaggccagccacgccatgagggctgctgcaaaggtgagaagtcagaacacgagcactgcggacacggtcaccagcatgaacacggtcaatgctgcggtggtcgccacggtcgcggcggcggtcgtcggcaacgtttctttggtcacggtgaattacgtctgcccgggcgtcatctacccaacgctggattttctgcaggagcagtcgctgattaccatccgcgaagaggaaggaggtaagaagcagattgcgctgaccgaacaaggcgcgcagtggctggaagaaaaccgcgaacagtgtgtaaaaaggaatgcagctgcctgctttaacaagcatacataccaagttcagaacagtgtctatttctggagactaaggagagttactgtgattaatgtgatagacaagggcgacgaggtggaagcggacaaaacgttacacattgcgcaaaacggaacggtggtcgccgagggtgattatggattccgcctcacgaccgcaccaggtaatggtttgtacgttaactatgggctgaaagcgctgaacatccatggtgggcaaaagctgacgttagccgaacatggcggagcctatggcgcaacggccgatatgtcggcaaaaatcggtggtgaaggggatctggcaatcaatacggtgcgacaggtttcgctttccaacggtcagaacgactatcagggggcaacctacgttcagatggggacattacgtaccgatgcggatggtgcacttggcaacacccgggaactgaacatcagcaacgcggccatcgtcgatcttaatggatcgacgcagacggtagagacattcaccgggcagatgggttcgactgttttgttcaaagagggggcgctgacggtaaataaaggtgggatcagtcagggtgaactgacaggtggcggaaacctgaatgttacagggggaacgctggctatcgaggggcttaatgcacgctacaatgcgttaaccagcattagcccaaatgcggaagtcagcctcgataatactcagggtgaattcagcagtaagcgccgtcagaccagaaaagagattttcttgtcccgcatggagcagattctgccatggcaaaacatggtggaagtcatcgagccgttttaccccaaggctggtaatggccggcgaccttatccgctggaaaccatgctacgcattcactgcatgcagcattggtacaacctgagcgatggcgcgatggaagatgctctgtacgaaatcgcctccatgcgtctgtttgcccggttatccctggatagcgccttgccggaccgcaccaccatcatgaatttccgccacctgctggagcagcatcaactggcccgccaattgttcaagaccatcaatcgctggctggccgaagcaggcgtcatgatgactcaaggcaccttggtcgatgccaccatcattgaggcacccagctcgaccaagaacaaagagcagcaacgcgatccggagatgcatcagaccaagaaaggccatcagtggccactttggcatgaaggcccacattgcctggtcaccaccgcggccaacgagcatgacctcaatcagctgggtaatctgctgcatggagaggagcaatttgtctcagccgatgccggctaccaaggggcgccacagcgcgaggagctggccgaggtggatgtggactggctgatcgccgagcgccccggcaaggtaccggcgcggcatcgtctttctgcacacggatgtgttttgtataccgctctttcccgccgtattgtggcgctccccctgcctgtgtcggcgcccccataa

SEQ ID NO: 3917 - DNA, 1575 bp, Homo sapiens
  SIMILAR (1575)..(1081): 951254mologous to Escherichia coli Tail fiber protein GP37,accession number D90774,Smith-Waterman Score=780.
ttacagggtcacttggttggtgattatgtgtcgctgtcgtgtttgccgtttggaatcatggggcacggcaactggccgctgtgggtgctgacggcatgtttggttttgctgctgtgttgatgagtcttcgccgacagtgaattcagcagtaagcgccgtcagaccagaaaagagattttcttgtcccgcatggagcagattcgatcgatgaatttccgccacctgctggagcagcatcaactggcccgccaattgttcaagaccatcaatcgctggctggccgaagcaggcgtcatgatgactcaaggcaccttggtcgatgccaccatcattgaggcacccagctcgaccaagaacaaagagcagcaacgcgatccggagatgcatcagaccaagaaaggcaatcagtggcagtgcggcgatatgtggtgcaaggtcccacgcgtgctccccttgacgatcccgaaataaggtgtaacaacataagctgctaaaatagggaaagccaaattgaagaagttccaacggagcaactagaggccaaaggaatcggggaccgggaacccgcacacaacgtcgaaaatagggacccaagggccgataacaagcaatgcaatgccactccatagggcctggagacaccgggccaacgcaaacgagaggagcaggatccagtacccatccgaggcatggaacgggaaaaggaccccccagttggcccagggaacaggaatagggagcctcagagcaattagacggcaaacctaggacccagatgcggaatcgtcgaccaaaggtcgtgttcgtgaagaaatgggagaaagtgcgagttagtaagggtcgtaagggtagaaggaggcgagcgtcgcgaagtgtgttatgccgtgggcgcgcgggttgtggggggcccgcggccggccgttgtttggggcttggggggaaaggggggcccgttgtttgttgggccggcgcgttttgggttggtgggtttcccgaagaaggttgaggaaggtttctaaagggccgaagcacgagcgccaggagactgggggaaggaacaggatgatgaacaagtgcaaatgagctacccgcctgtccggctgacgtgctggctgcgcgtgctgagtccccagcatcagccgcatggtttcccgcttcacgggctaatgtgcggcaatcactggctgacttcttcgcggctgccgtgttctgtgccaccgcggacgcgttacgcgccacctcttccaccatcagttcaaaacggcgcagtgcctccggacgggcatcatcctccgtcatggcaccgagaaaatcattcagcgtaccgggttgagaatcttcatacacggtaatggtcccggcatgtgacggcgggaatccttccaccaacagaataacgctgtactgaccgtactcaacgtccatgctgtaacgcccggcttcatccggattttctgaggccagcgtgttcaccaccaccgtggtgctgttacgttttgctttcagctggattgtgcagttctgtaccggttttcctgtgccgtctttcagtacacctgaaatctttactgccat

SEQ ID NO: 3918 - DNA, 2040 bp, Homo sapiens
  SIMILAR (904)..(1263): 1001254mologous to Escherichia coli Hypothtical protein in gltJ 5'region ,accession number D90705,Smith-Waterman Score=635.
atgatgacccaaggcactttggtggatgccaccatcattgaggcacccagctctaccaagaacaaagagcagcaacgcgatccggagatgcatcagaccaagaaaggcaatcagtggcactttggcatgaaggcccacattggtgtcgatgccaagagtggcctgacccacagcctggtcaccaccgcggccaacgagcatgacctcaatcagctgggtaatctgctgcatggagagaagcaatttgtctcagccgatgccggctaccaaggggcgccacagcgcgaggagctggccgaggtggatgtggactggctgatcgccgagcgccccggcaaggtaagaaccttgaaacagcatccacgcaagaacaaaacggccatcaacatcgaatacatgaaagccagcatccgggccagggtggagcacccatttcgcatcatcaagcgacagttcggcttcgtgaaagccagatacaaggggttgctgaaaaacgataaccaactggcgatgttattcacgctggccaacctgtttcgggcggaccaaatgatacgactggcacaggcagatgacgccgccccggcagcgggcagtactctggacaaaatcgccaaaaacggtgtgattgtcgtcggtcaccgtgaatcttcagtgcctttctcttattacgacaatcagcaaaaagtggtgggttactcgcaagattactccaacgccattgttgaagcagtgaaaaagaaactcaacaaaccggaccggcaggtaaaactgattccgattaccttacaaaaccgtattccacttgttgaaaacggcactttcgattttgaatgtggttctaccaccaacaacgtcgaacgccaaaaacaggcggctttctctgacactattttcgtggtcgttttgctcaacaaactgaatgaagagcaaaaaatgaatatgcgcatcatcagcgccaaagatcacggtgactctttccgcaccctggaaagcggtcgtgccgttgcctttatgatggatgacgctctgctggccggtgaacgtgcgaaagcgaagaaaccagacaactgggaaatcgtcggcaagccgcagtctcaggaggcctacggttgtatgttgcgtaaagatgatccgcagttcaaaaagctgatggatgacaccatcgctcaggtgcagacctccggtgaagcggaaaaatggtttgataagtggttcaaaaatccaattccgccgaaaaacctgaacatgaatttcgaactaagggcaaaagcagacagcagacacagaggagaagatttaaaacttgacaactctaactgcaaccccaaggcagaatttttcacaggttatgtaacagattctggcacttcccactcataccatccagaatgctgttggttccagttcctgatgttatttgggaggctaagtccctattatcttcccctcttcttccaacctttctctgatcatgctccccaattccatgttggcaatctgaaatacagcatccttacaaaaatccctagtttcaagtccagaaatctgattaaagagtttttcatttcctttgcaggagttcagaaagaaacagcaactggggataacattggggatggaaaggcaagtttcttgggggcatattgtggaggaaagattcggggtgacagaacagaaagttacaggctaacagaggagttgtggttaatagaaagctctcatgttagcttggagcctgtgcacagaagtcaagaattggggtttgggaacctctgcctagatttcggaggatgtatggaaatgcctagatgtccaggaagaagtctgctgcaggggcagggctctcacagagaacctctgctacagcagtgcagaagtgaaatgtgggatcagagctctcccagagtccctactggggcatcacctagtggagctgtgagaagagggccactgtcctccgaccccataatggcagatccaccaacagcttgcaccaagtgcccggaaaagcttcaggcactcaatgccagccagtga

SEQ ID NO: 3919 - DNA, 1875 bp, Homo sapiens
  SIMILAR (271)..(708): 911254mologous to Escherichia coli IS5 39.3kDa protein,accession number U70214,Smith-Waterman Score=695.
atggtaattgtccctattggctacgcagcgcaggaattatttgacgtttcacaggttcgcggcggtacgccgtacggcgcaaccaccatcgcaggcggtgacggttcacgccagcccagccaggaagaactgtctattgctcgttatcaaggggaatatgtcgcaggcgtgcggtatcggtctaccttctatccgggtatctccggctcagtgtcctttcgcatattctggtgctctattgtacagcgggtttacacatcggtgcatgctattgtacccacccgctacgcttactgtaattctgaattcagcagtaagcgccgtcagatcagaaaagagattttcttgtcccgcatggagcagattctgccatggcaaaacatggtggaagtcatcgagccgttttaccccaaggctggtaatggccggcgaccttatccgctggaaaccatgctacgcattcactgcatgcagcattggtacaacctgagcgatggcgcgatggaagatgctctgtacgaaatcgcctccatgcgtctgtttgcccggttatccctggatagcgccttgccggaccgcaccaccatcatgaatttccgccacctgctggagcagcatcaactggcccgccaattgttcaagaccatcaatcgctggctggccgaagcaggcgtcatgatgactcaaggcaccttgatgcatcagaccaagaaaggcaatcagtggcactttggcatgaaggcccacattggtgtcgatgccaagagtggcctgacccacagcctggtcaccaccgcggccaacgagcatgacctcaatcagctgggtaatctgctgcatggagaggagcaatttgtctcagccgatgccggctaccaaggggcgccacagcgcgaggagctggccgaggtggatgtggactggctgatcgccgagcgccccggcaagagatcagcaagctgcatccagaaactgaacaccaccatgatctacgtgacccacgatcagaccgaagcgatgaccatggcgacgcggattgtgattatgaaagacgggattgttcagcaagccgaggaaaggaacgactggcactttactatcggcgcgatgtacgaaatagaaaacgtcgagggttatggcgaagatttggatgggctggcggatccttcagtctattttaatgccgccaacgggccgtgtagaattgctctgggctattatcacgaagggcccgaaaatataacgcgggcaccggaagagatgcgcagcttcctgctggatgccggggcagaatataacggctatgcggctgacctgacccgtacctggtcggcaaaaatgaccaacgactacgcgcagctggtgaaggacgttaatgatgaacaactggcgctgatcgccaccatgaaagcaggcgtcagctatgtggattaccacatccagttccatcagcgcatcgccaaactgctgcgtaaacatcaaatcatcaccgatatgagtgaagaagcgatggtcgaaaacgatcttaccgggccgtttatgccgcatggtatcggccatccgctgggcctgcaggtgcatgacgtcgctggttttatgcaggatgatagcggtacgcacctcgcggcaccggcaaaatatccgtacctgcgctgcacccgtattctccagccgggcatggtgttaaccatcgaaccgggtatctacttcatcgaatcgctactggcaccgtggcgtgaagggcagttcagcaagcacttcaactggcagaaaattgaagcactgaaaccgttcggcggcattcgtatcgaagacaacgtggtgatccacgaaaacaacgtggaaaacatgacccgggatctgaaactggcgtga

SEQ ID NO: 3920 - DNA, 1407 bp, Homo sapiens
  SIMILAR (1119)..(619): 961254mologous to Escherichia coli 4-amino-4-deoxychorismate lyase,accession number M93135,Smith-Waterman Score=815.
tcaatcgctgatctggccgaagcaggcgtcatgatgactcaaggcaccttggtcgatgccaccatcattgaggcacccagctcgaccaaggggcgtccacagcgccgaggagctggtccgtaggtggatgtggacctggctgatcgccgagcgccccggcaaggtaagaaccttgaaacagcatccacgcatagtacaaaacggccatcttacatcgaatacatgaaagccagcatccgggccagggtggagcacccatttcgcatcatcaagcgacagttcggcttccctaattgatgctgttcctgtgctgcccggattgtcatttttgccactggctaacgccaggtcgagattgttactacctgaaaatgcatcgctggcgatcagatttaatgaaccattcgggccaaatccaaatccgttgttggaaatattagcggtattcaactgaacacgaatatagcgtcctgatcgcattgcattaccagcgtgattgttctgtctgctaaattgtgttgttttaccccggtcaacttggcgcatggcagcacttcgtttgccaatagtcgatatttgtggtaattgctcgtggactgagcgggccaatgtggaaagttcgctgtcaaggaccagcgcctcatcagcgtttgtctgctcaagatgagagcgaatcaatacttgctcaagacgattgagatgtttaatacctgcaagatgaggattgcgccccagccgcaccgggcttagcgccaacgtaatcccctcgttacgcaaacggtcgtaatgtgcaggataagccgtaacggagagaatccgcgttgccggtccgctgttcaatgtgctgtaccctcgcccgccactaccgcgactgatcacgactttcagcacaccattttgctgttctgctgccagcgttttcatctcttgttcaagctgaggccagaagtcacaggaaatcatcaaccgctgacaagcatcctgtagtcgctggatatgcgccgataacaaactgactttaccgtcgataactctggcggtggtaaaacaaccatcaccaaactgcgttgcccgatcgcttactgccagcgattcctgacgcgcttcgtgcggtacgaaatccagatcgcaaccttcatccgggttatccaggttgatggttggcggaacagcctgatcgcgcagcgccaggatggagtagatagattctactgcacccgccgcacctaacaggtgaccggtcatagatttcgtggagcttaccaacacacggcttgcagcttcaccgaagatggttttcaccgcctgcgcttcagctttatcgccagccggcgtagaagtaccgtgcgcgttaacgtagccaatctgactcgcttcaatgcctgcatcacgcagagcatttgccat

SEQ ID NO: 3921 - DNA, 999 bp, Homo sapiens
  SIMILAR (1)..(561): 1001254mologous to Escherichia coli IS5 39.3kDa protein,accession number U70214,Smith-Waterman Score=968.
atgatgactcaaggcaccttggtcgatgccaccatcattgaggcacccagctcgaccaagaacaaagagcagcaacgcgatccggagatgcatcagaccaagaaaggcaatcagtggcactttggcatgaaggcccacattggtgtcgatgccaagagtggcctgacccacagcctggtcaccaccgcggccaacgagcatgacctcaatcagctgggtaatctgctgcatggagaggagcaatttgtctcagccgatgccggctaccaaggggcgccacagcgcgaggagctggccgaggtggatgtggactggctgatcgccgagcgccccggcaaggtaagaaccttgaaacagcatccacgcaagaacaaaacggccatcaacatcgaatacatgaaagccagcatccgggccagggtggagcacccatttcgcatcatcaagcgacagttcggcttcgtgaaagccagatacaaggggttgctgaaaaacgataaccaactggcgatgttattcacgctggccaacctgtttcgggcggaccaaatgatacgtcagtcatacgcttcgagatacttaacgcccaacaccagcgaaatgagcggcttgccgacgatcaacaccgcgagcgccaccagataccgattaccgcccgtacacgttggctttgccatgagcgtaattaatgaagccgaagcacgcgacactctcgacgccttacaaaacatgtttgacgttgagccggatgtcggcgcgctgttgtattgtgctgaggacaaacataattgctgttatttgtttgcattgacatatctgctgctgcctggcaaccagtgttgcatgccagattcacatttgatgccatcgttgctgctgcaactgatgctatccaccatcatcatcattcaccacctgcgcagcaactgtggtgcatccgtcttaagcagctctgcacctttgcaatgtggcaattgccaatgtctttgtgcaacctag

SEQ ID NO: 3922 - DNA, 1065 bp, Homo sapiens
  SIMILAR (460)..(783): 781254mologous to Mus musculus protein kinase A anchoring protein,accession number AF021833,Smith-Waterman Score=441.
tctcacaaagcagtaatttagacactcgattctgcctctttacaagaatacaggtactcagttgatttgttttctcactccctttctttgctataagtttaaatcaacaatttgtttaggttaatatgtcctcatggaatggtggaaatgatcagatataaaatatttggtttggttagtttactctttatatgtttgctggcaaggaaccacaaatccagtttagtataatttttactctagttcactaaaagtttgcatccagctgtgtaggtagtgtttgtttcttgttaactttttttttctctaaaagaatactttaaaacttttcaatctcaaatgactgtaacttgctgacaggtgttaacagaagaagtagatctttttgttttttgcttatgacctgtattttaatatttgagcttatagattagagattgtgagagaaatctgtttatagtcttattttcccttgtgtattttttcttcctagtacatgggaaaaagaggatgcagttgaatatcttacaattctggttggcagcagataacttccagtctcagcttgctgccaaaaagggccaatatgatggacaggaggcacagaatgatgccatgattttatatgacaagtacttctccctccaagccacacatcctcttggatttgatcgatgttgtacgattaagaaaattgaatccaatatctgcagggaaggtgggccactccccaactgtttcacaactccattacgtcaggcctggacaaccatggagaaggtaacccagaacttcaaacgtatcaaactacaagaagttttattggtagaactcaataaaatataaggtgggaaaaccaagcagaatagcacagtggaaattgaagcagtccagcaaagtgattaagagcagaggccttgagtctggcctggtatgtacagtcacgtgccacataacattttagtcaacagtggactgcgtgtacgatggtcctgtacgattataatggatcaaagctggtagtgcaataataacaaaagttagaaaaaataaattttaataagt

SEQ ID NO: 3923 - DNA, 2151 bp, Homo sapiens
  SIMILAR (268)..(1956): 1001254mologous to Homo sapiens hOAT1-1,accession number AB009697,Smith-Waterman Score=2924.
gaaagctgagctgccctgacccccaaagtgaggagaagctgcaagggaaaagggagggacagatcagggagaccggggaagaaggaggagcagccaaggaggctgctgtccccccacagagcagctcggactcagctcccggagcaacccagctgcggaggcaacggcagtgctgctcctccagcgaaggacagcaggcaggcagacagacagaggtcctgggactggaaggcctcagcccccagccactgggctgggcctggcccaatggcctttaatgacctcctgcagcaggtggggggtgtcggccgcttccagcagatccaggtcaccctggtggtcctccccctgctcctgatggcttctcacaacaccctgcagaacttcactgctgccatccctacccaccactgccgcccgcctgccgatgccaacctcagcaagaacggggggctggaggtctggctgccccgggacaggcaggggcagcctgagtcctgcctccgcttcacctccccgcagtggggactgccctttctcaatggcacagaagccaatggcacaggggccacagagccctgcaccgatggctggatctatgacaacagcaccttcccatctaccatcgtgactgagtgggaccttgtgtgctctcacagggccctacgccagctggcccagtccttgtacatggtgggggtgctgctcggagccatggtgttcggctaccttgcagacaggctaggccgccggaaggtactcatcttgaactacctgcagacagctgtgtcagggacctgcgcagccttcgcacccaacttccccatctactgcgccttccggctcctctcgggcatggctctggctggcatctccctcaactgcatgacactgaatgtggagtggatgcccattcacacacgggcctgcgtgggcaccttgattggctatgtctacagcctgggccagttcctcctggctggtgtggcctacgctgtgccccactggcgccacctgcagctactggtctctgcgcctttttttgccttcttcatctactcctggttcttcattgagtcggcccgctggcactcctcctccgggaggctggacctcaccctgagggccctgcagagagtcgcccggatcaatgggaagcgggaagaaggagccaaattgagtatggaggtactccgggccagtctgcagaaggagctgaccatgggcaaaggccaggcatcggccatggagctgctgcgctgccccaccctccgccacctcttcctctgcctctccatgctgtggtttgccactagctttgcatactatgggctggtcatggacctgcagggctttggagtcagcatctacctaatccaggtgatctttggtgctgtggacctgcctgccaagcttgtgggcttccttgtcatcaactccctgggtcgccggcctgcccagatggctgcactgctgctggcaggcatctgcatcctgctcaatggggtgataccccaggaccagtccattgtccgaacctctcttgctgtgctggggaagggttgtctggctgcctccttcaactgcatcttcctgtatactggggaactgtatcccacaatgatccggcagacaggcatgggaatgggcagcaccatggcccgagtgggcagcatcgtgagcccactggtgagcatgactgccgagctctacccctccatgcctctcttcatctacggtgctgttcctgtggccgccagcgctgtcactgtcctcctgccagagaccctgggccagccactgccagacacggtgcaggacctggagagcaggtgggcccccactcagaaagaagcagggatatatcccaggaaagggaaacagacgcgacagcaacaagagcaccagaagtatatggtcccactgcaggcctcagcacaagagaagaatggactctgaggactgagaaggggccttacagaaccctaaagggagggaaggtcctacaggtctccggccacccacacaaggaggaggaagaggaaatggtgacccaagtgtgggggttgtggttcaggaaagcatcttcccaggggtccacctccctttataaaccccaccagaaccacatcattaaaaggtttgactgcg

SEQ ID NO: 3924 - DNA, 2871 bp, Homo sapiens
  SIMILAR (1917)..(1177): 991254mologous to Escherichia coli K12 IS5 transposase,accession number AE000234,Smith-Waterman Score=1294.
tcacagagtcagaatggatttccagaaaccagcctcactcttggtgatgctggcacagatgcgtatgtcattacctttgccagaaagagccttacactcatagggtttctcaccagtgtgaattctctgatgttcagtaaggtgtgaattaagtctaaaggccttcccacattgtttacactcatagggtttctcaccagtatgaattctttgatgtattctaaggtctacactacgactaaaggccttcccacattctttacatttgtatggttttacacccgtatgaattttctgatgttcagtgaactgcccacgccgactaaaggacttcccacattctttacagtcatagggttttaaaccagaatgaattttcagatgttctttaagattccctctacgaataaaggcctttccacattctttacatttatagggcttttcaccagtgtgaattctctggtgttcagtaaggtagaaaccaaatctaaaggtcttcccacatcgtacacatttgtagggcttcacatcagtatgaattttcttatgtagaattcgtaagggtttcacaccagtatgaagtctctgatgttcagtaaggagtgccagcagcgtttcaacaggcaccggacgcgggcggtcggtgccgtcaatggcgataatgtccgcgcccgcctgcgccagcgcatcaacatcttcaatataggccgtgatgcgtaccggagaatcctccagatcgcgtttcacaattccaataatcggcacgctcaccaccgcacgcgtggcttgcagatttgccacaccttcaatgcgaatggcaaccgcgcccgcctgttctgccgctaatgccatggcggcgacgatttcgggtttatcgagcgggctgtccggaaccggtaaatcgtttttggcgctgccaaacggcacggcaccgctgaatggtttaccgtcgatagcgtcatgagtacgcaacgcttccgggcgcaaccaacgctgaacgcgagaaggcatatccagcccaatcagcaggatcaccacgaacgtcagactgaacgagagcgatgccagcgcagtacccagatccagacgttgagcgatcaacgcgccgatgattggggccagtgcaccgcccaatgcgccaacgttgtaggtaaagcccaggcccgctgcacgcttgccgggacgctcggcgatcagccagtccacatccacctcggccagctcctcgcgctgtggcgctccttggtagccggcatcggctgagacaaattgcttctctccatgaagcagattacccagctgattgaggtcatgctcgttggccgcggtggtgaccaggctgtgggtcaggccactcttggcatcgacaccaatgtgggccttcatgccaaagtgccactgattgcctttcttggtctgatgcatctccggatcgcgttgctgctctttgttcttggtagagctgggtgcctcaatgatggtggcatccaccaaagtgccttgggtcatcatgacgcctgcttcggccagccagcgattgatggtcttgaacaattgacgggccagttgatgctgctcgagcaggtggcggaaattcatgatggtggtgcgatccggcagggcgctatccagggataatcgggcaaacaggcgcatggaggcgatttcgtacagggcatcttccatggcaccgtcgctcaggttgtaccaatgctgcatgcagtgaatacgcagcatggtctccagcggatagggccgtcggccattgcccgccttgggataaaacggctcgatgacagcggtcatattctgccatggcagaatctgctccatgcgggagaggaaaatctcttttcgggtctgacggcgcttagtgctgaattcactatcggcgaaggtgagttgatggctcatgatgtccctctgggatgcgctccggatgatttgatgatctctatcagactggtcgcccaaatgtaacccgagatccgggaccattgaacgcgactccaaaaccttcgatttgctgtcatctcgttgccgatcaacagaagctgcgaaggacgcgcccagcactggggtctgcggtggtctgggctttagagctataagctcgaagctccgaatttctcgtatagtcacttggtcattatgcctcgtgtcgcttggatagtagataattcgctgatcacgatcatcaaatatcacacaatttcccgatagctgaacggtaaacgcgcatctgccagcgcggagcatcgggtgttttgccgcttgttctgccaccagcgcgctaagcgtggtttctggaatctcaacctgagtggcgttgagctgcgccagctgcgcatactcacctggcagcataatatcgacatcgccgcacaacagcgccggatccgcggcgaactgggcaatcagcattttcaggcgttcagcatgctggattaacgttggctcatcgtaacgctgtttattggcgaggatctcaatactcaaatcaccgtgtacatccgggaacagggccagttcaaggtcattaaccggaccggttgccagggtatgggtttgcgcctgaacatcaggaatatccagttggtaatcaaataccttgatattgagtaccggaccaaacagcggttcatcacctgccgctcgcccgctgtcacggacaatttgttcggcatcgtaacgttgatgacgacgcatttttttcagttgtgctgccagtcgggttgccagttccggcagcgtttcttgcgccgcaatgtgaatacccaacggcaaaacgttgagcacgggtccggtagccgtcagcgccgccgagcccagtcgacgcataaagataaatccggcggcgtagtccat

SEQ ID NO: 3925 - DNA, 4311 bp, Homo sapiens
  SIMILAR (1462)..(2211): 981254mologous to Escherichia coli IS5 39.3kDa protein,accession number U70214,Smith-Waterman Score=1294.
atgcagtattggggaaaaatcattggcgtggccgtggccttactgatgggcggcggcttttggggcgtagtgttaggcctgttaattggccatatgtttgataaagcccgtagccgtaaaatggcgtggttcgccaaccagcgtgagcgtcaggcgctgttttttgccaccacttttgaagtgatggggcatttaaccaaatccaaaggtcgcgtcacggaggctgatattcatatcgccagccagttgatggaccgaatgaatcttcatggcgcttcccgtactgcggcgcaaaatgcgttccgggtgggaaaatcagacaattacccgctgcgcgaaaagatgcgccagtttcgcagtgtctgctttggtcgttttgacttaattcgtatgtttctggagatccagattcaggcggcgtttgctgatggttcactgcacccgaatgaacgggcggtgctgtatgtcattgcagaagaattagggatctcccgcgctcagtttgaccagtttttgcgcatgatgcagggcggtgcacagtttggcggcggttatcagcagcaaactggcggtgctgcgtggccgctctccatccttgttattgacaaattaatatatcgtcgcccttgctgtggaacactgcagccagatgtgattattacaccggttctgccggtggcctgcattagcacctggcgccatactgaggcagatcccaaagaaacagcaaagggttggcctccactactctccgatgtcctatgtgtcttggagataccgcgtctgccactggacgataacggtattctgtttatcgaaaacgttggcaacctcgtatgcccggccagcttcgatctcggtgaaaaacacaaagtggcggtgctttccgttaccgaaggtgaagacaaaccactgaaatatccgcatatgtttgccgccgcctcgctgatgctgctcaacaaagttgacctgttgccgtatctcaactttgacgttgaaaagtgcatcgcctgcgcccgcgaacggcgaagggatggaccagtggctgaactggctggagacacagcgatgtgcataggcgttcccggccagatccgcaccattgacggcaaccaggcgaaagtcgacgtctgcggcattcagcgcgatgtcgatttaacgttagtcggcagctgcgatgaaaacggtcagccgcgcgtgggccagtgggtactggtacacgttggctttgccatgagcgtaattaatgaagccgaagcacgcgacactctcgacgccttacaaaacatgtttgacgttgagccggatgtcggcgcgctgttcgccctggcgcagacccgcgagcaaggctacgccctggacagcgaagagaacgagcagggcgtgcgctgcgtggcggtgccggtgtggaaccacgagtcccgcgtcatcgacgacctgagcctgtcgacgctgacctcccgcgctggtaatggccggcgaccttatccgctggaaaccatgctacgcattcactgcatgcagcattggtacaacctgagcgatggcgcgatggaagatgctctgtacgaaatcgcctccatgcgtctgtttgcccggttatccctggatagcgccttgccggaccgcaccaccatcatgaatttccgccacctgctggagcagcatcaactggcccgccaattgttcaagaccatcaatcgctggctggccgaagcaggcgtcatgatgactcaaggcaccttggtcgatgccaccatcattgaggcacccagctcgaccaagaacaaagagcagcaacgcgatccggagatgcatcagaccaagaaaggcaatcagtggcactttggcatgaaggcccacattggtgtcgatgccaagagtggcctgacccacagcctggtcaccaccgcggccaacgagcatgacctcaatcagctgggtaatctgctgcatggagaggagcaatttgtctcagccgatgccggctaccaaggggcgccacagcgcgaggagctggccgaggtggatgtggactggctgatcgccgagcgccccggcaaggtaagaaccttgaaacagcatccacgcaagaacaaaacgggcatcaacatcgaatacatgaaagccagcatccgggcccaggtggagcacccatttcgcatcatcaagcgacagttcggcttcgtgaaagccagattcaaggggttggggagaaaaaatcggctcaaacatgaagaaatgaaatgactgagtcagccgagaagaatttccccgcttattcgcaccttccctaattgatgctgttcctgtgctgcccggattgtcatttttgccactggctaacgccaggtcgagattgttactacctgaaaatgcatcgctggcgatcagatttaatgaaccattcgggccaaatccaaatccgttgttggaaatattagcggtattcaactgaacacgaatatgagcgtcctgatcgcattgcattaccagcgtgattgttctgtctgctaattgtgttgttttaccccggacaacttggcgcatggcagcacttcgtttgccatagtcgatattttgtatgctactggagatattacactctgccagacgaacgcgatccccggcgtggcatttgagggcatccagttgtgcggcggttaaaatcaaacgctcggttgccggatcggtacgcaccagcaccacgcggaaatggtgataattttcattggcgaccaggcaggctgggaaatcgccctgcgcaggctgcccttctgccacttccaccagccgacttttacggatggcgcgcacgcggtcgatgtcacactcaagcgtcggcccaccgtcaaagatgtcgatatagttacggtagcgaaaaccttctttctccagcaccgcgcgggcaggcgcggtttgcggatgtacctgaccgatgacgtcctgggcttcctgggataaaaagtgggtatagatcggatgtttcggcatcagttctgcaataaatgccttttgcccggtgccgcagagaaaatcggcgcggctaaaatccatcgaaaagaagcgtttaccgaggctttgccagaacggtgaatagccgtgttcgtcaatcaccccgcgcatttcagcaaccactttgtcattaaacttgtcgcgaaaagccgccataaacataaagcgcgatttcgacagcaaatagccgttgccctctttgcgccagtccgggtcgagaaacagcgtgcacagctcgctgctgccggtgtgatcgttatggaatttgttcgtctgttccgtcgtaagaacaaactgcaacgtgaaattcaggacgttgagaaaaagatccgtgacaaccagaagcgcgtcctgctgctggacaacctgagcgattacatcaagccggggatgagcgttgaagcaatccagggcatcatcgccagcatgaaaggtgactatgaagatcgcgttgacgattacatcatcaaaaatgccgagctctccaaagaacgccgcgatatctccaaaaagctgaaagacgttgtgcgctccagcttcccgtaaccaacttttcaccaaagatatttgttccatgctggctaaatctgctttggttactactccaatgaccgggtgattcatggcccggtagggcgtttttacctctaattcctgcttcagcgctgagattcctgccgtctgaacggtatcgatccggaagcgtatctgcgccatattctgagcatactgccggaatggccctccaaccgtgttgacgaactccttctcaatacctttacggaacttcgccccttctttcaggttgcgtaggccatacttcacaaacgcctgcatatagcccatttttttgccgcagtcgtaactgtcgccggtcatcagcattgcatcaacggattgttttttcgccagctcggcaatagcatcagtcagctgaatacgtccccatgcaccatgctgagtacgttccagttccggccaaatatcggcagaaagcacatagcgacctacggccatgatgtctgagtccagcgtctgcggctgatccggtttttcgataaattcaacaatgcggctgactttaccctcacggtccagcggctctttagtctggctgcggcccgtttcgttgaaacgtgcaatcatggcagcaaggttgtaacgtagcgggtcggcgctggcatcgtcgatcacaacgtctggcagtaccacgacaaatgggttgtcaccaatggcaggtcgcgcacacaaaatggagtggcctaaacctaaaggttcgccctgacgcacgttcat

SEQ ID NO: 3926 - DNA, 3252 bp, Homo sapiens
  SIMILAR (2617)..(2976): 681254mologous to Escherichia coli IS5 39.3kDa protein,accession number U70214,Smith-Waterman Score=381.
tcacaagcatgtgttgatatccttccatatgccagatgcggtgatgggagccatatacacaaagatgaaggactggctacagctttcacagaccttacaaccagggccagcccaatccgcccgattctcggtccctatactgcctccttttcccatgcgcatcgcaagggatcggttgatggggccctcagtatgacttcgcctcctttctccatccgaggccggggtcctaaagtcggtgtcacggtggcagcacccagcgttttgttggctctttcgccagcagcgccgagcggggggttttctgtcacagcacttgttgcaccgaatttctcggtcgcagaacctctcttttccgagggtcgacattttctgcgtgacaacaccgttggttccgccaaaatggatgttgtccttgggaactcctccggctggcgtcactcttagggtcccagcaccgccatttcgccaagccgagttctcttggtcgcggcacatcttgttcctcggtgcctccattttctcggtggcggcagcgctctggtagccgatccagcggcaaactttagtttttggtgcagttaaggtattgccactaagaaatcgtcgtctctgagaaatatcgaggcttggaaggttgtacagtgcttccaccgagaaagcacttttgggggtactcatttgtttttcatctttttcctttccatggacagcttttgattgtcttccatctgtaagggcacatggggctttttgggcctttgtgatggccagatgagaagctggaagaccccaataggcaaggccagtgaccaatgtgcatgcacagagaggcaactggaggctgaggagcttcctttgtcctgctgctgtggcctgttctccagggtggaggggtaggtccatgggggatgtggaccagagcccctccccggtttcggcactagatgtaaggttcttgtgttggttcaaaccctgtgggtatttcttgcaaggtggagacgagacattcatttcattcttttgatcttcaatcactgatacgctttcttccacttgatcaaatcggctactgaagcttgtgcatgcatcacgtagtacttgtgccatggttttcagctccatcaggtcatttaaggtcttctctatgctgtttattccagttagccattcgtctaatcttttttcaaggtttttagcttctttgcgatgagtttgaacatcctcctttagctcggagaagtttgttattaccgatcttctgaagcctacttctgtcacctcgtcaaagttattctctgtccagctttgttccgttgatggcgaggagctgtgattctttggtctttgatgatggtaacctacagatggggttggtgtggatgtcctttttgttggtgttgatactattcctttctgtttgttagttttcctcctaacagtcagaaccctcagctgcaggtctgttggagtttgctggaggtccactccagaccttatttgcctgacttcaagggctttgatagcttctagcatttgtagaaactctgctgctttccatacatcattggcttcttcttctccttgtatcattaattttgctgtatatgtgaactcaattaaatggcgaaaggccattttactaacacctgggtttgggcattgtctagaccagtggccttcattgccatacttgaaacatgcgccaggtggaggtggattgctaggaggcttctgtgtggagctgcggccctgtgggcctgcagggccccggatggcggagtcaagcatttgaaactctgcatgtttttgccttttattttcctcatcacgattgttaaagactttgaaggctaaattaagaaggtctcgttgtgggttttgagagccatcatcaagcttctgtagcttacgccgaatatcggggtggattgggacatgaactaaaggtttaaaatagtggttccttctgggctggttgggttggacagctgtgatttgggactgctttccagcccttgctggcggctgcccggagtctactggcaaaacggactctctcctggagtccagagcaccttggaaccaagtacagcgaagcccactgagttcagttggccggggacacagaagcagcaagaggcacccgtagaagaggtggggcaggcagaggaacccgacagactcaggctccagcagcttccctggagcagtcctctccatccgtatcatttggtccgcccgaaacaggttggccagcgtgaataacatcgccagttggttatcgtttttcagcaaccccttgtatctggctttcacgaagccgaactgtcgcttgatgatgcgaaatgggtgctccaccctggcccggatgctggctttcatgtattcgatgttgatggccgttttgttcttgcgtggatgctgtttcaaggttcttaccttgccggggcgctcggcgatcagccagtccacatccacctcggccagctcctcgcgctgtggcgccccttggtagccggcatcggctgagacaaattgctcctctccatgcagcagattacccagctgattgaggtcatgctcgttggccgcggtggtgaccaggctgtgggtcaggccactcttggcatcgacaccaatgtgggccttcatgccaaagtgccactgattgcctttcttggtctgatgcatctccggatcgcgttgctgctctttgttcttggtagagctgggtgcctcaatgatggtggcatccaaggagcgccacagcgcgaggagctggccgaggtggatgtggactggctgatcgccgagcgtccaggcaaggtaaaaaccttgaagcagaatccgcgcaagaacaaaacggccatcaacatcgaatacatgaaagccagcatccgtgccagggtggagcacccgtttcgcatcatcaagcggcagttcggcttcgtgaaagccagatacaaggggctgcgccacaaacgcaggtacagggacagccgacaccgagaaccaagggaagcggctgagagctgcgcctccacggaataactgccagccggcacagtgcgagtgagaaaccggccactccatgaaacgaccagtactgccacggaaaagaatccgacgtcgccaacaagcggtgctaccaggagaaacgctttcagtgaagcgcttggttgaatgatctgccaggaaaaacttagatggtagatgttggtcttttccattgtggaaactggtggtcat

SEQ ID NO: 3927 - DNA, 4446 bp, Homo sapiens
  SIMILAR (634)..(762): 1001254mologous to Escherichia coli O157:H7 putative dehydrogenase,accession number AP002563,Smith-Waterman Score=217.
ttatttcaacccggcatttttattagagaatggcacatccgttgctgatttatcgaccagtgaaccaaagccggtgccggtttcgcctttatgggcaatatccccgaaactaacttcgcctttcttgccgcgcacgacgcccggcgttgccagttgaacatctgccactggctcacccaacatttgcgcgccgtggaacagaattttctcccgtagattttccgctgccaaacgcgccgcgttacccgagaagcaagtaccggacgaggcatatgcgcctttatcaaacaacgcatgatcggtatcaccggagataacatgcacgtcctgcggtgggcagtgcagcacttctgctgccagtttcgtcactacagtatccagaccagtaccaatatccgcaccgccagaatgaacgataaaggtgccgtccgattccagtttgatcatgcagttagcctgatcgatatccgggatacccgatttctgcatgataatggcgacgccgcgaccgatgtgccagtcaccattttgcggtttcggtgacgaccattggatcatctcgcgaccctgacgcaggatctcttccagtgcacagctggcggcggaaggaacggaggtcggcgctttaccttcaccgatcttctcgatcgcatcgccgcacctacccgcgaagagatcgacgacgcgctttctggtttgttcagccgcgatgctggctggcagcaatactatcaggtcattgaactggcggttgcacgtaaaatatccgcagccaccagttgggtacttctcaattaacactgcgttgcgttcaaaatcaccgctgccgccgatgccgttcatcagatcgaccccggctacgtgtgttgagttggcatgcccgtaaatatcaaactccaggccgatgttcagagcgatgacgcccagacgacggatgatttccgggttattggaaatctccgcaggggttggcgcactgccgccgtcgctgctggtcaggcgaatggtatccagcgccgcgaggcctggggtattttcggtgttgtgctccagcaccacgcgatactggttggcctgagtataaatagtggaaatcagccgctgaccaaacgcgttgtacagggcgttatcgacatccgccatgctgatccccagacggctggcgctgtcgcgatcaacattgacatacgccaccagccctttgtcctgccagtcgctggagacatcagaaagctgtggcagttgctggagtttttccatcaactgtggcacccaggtactgagcgcatccagtgacgtggcctgcaaggtaaactggtactgggtgcggctgacctgagtatcaatagtcagatccatcttatcggcgtcgcacctatccggtacgtggacgtggatgtcacagtttttcgtaaaaatcaggatatgatccccagtaatttccgcacgcgcacgaaccaccgttaacgccgcctgaatggactcctgcatcacttcgccgagcgaaccggtataggtcagtttgcctttacccggaacacatgcggtttcaatggtcagcaagtcaccgcccacttccgtccacgccagaccggttacctgaccgacacggttttcgttatccgcgcgaccatagtcgaaacggcccggcagttcggttgggatcgccaggttaaacatcggcagagtgaaggtttctgcagtatccagcgaaccgttgaggatggcgtcgataatggcgcgggtatctttaatcgagatacgtttgccagtgccgttccagccagtgttaaccagataagcctgcgcgcccgccgcctgcatacgtttcaccagcacttctgcgtaaaagtgttcccggaaatggcgacgatgccgattgcgctggttattctgattgtctgtgccattggtgcggtgatcggtttgatcaacggtctgattatcgcttatctcaacgtgacgccgttcattaccacgctcggcacgatgatcatcgtctatggcatcaactcgctctattacgactttgtcggggcgtcgccaatttctttgctcagggctttgtcgcactgggcggcgaatcagggttgggatctgaacaaagacggtcagattcagttcgtactgctgaaaggtgaaccgggccatccggatgcagaagcacgtaccacttacgtgattaaagaattgaacgataaaggcccgcaagcggcggcctggcgcattactgtgcgccagttcgtccattaagatcagcgccgggcggcgggcgagggcggcatcgagatcaaactcgctgatatgccgcccacggtacgcctggcgttttaacggcagaacagccagcccttccagcatggcggcggtatcttttcgcccgtgggtttctaccacgccaaccacaatatccagcccttgcgcccgcagtcgctgggcttctgccagcatcgcccaggtcttcccacgcctgcacagcaccgaagaaactttcaggtccgactttttcccattacgccatgaggctgtaaatctgaggtcatcgatcacttcgagcattacgagaagaagacaggaaaatgtgggcaaaaacgcagacctgagcatgctgcagagaggatgtgcgagaatggagagcgtggtgctgggatcttcacagggtggcagaaactcggctgcagctcctcctgcaatgatgctggagatgtggtgtgatgtgatgcgggaagcagcatcacaggtgacttccgagatgttaaaggcgccacatggttcctcctgctgcttctggtcaaatgccagaggagagcgcaaaacagagccaggatttaaagcattgtcagaaaacgtcactgatattgtgctttctgatgccaacgtgcgtttagttgtcctctcggcttctgctggtatcactaatctgctggtcgctttagctgaaggactggaacctggcgagcgattcgaaaaactcgacgctatccgcaacatttccgggattttcgcccagacatacatcgaagccttcggcatttcaaccatccagcccgcttcatgcagccctttcttcagtgcaccgacaatgccgcgcagattatttctgccgatcatcgctttgttagagcgcatgcgcccacgggtctgcacccattccatcagctgattattatgtggacgataggtagccatcattggttggcacagtcccatcacgcggccgcccagttccagcgacataaaatggacgccgacaaccattacgccgcgattttgcatttgtgcgcgtttaaggttatccaacccttcaacatcaaaccatttacgtacgcgactgtcgggccagaaccatgccatgccggtttctaccagcgccatgccgagtgaacgaaagttttcggcaatcatcttctcgcgttcttccgcagaatgcaaggtgccttgagtcatcatgacgcctgcttcggccagccagcgattgatggtcttgaacaattggcgggccagttgatgctgctccagcaggtggcggaaattcatgatggtggtgcggtccggcaaggcgctatccagggataaccgggcaaacagacgcatggaggcgatttcgtacagagcatcttccatcgcgccatcgctcaggttgtaccaatgctgcatgcagtgaatgcgtagcatggtttccagcggataaggtcgccggccattaccagccttggggtaaaacggctcgatgacttccaccatgttttgccatggcagaatctgctccatgcgggacaagaaaatctcttttctggtctgacggcgcttactgctgaattcaccctgagtattatcgaggctgacttccgcatttgggctaatgctggttaacgcattgtagcgtgcattaagcccctcgatagccagcgttccccctgtaacattcaggtttccgccacctgtcagttcaccctgactgatcccacctttatttaccgtcagcgccccctctttgaacaaaacagtcgaacccatctgcccggtgaatgtctctaccgtctgcgtcgatccattaagatcgacgatggccgcgttgctgatgttcagttcccgggtgttgccaagtgcaccatccgcatcggtacgtaatgtccccatctgaacgtaggttgccccctgatagtcgttctgaccgttggaaagcgaaacctgtcgcaccgtattgattgccagatccccttcaccaccgatttttgccgacatatcggccgttgcgccataggctccgccatgttcggctaacgtcagcttttgcccaccatggatgttcagcgctttcagcccatagttaacgtacaaaccattacctggtgcggtcgtgaggcggaatccataatcaccctcggcgaccaccgttccgttttgcgcaatgtgtaacgttttgtccgcttccacctcgtcgcc

SEQ ID NO: 3928 - DNA, 2802 bp, Homo sapiens
  SIMILAR (1177)..(1935): 991254mologous to Escherichia coli IS5 39.3kDa protein,accession number U70214,Smith-Waterman Score=1306.
atgacgcagattttcacgggtacattagtggaagccgatcctttccacgccgtgacgctcgttgccaatcacgacacccaaccgttgcaagccctcgaagcgccggtcgaaccgtggtttaaaccgctggcgtatgccttaattttgttgcgggaaaatggcgttccttcggtattctatccggacctctacggtgcgcattacgaagatgtcggtggtgccgggcaaacctatccgatagatatgccaataatcgaacagcttgatgagttaattctcgcccgtcagcgtttcgcccacggtgtacagacgttatttttcgaccatccgaactgcattgcctttagccgcagtggcaccgacgaatttcccggctgcgtggtggtcatgtcgaacggggatgatggcgaaaaaaccattcatctgggagagaattacggcaataaaacctggcgtgattttctggggaaccggcaagagagagtagtgaccgacgaaaacggcgaagcaaccttcttttgcaacggcggcagcgtcagcgtgtgggttatcgaagaggccgccaacaatcgtcagtacgactacggagctggccataaaataccagttatcaattacactgacgtgcatttgcggattgaacgcagctgccgcttccgtgctgatccccgacagcaacacgagctgcaactctccagcaaactggcagttcatgatgtgctgaccaatatttataatcggcgctactttttcaacagcgtagagtcattattgtcgcgacctgttgttaaggacttctgtgtcatgctggttgatattaatcagttcaaacgcatcaatgcccaatggggacatcgtgtgggtgataaagtgctggtttcaattgtcgatattatccagcaaagcatccgccccgatgatattttagcgcgactggagggtgaggtgtttggcttgctatttaccgaactcaatagtgcccaggcaaaaatcattgcggaacgtatgcgtaaaaatgtcgaactcctgaccggctttagtaacagatatgatgttcctgaacaaatgaccatcagtattggcacggttttttcaacgggtgacacgcgtaatatctcgcttgtcatgacggaagcagataaagccttacgcgaagcgaaaagcgaggggggcaacaaacattggtacaacttgagcgatggcgcgatggaagatgctctgtacgaaatcgcctccatgcgtctgtttgcccggttatccctggatagcgctttgccggaccgcaccaccatcatgaatttccgccacctgctggagcagcatcaactggcccgccaattgttcaagaccatcaatcgctggctggccgaagcaggcgtcatgatgactcaaggcaccttggtcgatgccaccatcattgaggcacccagctcgaccaagaacaaagagcagcaacgcgatccggagatgcatcagaccaagaaaggcaatcagtggcactttggcatgaaggcccacattggtgtcgatgccaagagtggcctgacccacagcctggtcaccaccgcggccaacgagcatgacctcaatcagctgggtaatctgctgcatggagaggagcaatttgtctcagccgatgccggctaccaaggggcgccacagcgcgaggagctggccgaggtggatgtggactggctgatcgccgagcgccccggcaaggtaagaaccttgaaacagcatccacgcaagaacaaaacggccatcaacatcgaatacatgaaagccagcatccgggccagggtggagcacccatttcgcatcatcaagcgacagttcggcttcgtgaaagccagatacaaggggttgctgaaaaacgataaccaactggcgatgttattcacgctggccaacctgtttcgggcggaccaaatgatacacagtcaatattccgcgttgaggagacatcaagatggatcagtctcgtttaagccggagacacacacctgcgatgctcatcgccctgctctaaagccggcgaatgattatgtccgtaccttcttccgtggcgttgatattagtcaggtattcagtgcgaaagatattgcccgccggacaccgaatggcttaattcgtaaaacccctggcttcggcccacgttcggcactgaaattattgcaggatgaagatcgcgaatatggctacgttatcgaacgcggtaataagtttgtcggcgcagtctccatcgattcgcttaaaaccgcggctgtccctcctgttcagctactgacggggtggtgcgtaacggcaaaagcaccgccggacatcagcgctatctctgctctcactgccgtaaaacatggcaactgcagttcacttacaccgcttctcaacccgccgggcagtgacgtcatcgtctgcgcggaaatggacgaacagtggggatacgtcggggctaaatcgcgccagcgctggctgttttacgcgtatgacagtctccggaagacggttgttgcgcacgtattcggtgaacgcactatggcgacgctggggcgtcttatgagcctgctgtcaccctttgacgtggtgatatggatgacggatggctggccgctgtatgaatcccgcctgaagggaaagctgcacgtaatcagcaagcgatatacgcagcgaattgagcggcataacctgaatctgaggcagcacctggcacggctgggacggaagtcgctgtcgttctcaaaatcggtggagctgcatgacaaagtcatcgggcattatctgaacataaaacactatcaataa

SEQ ID NO: 3929 - DNA, 4989 bp, Homo sapiens
  SIMILAR (457)..(1413): 971254mologous to Escherichia coli IS5 39.3kDa protein,accession number U70214,Smith-Waterman Score=1622.
atgtttggtggtgatctcacccgtcgttatgggcaaaaggtgcataagctgacgctgcacggcggttttagctgccctaaccgtgacggtaccatcgggcgtggtggctgcacattctgtaatgttgcctcgtttgccgatgaagcgcagcagcatcgttccattgccgagcaactggcgcaccaggcgaatttagttaaccgcgctaaacgctatctggcctactttcaggcgtataccagcacctttgcggaagttcaggtgctgcgttctatgtatcagcaggcggtgagccaggccaatattgtcggtttgtgtgtgggtacccgcccggactgcgtgccggatgcggtgctggatctgctttgcgaatataaggaccagggttacgaagtgtggctggagctggggctacaaaccgcccacgacaaaacactgcatcgcatcaaccgcggccatgattttgcctacagtgatattactgaattcagcagtaagcgccgtcagaccagaaaagagattttcttgtcccgcatggagcagattctgccatggcaaaacatggtggaagtcatcgagccgttttaccccaaggctggtaatggccggcgaccttatccgctggaaaccatgctacgcattcactgcatgcagcattggtacaacctgagcgatggcgcgatggaagatgctctgtacgaaatcgcctccatgcgtctgtttgcccggttatccctggatagcgccttgccggaccgcaccaccatcatgaatttccgccacctgctggagcagcatcaactggcccgccaattgttcaagaccatcaatcgctggctggccgaagcaggcgtcatgatgactcaaggcaccttggtcgatgccaccatcattgaggcacccagctcgaccaagaacaaagagcagcaacgcgatccggagatgcatcagaccaagaaaggcaatcagtggcactttggcatgaaggcccacattggtgtcgatgccaagagtggcctgacccacagcctggtcaccaccgcggccaacgagcatgacctcaatcagctgggtaatctgctgcatggagaggagcaatttgtctcagccgatgccggctaccaaggggcgccacagcgcgaggagctgtccgaggtggatgtggactggctgatcgccgagcgccccggcaaggtaagaaccttgaaacagcatccacgcaagaacaaaacggccatcaacatcgaatacatgaaagccagcatccgggccagggtggagcacccatttcgcatcatcaagcgacagttcggcttcgtgaaagccagatacaaggggttgctgaaaaacgataaccaactggcgatgttattcacgctggccaacctgtttcgggcggaccaaatgatacgactggcacaggcagatgacgccgccccggcagcgggcagtactctggacaaaatcgccaaaaacggtgtgattgtcgtcggtcaccgtgaatcttcagtgcctttctcttattacgacaatcagcaaaaagtggtgggttactcgcaggattactccaacgccattgttgaagcagtgaaaaagaaactcaacaaaccggacttgcaggaccaagaagacaacacagatgacagaccgatcatgagagagacgagacgaccagagcgagacacgacaagaagaagaagaaaggtagagggccattttggtgtgtcggtctccgagttttctcgggaggttgttccagggcccaaggaagttcatgcaaaaaaagggtggtttcggtgttggacccgagggccttctcagtactgcgctgtcctaaaaaaagtaatagggggcaacaaacttccacaagaggagaggcgcaacaaagagggaacaacctgcgcggtgctgacgccgcttattcagacgctgcgtgacattcccggcgtgaaagcgctgcgtgatgccacccgtggtggtgtaaacgcggtggttcatgagttcgcggcagcctgcggttgtggtattgaactttcagaagcggcactgcctgttaaacctgccgtgcgtggcgtttgcgaattgctgggactggacgccctgaactttgccaacgaaggcaaactagtaatagctgttgaacgcaacgcggcagagcaagtgctggcagcgttacattcccatccactggggaaagacgcggcgctgattggtgaagtggtggaacgtaaaggtgttcgtcttgccggtctgtatggcgtgaaacgaaccctcgatttaccacacgccgaaccgcttccgctcaatgaccttttgcaccgctttgcggtgctttcctggaagaacaaaatgtcatatacaccgatgagtgatctcggacaacaagggttgttcgacatcactcggacactattgcagcagcccgatctggcctcgctgtgtgaggctctttcgcaactggtaaagcgttctgcgctcgccgacaacgcggctattgtgttgtggcaagcgcagactcaacgtgcgtcttattacgcgtcgcgtgaaaaagacacccccattaaatatgaagacgaaactgttctggcacacggtccggtacgcagcattttgtcgcgccctgatacgctgcattgcagttacgaagaattttgtgaaacctggccgcagctggacgcaggtgggctatacccaaaatttggtcactattgcctgatgccactggcggcggaagggcatatttttggtggctgtgaatttattcgttatgacgatcgcccctggagcgaaaaagagttcaatcgtctgcaaacatttacgcagatcgtttctgtcgtcaccgaacaaatccagagccgcgtcgttaacaatgtcgactatgagttgttatgccgggaacgcgataacttccgcatgcgggttaccgggtgcttttgtctcacagctctcaagattctttccttcatcgtaacattaaatagcctgatgacaatgtgcctaggcgatgatctttttgcaatgaatttcccaggaaagaatgatacagagagacagaaagagagagagagagagactgaaaggcagacagatggaaaacatgcactcatggtggaagccagagtccttgctaacctaatttcagaagtggcataccatgctcccatgagattgtggtgtagcaaggccctctatgatccaccttcaggcagaaatgcaggcatttggagcacctacttgcctgaaccagcatccatctgccaggtgacttcgttagatattccaaccgtaagcgtgcgcaaatcccactggggaaatgcgctaacggcgacgctgcaaacagaaaaacgcccgctatgcctttccctggcgcgtcaggcgggagcagcgaaaaacgccacgttgccctctggaatgcaacaactgaacattgtcccgggtgcgcttccggactggctggttagcacagaggatctgaaaaatgttacccgcgacccattagctgaggccagacgggtgctggtggtggggcagggcggagagccagataaccaggaaatcgctatgctggcagaaaagctgggagccgaagtgggctacagtcgggcgcgagtgatgaacggtggcgttgatgctgaaaaagtgattggtatttccggacatctgctggcacctgagtttcatcggaccaaaaccgtcgattttgcaatcgatgttatggtcgccttcaaccaggcggatgtttttcactttggtgccaattttcagcatcgaagagctacctttcaccttcagatctttaatgatggtaacgctgtcgccgtcagccagcagattgccgttagcatctttaacgatcagctcgtcgctttcctgtgcaggttctgcgtcgttccattcgtaggcacattccgggcagatgtacatgccgttatcttcgtgtattcggagttgcattttgggcagtgtggtaatgacatgtggatttcctcaaaagtcagcagggcaaaagcgccaaaaaacggcagattgccgaaaaaggccgcaattatacacaaaatccctgagtttgtcggggtgaaggcaattctggccaaaggctacgacccggtgaaatggcggaagaaagataaggtgctggacgcagtattgaaagagctggaaagcggtaaatacagcgacggcgataagcatgccttcgaccagatgctgcacagtatcggcaaacagggcggcgatccgtatctggtgatggcggatttcgcagcctatgtagaggcacaaaagcaggtggatgtgctgtaccgcgaccaggaggcctggactcgcgcggcgatcctcaataccgcccgctgcggaagctcgatggaaagcaaacgtctggataatgccgcgctggcggcggggattagccccaattacatcaatgcccacggtaaaccgcagtcgattagcgccgaaaccaaacggcgtttgcttgacgcgatgcatcaacgtaccgccacgaaagtggcggtaacgccagtcccgaatgtcatggtttataccagcggcaaaaaaatgccgatggtggtggagggcagcggcgaatatagctggctgctgaccaccgaagaaggaacgcagtacaaaggccatgtaacggggggcaaagcgttcaatctaccgacgaagctgccggaaggttatcacacgctgacactcacccaggacgaccagcgcgcgcattgccgggtgattgtcgccccgaaacgctgttacgaaccgcaggcgttgctgaataaaccaaagctgtggggtgcctgcgttcagctttatacgctgcgatcggaaaaaaactggggtattggggattttggcgatctcaaagcgatgctggtggatgtggcaaaacgtggcgggtcgttcattggcctgaacccgattcatgcgctctatccggcaatccggagagcgccagcccatacagcccgtcttctcgccgttggctga

SEQ ID NO: 3930 - DNA, 2325 bp, Homo sapiens
  SIMILAR (619)..(1605): 901254mologous to Escherichia coli IS5 39.3kDa protein,accession number U70214,Smith-Waterman Score=1531.
atgaaccttatggaacaacccgccaaagaccagtacctatcaactcaagggttacctgtgttagtcaactcacttgcacgctatccacaagaagccttgcccatcacgaattacttcgcagcgagtgagctggctcctgccgtcgcccgtgccttcaacaaactgaaaacgctacgcgaaaacgcccgtagctggctgttgaaatacccggaacatgcccttaccggcctgctgcctgcggcgctcggcaaagccggtgaagcacaggataacgcccgcgctgccttgcgtatgcttaccgaaaacggtcatcagccattactgcaagaaatcgcccgacgttataaccagccggaagtaaccgatgcggtgaacgctctgcttgcgctcgatcccttagataatcacccgacaaaaatccccactcttccggccttttatcagccatcgctctggacgcgcccggtattaaaagcaaatgcccaatcactgccagatagcgccctcctccacctcggtgaaatgctccgcttccctcaggaagaggctctgtatccgggattattgcaggtgaaagacgtctgttccgccgactcactggcgggatttgcctgggatctgtttaccgcctggcagaccgctggcgcgccgtcgaaagagagttgggcgttcactgctgaattcagcagtaagcgccgtcagaccagaaaagagattttcttgtcccgcatggagcagattctgccatggcaaaacatggtggaagtcatcgagccgttttaccccaaggctggtaatggccggcgaccttatccgctggaaaccatgctacgcattcactgcatgcagcattggtacaacctgagcgatggcgcgatggaagatgctctgtacgaaatcgcctccatgcgtctgtttgcccggttatccctggatagcgccttgccggaccgcaccaccatcatgaatttccgccacctgctggagcagcatcaactggcccgccaattgttcaagaccatcaatcgctggctggccgaagcaggcgtcatgatgactcaaggcaccttggtcgatgccaccatcattgaggcacccagctcgaccaagaacaaagagcagcaacgcgatccggagatgcatcagaccaagaaaggcaatcagtggcactttggcatgaaggcccacattggtgtcgatgccaagagtggcctgacccacagcctggtcaccaccgcggccaacgagcatgacctcaatcagctgggtaatctgcttcatggagagaagcaatttgtctcagcgatgccggctaccaaggagccacagcgcgaggagctggccgaggtggatgtggacctgctgatcgccgagcgtcccggcaaggtaaaaaccttgaagcagaatccgcgcaagaacaaaacggccatcaacatcgaatacatgaaagccagcatccgtgccagggtggagcacccgtttcgcatcatcaagcggcagttcggcttcgtgaaagccagatacaaggggctgctgaaaaacgataaccaactggcgatgttattcaccctggccaacctgtttcgggtggaccaaatgatacagctgccaacgtatgagttatcgtcgggtataggcgctgttcgcagacaggcagaacttgatggtacgcctgcgatcaattccaaacgtgtttaccggatcatgcgccagaatgcgctgttgcttgagcgaaaacctgctgtaccgccatcgaaacgggcacatacaggcagagtggccgtgaaagaaagcaatcagcgatggtgctctgacgggttcgagttctgctgtgataacggagagagactgcgtgtcacgttcgcgctggactgctgtgatcgtgaggcactgcactgggcggtcactaccggcggcttcaacagtgaaacagtacaggacgtcatgctgggagcggtggaacgccgcttcggcaacgatcttccgtcgtctccagtggagtggctgacggataatggttcatgctaccgggctaatgaaacacgccagttcgcccggatgttgggacttgaaccgaagaacacggcggtgcggagtccggagagtaacggaatagcagagagcttcgtgaaaacgataaagcgtgactacatcagtatcatgcccaaaccagacgggttaacggcagcaaagaaccttgcagaggcgttcgagcattataacgaatggcatccgcatagtgcgctgggttatcgctcgccacgggaatatctgcggcagcgggcttgtaatgggttaagtgataacagatgtctggaaatatag

SEQ ID NO: 3931 - DNA, 1741 bp, Homo sapiens
  SIMILAR (1132)..(230): 1001254mologous to Escherichia coli IS5 39.3kDa protein,accession number U70214,Smith-Waterman Score=1571.
cctcccttaacccttgcagcagtgcttcttggtacctctgtaggtgctgaaactgggttacatcatttgggtcccagttagggtctgcttctgggaactggccccgagcgtaagcctgaacaaaaaatgtgccttctggtgcattggcttttaaccagtggagggctgcctgggttaccctccggcactcctcggtgttaaacagtgtcagtagttgctgtttgcagtgtatcatttggtccgcccgaaacaggttggccagcgtgaataacatcgccagttggttatcgtttttcagcaaccccttgtatctggctttcacgaagccgaactgtcgcttgatgatgcgaaatgggtgctccaccctggcccggatgctggctttcatgtattcgatgttgatggccgttttgttcttgcgtggatgctgtttcaaggttcttaccttgccggggcgctcggcgatcagccagtccacatccacctcggccagctcctcgcgctgtggcgccccttggtagccggcatcggctgagacaaattgctcctctccatgcagcagattacccagctgattgaggtcatgctcgttggccgcggtggtgaccaggctgtgggtcaggccactcttggcatcgacaccaatgtgggccttcatgccaaagtgccactgattgcctttcttggtctgatgcatctccggatcgcgttgctgctctttgttcttggtcgagctgggtgcctcaatgatggtggcatcgaccaaggtgccttgagtcatcatgacgcctgcttcggccagccagcgattgatggtcttgaacaattggcgggccagttgatgctgctccagcaggtggcggaaattcatgatggtggtgcggtccggcaaggcgctatccagggataaccgggcaaacagacgcatggaggcgatttcgtacagagcatcttccatcgcgccatcgctcaggttgtaccaatgctgcatgcagtgaatgcgtagcatggtttccagcggataaggtcgccggccattaccagccttggggtaaaacggctcgatgacttccaccatgttttgccatggcagaatctgctccatgcgggacaagaaaatctcttttctggtcacgcctcccgtgaacaacgccgcgctgtccagggcatcggctcttttcagaggaattgtttgatggctaccctcaccactggcgtggttcttcttcgctggcaacttcttagtgccgtaatgatgtttctggccagcacactcaacatccgttttcgtcggtctgattatgtcgggcttgcggtgatcagcagcggtctgggcgttgtttccgcctgttggttcgcaatggggttgcttggcatcacaatggcggacatcaccgctatcccaaccgccctgcggctgaccaccaccgatattgccacctgccggagcgccaccaccctgacgaccacccagcatctgcatggtgccgccaacgttcaccacgacttctgtggtgtagcgatcctgaccggattgatcggtccatttacgggtacgcagctgaccttcgatataaacctgagaacctttacgcagatattcgctcgccacttctgccagtttgccgaacagcacaacgcggtgccattcagtctgttctttcatctcgccggtcgctttatcacgccaggattcggaagtagccagcgtaatgttggcaactgggccaccatttggcat

SEQ ID NO: 3932 - DNA, 2607 bp, Homo sapiens
  SIMILAR (2343)..(1384): 991254mologous to Escherichia coli IS5 39.3kDa protein,accession number U70214,Smith-Waterman Score=1652.
ctatatttccagacatctgttatcacttaacccattacaagcccgctgccgcagatattcccgtggcgagcgataacccagcgcactatgcggatgccattcgttataatgctcgaacgcctctgcaaggttctttgctgccgttaacccgtctggtttgggcatgatactgatgtagtcacgctttatcgttttcacgaagctctctgctattccgttactctccggactccgcaccgccgtgttcttcggttcaagtcccaacatccgggcgaactggcgtgtttcattagcccggtagcatgaaccattatccgtcagccactccactggagacgacggaagatcgttgccgaagcggcgttccaccgctcccagcatgacgtcctgtactgtttcactgttgaagccgccggtagtgaccgcccagtgcagtgcctcacgatcacagcagtccagcgcgaacgtgacacgcagtctctctccgttatcacagcagaactcgaacccgtcagagcaccatcgctgattgctttctttcacggccactctgcctgtatgtgcccgtttcgatggcggtacagcaggttttcgctcaagcaacagcgcattctggcgcatgatccggtaaacacgtttggcattgatcgcaggcataccatcaagttctgcctgtctgcgaagcagcgcccatacccgacgataaccatacgttggcagctctccgataacatggtgtatacggagaagcacatccgtatcatcagtgtgacgactgcggcggccatccatccagtcatcggttcgtctgagaatgacgtgcaacaggtttatgccgtcgatgagcacgcgaatccgacaacgcttcaccacgttgatgagtttgtcatgcagctccaccgattttgagaacgacagcgacttccgtcccagccgtgccaggtgctgcctcagattcaggttatgccgctcaattcgctgcgtatatcgcttgctgattacgtgcagctttcccttcaggcgggattcatacagcggccagccatccgtcatccatatcaccacgtcaaagggtgacagcaggctcataagacgccccagcgtcgccatagtgcgttcaccgaatacgtgcgcaacaaccgtcttccggagactgtcatacgcgtaaaacagccagcgctggcgcgatttagccccgacatagccccactgttcgtccatttccgcgcagacgatgacgtcactgcccggcgggttgagaagcggtgtaagtgaactgcagttgccatgttttacggcagtgagagcagagatagcgctgatgtccggcggtgcttttgccgttacgcaccaccccgtcagtagctgaacaggagggacaggtatcatttggtccgcccgaaacaggttggccagcgtgaataacatcgccagttggttatcgtttttcagcaaccccttgtatctggctttcacgaagccgaactgtcgcttgatgatgcgaaatgggtgctccaccctggcccggatgctggctttcatgtattcgatgttgatggccgttttgttcttgcgtggatgctgtttcaaggttcttaccttgccggggcgctcggcgatcagccagtccacatccacctcggccagctcctcgcgctgtggcgccccttggtagccggcatcggctgagacaaattgctcctctccatgcagcagattacccagctgattgaggtcatgctcgttggccgcggtggtgaccaggctgtgggtcaggccactcttggcatcgacaccaatgtgggccttcatgccaaagtgccactgattgcctttcttggtctgatgcatctccggatcgcgttgctgctctttgttcttggtcgagctgggtgcctcaatgatggtggcatcgaccaaggtgccttgagtcatcatgacgcctgcttcggccagccagcgattgatggtcttgaacaattggcgggccagttgatgctgctccagcaggtggcggaaattcatgatggtggtgcgatccggcaaggcgctatccagggataaccgggcaaacagacgcatggaggcgatttcgtacagagcatcttccatcgcgccatcgctcaggttgtaccaatgctgcatgcagtgaatgcgtagcatggtttccagcggataaggtcgccggccattaccagccttgggataaaacggctcgatgacagcggtcatattctgccatggcagaatctgctccatgcgggagaggaaaatctcttttcgggtctgacggcgcttagtgctgaattcactatcggcgaaggtgagttgatggctcatgatgtccctcttcccaaggggaaaacgcacgacgtgctgaccggaagtgatgacggtcgccacagcaacacgtctctggcgtggggagctggcgtgcagtttaacccgaccgaatccgtggccattgatattgcttatgaaggccccggcagtggcgactggcgcactgacggtttcatcgtgggtgtcggttataagttcctcacagcgctcaaacctgacgccggatttcccattcttagcgcaaggaagaccccttgtggccat

SEQ ID NO: 3933 - DNA, 416 bp, Homo sapiens
  misc_feature (1)...(416): n = a,t,c or g
nnnnnnnnnnnnnnnnnnnnnnnnnnnnnnnnnnnnnnnnnnnnnnnnnnnnnnnnnnnnnnnnnnnnnnnnnnnatccaaaagcagaccaatagcaagtaacaagattgaagccataataaaaagtctcccagcaaagaagcccaggacctgatggcttcgctactgaattttaccaaacatttaaagaagaactaannnnnnnnnnnnnnnnnnnnnnnnnnnnnnnnnnnnnnnnnnnnnnnnnnnnnnnnnnnnnnnnnnnnnnnnnnnnnnnnnnnnnnnnnnnnnnnnnnnnnnnnntcnnnnnnnnnnnnnnggggaaatttttaaaccattttttttgagaaccttttttgaaaaatttttttttaaaaaaaaaccaaccggatttaaccggggcataaaaaaaatat

SEQ ID NO: 3934 - DNA, 2111 bp, Homo sapiens
  SIMILAR (265)..(1914): 1001254mologous to Homo sapiens hOAT1-2,accession number AB009698,Smith-Waterman Score=2849.
agctgagctgccctgacccccaaagtgaggagaagctgcaagggaaaagggagggacagatcagggagaccggggaagaaggaggagcagccaaggaggctgctgtccccccacagagcagctcggactcagctcccggagcaacccagctgcggaggcaacggcagtgctgctcctccagcgaaggacagcaggcaggcagacagacagaggtcctgggactggaaggcctcagcccccagccactgggctgggcctggcccaatggcctttaatgacctcctgcagcaggtggggggtgtcggccgcttccagcagatccaggtcaccctggtggtcctccccctgctcctgatggcttctcacaacaccctgcagaacttcactgctgccatccctacccaccactgccgcccgcctgccgatgccaacctcagcaagaacggggggctggaggtctggctgccccgggacaggcaggggcagcctgagtcctgcctccgcttcacctccccgcagtggggactgccctttctcaatggcacagaagccaatggcacaggggccacagagccctgcaccgatggctggatctatgacaacagcaccttcccatctaccatcgtgactgagtgggaccttgtgtgctctcacagggccctacgccagctggcccagtccttgtacatggtgggggtgctgctcggagccatggtgttcggctaccttgcagacaggctaggccgccggaaggtactcatcttgaactacctgcagacagctgtgtcagggacctgcgcagccttcgcacccaacttccccatctactgcgccttccggctcctctcgggcatggctctggctggcatctccctcaactgcatgacactgaatgtggagtggatgcccattcacacacgggcctgcgtgggcaccttgattggctatgtctacagcctgggccagttcctcctggctggtgtggcctacgctgtgccccactggcgccacctgcagctactggtctctgcgcctttttttgccttcttcatctactcctggttcttcattgagtcggcccgctggcactcctcctccgggaggctggacctcaccctgagggccctgcagagagtcgcccggatcaatgggaagcgggaagaaggagccaaattgagtatggaggtactccgggccagtctgcagaaggagctgaccatgggcaaaggccaggcatcggccatggagctgctgcgctgccccaccctccgccacctcttcctctgcctctccatgctgtggtttgccactagctttgcatactatgggctggtcatggacctgcagggctttggagtcagcatctacctaatccaggtgatctttggtgctgtggacctgcctgccaagcttgtgggcttccttgtcatcaactccctgggtcgccggcctgcccagatggctgcactgctgctggcaggcatctgcatcctgctcaatggggtgataccccaggaccagtccattgtccgaacctctcttgctgtgctggggaagggttgtctggctgcctccttcaactgcatcttcctgtatactggggaactgtatcccacaatgatccggcagacaggcatgggaatgggcagcaccatggcccgagtgggcagcatcgtgagcccactggtgagcatgactgccgagctctacccctccatgcctctcttcatctacggtgctgttcctgtggccgccagcgctgtcactgtcctcctgccagagaccctgggccagccactgccagacacggtgcaggacctggagagcaggaaagggaaacagacgcgacagcaacaagagcaccagaagtatatggtcccactgcaggcctcagcacaagagaagaatggactctgaggactgagaaggggcccttacagaaccctaaagggagggaaggtcctacaggtctccggccacccacacaaggaggaggaagaggaaatggtgacccaagtgtgggggttgtggttcaggaaagcatcttcccaggggtccacctccctttataaaccccaccagaaccacatcattaaaaggtttgactgcgc

SEQ ID NO: 3935 - DNA, 3234 bp, Homo sapiens
  SIMILAR (1392)..(1436): 931254mologous to Escherichia coli No definition line found,accession number U00039,Smith-Waterman Score=78.
atgttcgcaagggtctcgactacacccgtcactcgatacgagatgtataggaaaacgcggtctactcgtctagaggacaacaacgcactaagtcaatcatgcaagccgctgccgttcagcgaagttactggatcgaaaggtaaagcggataaagaaaaggtgggcgattacgttttttgcctgaaggcgcagggacgatataacggtgaaccgctcacgggtacgggaaaaataggcggtatgctggcgctgcgtggcgaagggacgccgtttccggtacaggctgatttccgctctggtaacacccgtgttgcttttgatggcgtcgtgaatgacccaatgaagatgggcggtgtcgatttacggcttaaattttctggcgattcactgggtgatctctatgaactgacgggcgttctgctgcccgataccccgccgtttgaaacggatggtcggctggtagcgaaaatcgacactgaaaaatcgtcggtctttgattatcgcggttttaatgggcgaattggtgatagcgatatccacggttctctggtctacaccaccggaaagccacgaccaaaactggaaggtgatgtcgagtcgcggcaattgcggctggcggacctgggaccgttgattggcgttgattccgggaaaggggcagaaaagtcgaaacggtctgaacagaagaagggcgaaaaaagcgttcagcctgcgggcaaagtgctgccttatgaccgcttcgaaaccgataaatgggacgttatggatgccgatgttcgcttcaaagggcggcgcattgagcatggcagtagcctgccgattagcgatctttctactcatatcatcctcaaaaatgctgacctgcgcctgcaaccgctgaaatttggcatggcgggcggcagcattgcggcgaatattcatctggaaggcgataaaaagccgatgcaggggcgggcagatattcaggctcgtcgactgaaactgaaagaactgatgcccgatgtggaactgatgcagaagacgctgggggaaatgaacggtgacgcggaactacgcggtagcggtaactcggtggcggcacttttaggcaacagtaacggcaacctgaaactgttgatgaatgacgggctggtgagccgcaacctgatggagattgttgggctgaatgtcggcaactacattgtcggtgcgatatttggtgatgatgaggtgcgggtgaactgcgcggcggcgaatctgaatattgccaacggcgtggcgcgcccgcagatttttgctttcgatactgagaacgcgttgattaatgttaccggcacggcaagttttgcttcggaacagctggatttgactattgatccggagagtaaaggaattcggattatcacactggttctccgctgtatgtgcgggggacgtttaaaaatccgcagtctggttgatggtctgaactttgctgctcagtaccaaggcaaaaacgatcgtagcgatttcgataactacactgaaggtaacggtgatggcttcggtttctctgctacctatgaatacgaaggattcggtatcggtgcaacttatgcgaaatctgatcgtaccgacactcaagttaatgcagggaaagttcttcctgaagtatttgcttccggtaaaaatgcagaagtttgggccgcaggtctgaaatatgacgctaacaacatttacctggccactacctattctgaaacccagaatatgactgtatttgctgatcacttcgttgctaataaagcccaaaacttcgaagctgttgcacaatatcagttcgatttcggtctgcgtccgtccgttgcttacctgcaatctaaaggtaaggatcttggagtatggggcgatcaggacttagtcaaatatgttgatgtaggtgcaacctattacttcaacaaaaatatgtctactttcgttgattacaaaatcaacctgcttgacaaaaatgacttcactaaggaagggttcatcatgagtcatcaacttaacttcgccgacagtgaattcagcagtaagcgccgtcagaccagaaaagagattttcttgtcccgcatggagcagattctgccatggcaaaacatggtggaagtcatcgagccgttttaccccaaggctggtaatggccggcgaccttatgcgctggaaaccatgctacgcattcactgcatgcagcattggtacaacctgagcgatggcgcgatggaagatgctctgtacgaaatcgcctccatgcgtctgtttgcccggttatccctggatagcgccttgccggaccgcaccaccatcatgaatttccgccacctgctggagcagcatcaactggcccgccaattgttgaagaccatcaatcgctggctggccgaagcaggcgtcatgatgactcaaggcaccttggtcgatgccaccatcattgaggcacccagctcgaccaagaacaaagagcagcaacgcgatccggagatgcatcagaccaagaaaggcaatcagtggcactttggcatgaaggcccacattggtgtcgatgccaagagtggcctgacccacagcctggtcaccaccgcggccaacgagcatgacctcaatcagctgggtaatctgctgcatggagaggagcaatttgtctcagccgatgccggctaccaaggggcgccacagcgccgaggagcttgccgaggtggatgtggactggctgatcgccgagcgccccggcaaggtaagaaccttgaagcagcatccacgcaagaacaaaccgcccatcaacatcgaatacatgaaagccagcatcccgggccaggggtggagcacccatttcgcatcatcaagcgacagttcggcttcgtgatagccagatacaaggggttgctgaaaaacgataaccaactggcgatgttattcacgctggccaacctgtttcgggcggaccaaatgataccattggcatcaactgttgagtatggtgagacagttgatggtgttgtcctggaaaaagatatccagctggtttatgggaccgccaataatacgaaaatcaatcctggcggagaacagcatataaaagaatttggtgtaagtaataatactgaaattaacggagggtatcagtacattgaaatgaatggcgccgcagaatactcagtattaaatgacggttatcaaattgttcaaatgggtggcgcggcaaaccagactacgctcaataatggtgtgctacag

SEQ ID NO: 3936 - DNA, 8178 bp, Homo sapiens
  SIMILAR (730)..(1755): 1001254mologous to Escherichia coli K12 2,3-dihydroxybenzoate -AMP ligase,accession number AE000165,Smith-Waterman Score=1750.
atggttgcccgcgccgccgcacttaccgccacgccgcaggtcgacaaagtggtgttgtcacggttgattgatatcaccactgacgccgccattgatagtggcgtattgctggaacggttgattgcgcaaaacccggttagttacaacttccatgttccgctggctgatggtggcgtcctgctgggggccagcccggaactgctgctacgtaaagacggcgagcgttttagctccattccgttagccggttccgcgcgtcgtcagccggatgaagtgctcgatcgcgaagcaggtaatcgtctgctggcgtcagaaaaagatcgccatgaacatgaactggtgactcaggcgatgaaagaggtactgcgcgaacgcagtagtgagttacacgttccttcttctccacagctgatcaccacgccgacgctgtggcatctcgcaactccctttgaaggtaaagcgaattcgcaagaaaacgcactgactctggcctgtctgctgcatccgacccccgcgctgagcggtttcccgcatcaggccgcgacccaggttattgctgaactggaaccgttcgaccgcgaactgtttggcggcattgtgggttggtgtgacagcgaaggtaacggcgaatgggtggtgaccatccgctgcgcgaagctgcgggaaaatcaggtgcgtctgtttgccggagcggggattgtgcctgcgtcgtcaccgttgggagcgaggatgagcattccattcacccgctggccggaagagtttgcccgtcgctatcgggaaaaaggctactggcaggatttgccgctgaccgacattctgacgcgacatgctgcgagtgacagcatcgcggttatcgacggcgagcgacagttgagttatcgggagctgaatcaggcggcggataacctcgcgtgtagtttacgccgtcagggcattaaacctggtgaaaccgcgctggtacaactgggtaacgtcgctgaattgtatattacctttttcgcgctgctgaaactgggcgttgcgccggtgctggcgttgttcagccatcagcgtagtgaactgaacgcctatgccagccagattgaacccgcattgctgattgccgatcgccaacatgcgctgtttagcggggatgatttcctcaatactttcgtcacagaacattcctccattcgcgtggtgcaactgctcaacgacagcggtgagcataacttgcaggatgcgattaaccatccggctgaggattttactgccacgccatcacctgctgatgaagtggcctatttccagctttccggtggcaccaccggcacaccgaaactgatcccgcgcactcataacgactactactacagcgtgcgtcgtagcgtcgagatttgtcagttcacacaacagacacgctacctgtgcgcgatcccggcggctcataactacgccatgagttcgccaggatcgctgggcgtctttcttgccggaggaacggttgttctggcggccgatcccagcgccacgctctgtttcccattgattgaaaaacatcaggttaacgttaccgcgctggtgccacccgcagtcagcctgtggttgcaggcgctgatcgaaggcgaaagccgggcgcagcttgcctcgctgaaactgttacaggtcggcggcgcacgtctttctgccacccttgcggcgcgtattcccgctgagattggctgtcagttgcagcaggtgtttggcatggcggaagggctggtgaactacacccatgagtcatcaacttaccttcgccgacatgaattcagcagtaagcgccgtcagaccagaaaagagattttcttgtcccgcatggagcagattctgccatggcaaaacatggtggaagtcatcgagccgttttaccccaaggctggtaatggccggcgaccttatccgctggaaaccatgctacgcattcactgcatgcagcattggtacaacctgagcgatggcgcgatggaagatgctctgtacgaaatcgcctgccatgcgtctgtttgcccggttatccctggatagcgccttgccggaccgcaccaccatcatgaatttccgccacctgctggagcagcatcaactggcccgccaattgttcaagaccatcaatcgctggctggccgaagcaggcgtcatgatgactcaaggcaccttggtcgatgccaccatcattgaggcacccagctcgaccaagaacaaagagcagcaacgcgatccggagatgcatcagaccaagaaaggcaatcagtggcactttggcatgaaggcccacattggtgtcgatgccaagagtggcctgacccacagcctggtcaccaccgcggccaacgagcatgacctcaaaccaacggggtacactggtgcatgcagaggagcaatttgtctcagccgaatgccggctaccaaggggcggcacaagcgcgaggagctggccgaggtggatgtggactggctgatcgccgagcgccccggcaaggtaagaaccttgaaacagcatccacgcaagaacaaaacggccatcaacatcgaatacatgaaagccagcatccgggccagggtggagcacccatttcgcatcatcaagcgacagttcggcttcgtgaaagccagatacaaggggttgctgaaaaacgataaccaactggcgatgttattcacgctggccaacctgtttcgggcggaccaaatgatacccattcgctacctgctggcgtatcgtgacgttggcaatacatttcccagaccgcctgccacggcaacgatttctgctcttccagcagtgccagacgcgcagtgtaatcgcccgccgcttccagcttgcgcagctcagcgaggcatcgaagaagtcaaggccgatatgcacccggtcaaacagatcgtgacgcacaatctcactggcaattgcctgggtttcatcatccagcagcactacgtgatcgctgtcccagcgaacctggactggcttgaacgttgcaagcaaagcaactcgggtggaagtgcccggcgtccaggcacagcgcagtctggctggctggttggcataccccatgtaaaactcattggagccaaccgtgtagctctctgcgccaatgccaaacaattggctctcaacggcgtcgatattgggtttagcttctcgcctgatcacctcatccagtgctgccagcagacgctgacgcggggcgagacggtcaacggtgatatctttcataccatccgggatccagatgttcatcaccgatggtgtgccgagttgctcgccaaaataggccgaaacgcgacggctggctttgcagtgatcaatccagaactggcgaatgctgtcctcactggcattacgcgctttgcccggataattgcctgtggcctgaatccccccggtcagcgaaccttccgggttttcaaaaccggaaacatcatcgcctgccagcagtgcattgaaacggctgcgccagctcatgcaacacatcggcatacagcagcgccagctgtcgaaaatgcagcgcgcaggcttggcaataatttgcggttggagatcctctggcaggttgggttgactggaaatcataaagcgaaagatctcaatgcggcgcaactggatgcactcgcacacgcgttactggagattcctcgattttcctacgctacgcggggcagaacagggttcatcatgagtcatcaacttaccttcgccgacagtgaattcagcagtaagcgccgtcagaccagaaaagagattttcttgtcccgcatggagcagattctgccatggcaaggcatggtggaagtcatcgagccgttttaccccaaggctggtaatggccggcgaccttatccgctggaaaccatgctacgcattcactgcatgcagcattggtacaacctgagcgatggcgcgatggaagatgctctgtacgaaatcgcctccatgcgtctgtttgcccggttatccctggatagcgccttgccggaccgcaccaccatcatgaatttccgccacctgctggagcagcatcaactggcccgccaattgttcaagaccatcaatcgctggctggccgaagcaggcgtcatgatgactcaaggcaccttggtcgatgccaccatcattgaggcacccagctcgaccaagaacaaagagcagcaacgcgatccggagatgcatcagaccaagaaaggcaatcagtggcactttggcatgaaggcccacattggtgtcgatgccaagagtggcctgacccacagcctggtcaccaccgcggccaacgagcatgacctcaatcagctgggtaatctgctgcatggagaggagcaatttgtctcacccgatgccggctacccaagggcgccacagcgcgaggagctggccgaggtggatgtggactggctgaatcgccagcgccccggcaggctggcaccagacccggtcctcgactttatcacccatcggttatctgtgtcgcctgaaggaactccgggtaagcctgccgtgacggtcataccggtaaagatagtgcgcgtcacgggcgatccggttatccggccacatgctgagggtgctgtccgggtgcagctccgggtcgggcaggcggttacctccggggtctgtggcatacgggatgcggatatccagattcgctgcggtggtgtgaacgccggtcagcctgccggtggtgctgtagctgtaactccgggtctggcgcgggctgctgatgcggatgagttcgccgttgtcgttccaggtgtaatcgcggtcagacagcaggctgttcaggtgctggctctgtaactgcccggcaggggtataagcggtggtgagttcataacggccgaagtgcgcagcgtttcccggtgcaggcggtcgcgggtgtactccaccagggggatcctctagagtgagcccactcctgagcatgtgctctgtgtgtgtcccattagactgagaggaacaagtgccgaaggcagggacaaggtgtggagtacagatccccaatgatgggatggaggctgggtagaagagggaggcgtttgggtgacagccttgttcttggtaagctagaagtaggatgttttctcgctgggggcagtttctcaaattgcggacaataatttctgagcctgcttggacagcgaggtgcaggggggtcaacttggaggcatcctggactcttgaattcacattagcgtggacactgatcaggaacagcacactttcaatatcagagttctgaactgccacatgaaggaaattccggcccttgttatccaccttcttctctggggcacttggctgggggtgggcaattgggccctgcccttggccacctgggtcggccttctctgggaagcccttggcatagagtgtagctgcaagctgtcctgtgccccacaggtccagtccttgatggcacagcttggctgacagcgtccatctgcagacgccactgcacatgcgatcgcctataaccatccggatgtggtgtctgtcatcctgtagcagaaaggtaagtaagtgggaatactgtccatccttttgactgtgggacagcagtttaggatccttagttacagagttgatgttttttctgttggtgagtttcatatggctagtttcttcgccgacagtgaattcagcagtaagcgccgtcagaccagaaaagagattttcttgtcccgcatggagcagattctgccatggcaaaacatggtgggaagtcatcgagccgttttacaccacaaggctggtaatggccggcgacacttatccgctggaaacccatgctacgcattcactgcatgcagcatttggtacaacctgagctaatggcgcgagtggaagatgctctgtacgatatcgcctccatgcgtctgtttgcccggttatccctggatagcgccttgccggaccgcaccaccatcatgaatttccgccacctgctggagcagcatcaactggcccgccaattgttcaagaccatcaatcgctggctggccgaagcaggcgtcatgatgactcaaggcaccttggtcgatgccaccatcattgaggcacccagctcgaccaagaacaaagagcagcaacgcgatccggagatgcatcagaccaagaaaggcaatcagtggcactttggcatgaaggcccacattggtggtcgatgccaagagtggcctgagccacagactggtcaccaccgcggccaacgagcatgacctcaatcaggctgagagtaactctgcgtgcactggagaggagcaatttgtctcagccgatgccggctaccaaggggcgtcacaccgccgaggagctggcccaaggtggatgtggactggctgatcgccgagcgcccccggcataggtaagaaccttgaaacagcatccacgccaaaggaaccaaaacggccatcaacatcgaatacatgaaagccagcatccgggccatgggtggagcacccatttcgcatcatcaagcgacagttcggcttcgtgaaagccagatacaaggggcttgctgaaaaacgataaccaactggcgatgttattcaccctggccaacctgtttcggccggacccaaatgatacgactggcacaggcagatgacgccgccccggcagcgggcagtacactggacaaaatcgccaaaaacggtgtgattgtcgtcggtcaccgtgaatcttcagtgcctttctcttattacgacaatcagcaaaaagtggtgggttactcgcaggattactccaacgccattgttgaagcagtgaaaaagacactcaacaaaccggacttgcaggtaaaactgattccgattacctcacaaaaccgtattccactgctgcaaaacggcactttcgattttgactgtggttctaccaccaacaacgtcgaacgccaaaaacaggcggctttctctgacactattttcgtggtcggtacgcgcctgttgaccaaaaagggtggcgatatcaaagattttgccaacctgaaagacaaagccgtagtcgtcacttccggcactacctctgaagttttgctcaacaaactgaatgaagagcaaaacatgaatatgcgcatcatcagcgccaaagatcacggtgactctttccgcaccctggaaagcggtcgtgccgttgcctttatgctggatgacgctctgctggccggtgaacgtgcgaaagcgaagaaaccagacacctggaacatcgtcggcagccgcagcccaggaggctacgggtgtatttgccgtcaccaggacaaaggctatgacagagtcccgctggtggtgccgttgctgttttatcatggcgaaaactcgccttacccgtactcactcaactggctggatgagtttgacgatccgcaacttgcccggcagttgtacaccgaagcttttctgttggtggatatcaccatcgtacctgacgatgagatcatgcaacatcggcgtatagctctgctggaactgattccaaagcatattcgcgaacgcgatttaatcgggatggtcgacaggatcaacacgcttttgatagcaccatcacacaagacaagacgacgggaccacaaaaacgagcagacacagactacgcaagcagagggaaataacgaagccaaaccgccacaggaaaccaaaacgacagcgaagacgcaaagacctgagccagagacaccgaataggcaaaaccaacaaacagcgaggccgcaaagatcgacgacagcccggaccgagaagagcaacaaccagaagcacaacagcacaaagacgccagcaatgacgacgaacgcacactacagacagaaacgtgtagtgtctgtggaccaggctgcggtacagcaaagtattatcgaagggctggtctgggagcaggcgacacccacaacgattactcatccacagcaacttcacgaagaactggcgcgtattcgccgtcagggctggagctatgacaacggcgaagattacgccgatgtccgtggtgtcgctgcgccggtgtttaacgccaataacgagcttaccgctgcgatctcggtggtcggtacccgcttacaaatcaatgaagaataccgtgattatctggcgggcaaggccattgcctgcgccagggatatttcacgtctgttgggatggaaaagtccctttgacttacaagcctcataa

SEQ ID NO: 3937 - DNA, 547 bp, Homo sapiens
  SIMILAR (3)..(119): 971254mologous to Homo sapiens Human translocation associated protein designated Gp25L-H,accession number AAW80293,Smith- Waterman Score=198.
aggccctgctgcttctcgcgctgtgcgccacaggcgcccaggggctctacttccacatcggcgagaccgagaagcgctgtttcatcgaggaaatccccgacgagaccatggtcatcggtcaggcgggctgagggtggggaggccctttgtacccagctcagccctcggcggcgctccctcctcccgagcccagccgggtcgctggctcccccagtacctagcctgagggtgccccgaggacgccaggccccctgcctagagctccgggccgcacgtcggagggggccgggcggagaggcggcccactagggccggtcgtgactatgtgtctgccccgcaggcaactatcgtacccagatgtgggataagcagaaggaggtcttcctgccctcgacccctggcctgggcatgcacgtggaagtgaaggaccccgacggcaaggtggtgctgtcctcgcagtacggctcggagggcgcgtttacgttcacctccacacgcccgggggccaataaaacaggctggcctccaatttaaccagagggttttg

SEQ ID NO: 3938 - DNA, 550 bp, Homo sapiens
  SIMILAR (106)..(153): 811254mologous to Mus musculus putative,accession number AK010259,Smith-Waterman Score=79.
attaccaaaggtatcgtgaagagcgcttccgattgacgagcgagagcaccaaccagagggtcctatggtggtccattgctcagactgtattcttcatcctccactggcatctggcagatgcgtcacctcaagagcttctttgaggcccaagaagctggtgtagtgccctctttgtatgacccttcctttttacctcatttaatttggtactttccccacacagtcctttatccgcctggatttttagggaacaaaaatgaaaaagaataagtcacattggttccatggccacaaaccattcagatcagccacttgctgaccctggttcttaaggacacatgacattaggccaatctttcaaaatcttgccttagggcttgtgaggaatcagaactaacccaggactcagtcctgcttcttttgcctcgagagattttcctctgtttttcactaaataagcaaaagaaaactctctccattaccttctgctttctctttgtccacttacgcagtaggtgactggcattgcccacagagcaggcctgcctca

SEQ ID NO: 3939 - DNA, 2252 bp, Homo sapiens
  SIMILAR (559)..(1560): 1001254mologous to Homo sapiens nucleolar RNA- helicase,accession number AJ131712,Smith-Waterman Score=1673.
atggcaggtgtcggggctgggcctctgcgggcgatggggcggcaggccctgctgcttctcgcgctgtcgcacaggcgccaggggctctacttccacatcggcgagaccgagaagcgctgtttcatcgaggaaatccccgacgagaccatggtcatcggcaactatcgtacccagatgtgggataagcagaaggaggtcttcctgccctcgacccctggcctgggcatgcacgtggaagtgaaggaccccgacggcaaggtggtgctgtcccggcagtacggctcggagggccgcttcacgttcacctcccacacgcccggtgaccatcaaatctgtctgcactccaattctaccaggatggctctcttcgctggtggcaaactgtatcgtgaagagcgcttccgactgacgagcgagagcaccaaccagagggtcctatggtggtccattgctcagactgtcatcctcatcctcactggcatctggcagatgcgtcacctcaagagcttctttgaggccaagaagctgcgcgtgcgtgctgcgctactgagcagcgccatggaggactctgaagcactgggcttcgaacacatgggcctcgatccccggctccttcaggctgtcaccgatctgggctggtcgcgacctacgctgatccaggagaaggccatcccactggccctagaagggaaggacctcctggctcgggcgcgcacgggctccgggaagacggccgcttatgctattccgatgctgcagctgttgctccataggaaggcgacaggtccggtggtagaacaggcagtgagaggccttgttcttgttcctaccaaggagctggcacggcaagcacagtccatgattcagcagctggctacctactgtgctcgggatgtccgagtggccaatgtctcagctgctgaagactcagtctctcagagagctgtgctgatggagaagccagatgtggtagtagggaccccatctcgcatattaagccacttgcagcaagacagcctgaaacttcgtgactccctggagcttttggtggtggacgaagctgaccttcttttttcctttggctttgaagaagagctcaagagtctcctctgtcacttgccccggatttaccaggcttttctcatgtcagctacttttaacgaggacgtacaagcactcaaggagctgatattacataacccggttacccttaagttacaggagtcccagctgcctgggccagaccagttacagcagtttcaggtggtctgtgagactgaggaagacaaattcctcctgctgtatgccctgctcaagctgtcattgattcggggcaagtctctgctctttgtcaacactctagaacggagttaccggctacgcctgttcttggaacagttcagcatccccacctgtgtgctcaatggagagcttccactgcgctccaggtgccacatcatctcacagttcaaccaaggcttctacgactgtgtcatagcaactgatgctgaagtcctgggggccccagtcaagggcaagcgtcggggccgagggcccaaaaggggacaaggcctctgatccggaagcaggtgtggcccggggcatagacttccaccatgtgtctgctgtgctcaactttgatcttcccccaacccctgaggcctacatccatcgagctggcaggtagtagtgtgacggcccaggcatctgcatggacagcacgcgctaacaacccaggcatagtcttaacctttgtgcttcccacggagcagttccacttaggcaagattgaggagcttctcagtggagagaacaggggccccattctgctcccctaccagttccggatggaggagatcgagggcttccgctatcgctgcagggatgccatgcgctcagtgactaagcaggccattcgggaggcaagattgaaggagatcaaggaagagcttctgcattctgagaagcttaagacatactttgaagacaaccctagggacctccagctgctgcggcatgacctacctttgcaccccgcagtggtgaagccccacctgggccatgttcctgactacctggagagcaaagtcccagaacccactgcgcagcttcaagcacaaaggaaagaaattcagacccacagccaagccctcctgaggttgttgggcctctctggagctgagcacattgtggagcacaggcttacacccttcgtggacaggcgaggctctggtgcttactgcacagcctga

SEQ ID NO: 3940 - DNA, 2422 bp, Homo sapiens
  SIMILAR (680)..(2206): 941254mologous to Homo sapiens nucleolar RNA- helicase,accession number AJ131712,Smith-Waterman Score=2461.
tttcgtgtcggggctgggcctctgcgggcgatggggcggcaggctcctgctgcttctcgcgctgtgcgccacaggcgcccaggggctctacttccacatcggcgagaccgagaagcgctgtttcatcgaggaaatccccgacgagaccatggtcatcggcaactatcgtacccagatgtgggataagcagaaggaggtcttcctgccctcgacccctggcctgggcatgcacgtggaagtgaaggaccccgacggcaagatgttgcaggtggtgctgtcccggcagtacggctcggagggccgcttcacgttcacctcccacacgcccggtgaccatcaaatctgtctgcactccaattctaccaggatggctctcttcgctggtggcaaactgcgggtgcatctcgacatccaggttggggagcatgccaacaactaccctgagattgctgcaaaagataagctgacggagctacagctccgcgcccgccagttgcttgatcagtatcgtgaagagcgcttccgactgacgagcgagagcaccaaccagagggtcctatggtggtccattgctcagactgtcatcctcatcctcactggcatctggcagatgcgtcacctcaagagcttctttgaggccaagaagctgcgcgtgcgtgctgcgctactgagcagcgccatggaggactctgaagcactgggcttcgaacacatgggcctcgatccccggctccttcaggctgtcaccgatctgggctggtcgcgacctacgctgatccaggagaaggccatcccactggccctagaagggaaggacctcctggctcgggcccgcacgggctccgggaagacggccgcttatgctattccgatgctgcagctgttgctccataggaaggcgacaggtccggtggtagaacaggcagtgagaggccttgttcttgttcctaccaaggagctggcacggcaagcacagtccatgattcagcagctggctacctactgtgctcgggatgtccgagtggccaatgtctcagctgctgaagactcagtctctcagagagctgtgctgatggagaagccagatgtggtagtagggaccccatctcgcatattaagccacttgcagcaagacagcctgaaacttcgtgactccctggagcttttggtggtggacgaagctgaccttcttttttcctttggctttgaagaagagctcaagagtctcctctgtcacttgccccggatttaccaggcttttctcatgtcagctacttttaacgaggacgtacaagcactcaaggagctgatattacataacccggttacccttaagttacaggagtcccagctgcctgggccagaccagttacagcagtttcaggtggtctgtgagactgaggaagacaaattcctcctgctgtatgccctgctcaagctgtcattgattcggggcaagtctctgctctttgtcaacactctagaacggagttaccggctacgcctgttcttggaacagttcagcatccccacctgtgtgctcaatggagagcttccactgcgctccaggtgccacatcatctcacagttcaaccaaggcttctacgactgtgtcatagcaactgatgctgaagtcctgggggccccagtcaagggcaagcgtcggggccgagggccaaaggggacaagtgtggcccggggcatagacttccaccatgtgtctgctgtgctcaactttgatcttcccccaacccctgaggcctacatccatcgagctggcaggacagcacgcgctaacaacccaggcatagtcttaacctttgtgcttcccacggagcagttccacttaggcaagattgaggagcttctcagtggagagaacaggggccccattctgctcccctaccagttccggatggaggagatcgagggcttccgctatcgctgcagggatgccatgcgctcagtgactaagcaggccattcgggaggcaagattgaaggagatcaaggaagagcttctgcattctgagaagcttaagacatactttgaagacaaccctagggacctccagctgctgcggcatgacctacctttgcaccccgcagtggtgaagccccacctgggccatgttcctgactacctggagagcaaagtcccagaacccactgcgcagcttcaagcacaaaggaaagaaattcagacccacagccaagccctcctgaggttgttgggcctctctggagctgagcacattgtggagcacaggcttacacccttcgtggacaggcgaggctctggtgcttactgcacagcctgaacagacagttctggggccggcagtgctgggccctttagctccttggcacttccaagctggcatcttgccccttgacaacagaataaaaattttagctgcccc

SEQ ID NO: 3941 - DNA, 1563 bp, Homo sapiens
gaaggggaaggctcagggtctcacctcacattgtccctacaaggacaggccccaactgataaccgttgctttttttttttgtgaacatagtttgatttgatcacaggtcaaaaacgccttatattttcgaaagactcctggcccctcttccctcttcctggtttcctagccgttccccttctgccccagtctgagccagtgaggggtagctttttaaaaccattattctagatggaggaggcactgatgcttgtaactctggaaagaggcctacacccaagggctaggaattttatttttccttttctcaccaggtgtctgcatgtgtgtgtgggtgtgaatgtgtatacatgcccatcagcatttagtcacatgtctgaatttctgtgtccagacgagccccatcaaactagttggggaaggggccccagtgaccaagtgtattaaggcatcccttgaagagggattggggcaggggaggcagaaggggctctccagaccccttttccatgatgacccactccaagatattatgtgtaaattgtgttattatgtatatgggtaaagatgtacaaatatatgtcctctttgtagcagatatgattttatatttataatgtgcatcaacatgtgaaagcaatctaggtcactagcacagaggaagttgccaggaaggtggcttcagcacctccaggttggttctgggtgtcctgctgtgaggggtagaacgggaggctgctgaagtgagtagctgagcagctggagccatcccaagcatcagtgtctcagagtcctcctcgccccgtttcttcaccccgccccccaacccccagactttcctggagcatctgccctttgctcctagcagcctccccaggaagggactgcagaggcgggcaagccctctctatgtgtttttatctccaccttccccggaatctggggagggcttttgtttttacgttttcaagttcagcattgtattcggacagaagctgtgactgaagactcagtgccaaggaaaggggcttcttgtgtgtccctcgggtttggggctcttctcaaaaaaccaactactcccataaccccttactgttcaccttcaactcccccacacagctccatgaaaatgtgtgaaccccctgtttgaaattttggtatttggtaagtggagggtggggggatgggggccagcagctgtcatcccccccgggaaagccgaagcagtgtcccctggtgggttaaaaaccctcaagtcctctttgcccagtgaggcccccacccacatcggtgtgagttaggtttcctcatctggagctgtttcctcaggcattcttccccaaccctcttccttttccccttcggtgtgcctcagtggtctccttcatagagtgagagggcttgagaccctccctcaaccggactaattaaagaaagacacttgtgttcccaagtggtggttttatttttttagtttttatgtttgtatgggaaattgtggataaagtgaaaagaattgtaaataaatggtgtatttcctcctccaaaaaaaaaaaaaaaaaa

SEQ ID NO: 3942 - DNA, 1311 bp, Homo sapiens
  SIMILAR (1296)..(1147): 801254mologous to Homo sapiens Secreted protein encoded by gene 45 clone HCESF40,accession number AAW88578,Smith-Waterman Score=219.
tttttttttgtaattttagtatacagtttgatatttattttcctctgcaacatacctacttgtacctgtaacacccgatccaaactccagaggcatcttctccttagtaattctatagtgtctcactgaccaccattctctagttgttttattgatagattcatccaggctgggccaatgggacagcgggataagaaagagagagggagggtttagcatactggcaggagagggtctgaaggaatgaatcatggaatcccaggtaataggaagccctaaggagggagattaagacagcacagatcaggagaaagaggagatagttggggatatgcttggaacaggtaccagtgaagataactcagtgagagagcttgggaggaaggaggcagcagtcaggagtgtggagggactaaagtttcaaactttcaaaggtggagcagtttcaggagggtggcccaagcaagaggatgccatgggttatccatgttttcccatgggtccacttccagctctgtatacctgctcttcagctctgctctcagcccagagcaaacacacttcaccctaatctcaggtggggaggtaagggccagagtcccatctgggatcccagcatagaaggacagccaggattgctacctgctggctgcctttgctatacatgcagaatgtgtaccatgttcagtctagacaatacaccctccttccttcctcaccagccacagacttccaggcccttcccacccttcttgcctgtggctgagcctcccaccatagcccatacggtgctggttcagcttctgacggtgcctggcttgagatccgtgatgctggctttccctcaacaggaaagaaagcctgcagggtaacgctgaggcttgtcccatctgggctcctgtgggggcctgtccaggctcacctgcgccaacctgtccctgatcagcattgaagcaggaagctggggtgggggaaccggaggagcagaggcccgcaaagtagtgcagatcttccttcttgccaaaccttgccctgatcctaagggctgcaggcaggaacagatgcagcaggtggctgggagggtaactgggggtgggtgggtggaaaggcctggtctggagatgccacagctctactcttctcttaaacttgggtgtttggcacagggtcccatgcaaagaggtgggataggagccagagggagtctctctcctgcctctgctgtttctggggcaagagagggcacaaaaaagttgtcaggggctggattcttgtgcttgaaaaacttgggtcctcagagagggaagatga

SEQ ID NO: 3943 - DNA, 282 bp, Homo sapiens
  SIMILAR (19)..(225): 721254mologous to Mus musculus putative,accession number AK004724,Smith-Waterman Score=260.
  misc_feature (1)...(282): n = a,t,c or g
cggccgccagccggggcgatggcggggctctggctggggctcgtgtggcagaagctgctgctgtggggcgcggcgagtgccctttccctggccggcgccagtctggtcctgagcctgctgcanagggtggcgagctacgcgcggaaatggcagcagatgcggcccatccccacggtggcccgcgcctacccactggtgggccacgcgctgctgatgaagccggacgggcgagcacaggatgcggtatttccaaacccctgccctcggtcttttcccacctca

SEQ ID NO: 3944 - DNA, 380 bp, Homo sapiens
  SIMILAR (104)..(322): 801254mologous to Homo sapiens ICAM-2 preprotein (AA -21 to 254),accession number X15606,Smith-Waterman Score=289.
  misc_feature (1)...(380): n = a,t,c or g
gccttcttggagcccacagggganataaagtgaaacacctcaggctccaaccctcccaacccaaggctccctcctggagggagaggagaggatggaggacatcaggaccctgactgtggccctcttcaccctgatctgctgtccaggatcggatgagaaggtattcgaggtacacgtgaggccaaagaagctggcggttgagcccaaagggtccctcgaggtcaactgcagcaccacctgtaaccagcctgaagtgggtggtctgggagacctctctaggataaggtttttgctgggacggaacaggctcagtgggaaacatttanttgggtcttcaaacntttcccntggacacggtccttccattgccattttcacct

SEQ ID NO: 3945 - DNA, 880 bp, Homo sapiens
  SIMILAR (787)..(837): 471254mologous to Mus musculus putative,accession number AK004724,Smith-Waterman Score=41.
agcggccgccagcggtggcgaatggcggggctctggctggggctcgtgtgtggcagaagctgctgctgtggggcgcggcgagtgccgtttccctggccggcgccagtctggtcctgagcctgctgcagagggtggcgagctacgcgcggaaatggcagcagatgcggcccatccccacggtggcccgcgcctacccactggtgggccacgcgctgctgatgaagccggacgggcgagggtaagggccggcgctcctcctggagcgcaacggggtccgcattcccgttcccaccctccgatcagccaggagtcactctgcttgtggcgctggccgaaggaagaagaggagcctgtcaccctgtggaagaatgcactcccagttctagtcgtttgccccttggcacccgccgacactgctaagtgccccatcccaaagtgagcattttctttgtgtgtaagcacaggatgcggtatttccaaacccctgccctcggtcttttcccacctcaccgctgctcagctctcaaagccctgaccgtttcctcctgccttgacttgggaagccttaggaacagaagctccctgggagcacagagcggttttaaactggccaacaccttaacgcccagagccgccctcctctcgctgccactttggaaaataagagactagagattcactggacgcttcctcccggcatcacaagacttgactgctgcttcagttcccgcttgaccttcatactttagccctttaaaggatgttacataataacaattaagagtcggcagggccttcaggcagacttctttggagggtgtcaaacgccttgtttattaaagagtgaattttttaattaaaatcatgttttaaaacagaa

SEQ ID NO: 3946 - DNA, 473 bp, Homo sapiens
caatgaaagatattcagttcctgcccacatagagcttacattttgctgttggagtggggaaaaaaaaccagacattaaataattaccattctaaatacgtctaaattattgcaaataaatattgcaaagagatatgggactcataatagggggcgagaggttagagaataccctcaacactgaaaaaagtggcattaaagctgtgacactaatatgggagataggagggctgaggtggagtgctgtcttctttcgtatgatccatcatttaagaaataggctgggtgcagtggctcatgggagtgctgtcttctttcgtatgatccatcatttaagaaataggctgggtgcagtggctcatgcctgtaatcccagcagtgtgggaggccgaggtgggaggattgctggagcccagaagtttgagagcagccagggcaatatagcgagacccggtctccattttatttttctta

SEQ ID NO: 3947 - DNA, 1656 bp, Homo sapiens
ttttttttaacttttatcttttggatggcattgagagtaaccttctgtttttttggcctcaagttccatattgaattttttaaaattgcattttgagcaataacatttccctggttgcttaaccagttatacaagttgagacttctgtctctatgcctatcttataatagcttctctgggagaacagatgaaaaataagccagttagatattttatgagtattgaaatcctttccattcagaaatgtaaataaaacaaccagcatgagcaatcagcttatgtcagattccatgggtttgtattacatagggaaattacagtgcaacctgaaacatgcttcttaatgaattcatagtgctgtcacagttgaatgtaaacccttgagcttttcttttgtgaagggtttcagaaatcaccctttataaactacctaggggagggaagagaactaagatgatactaacaaatgctatcactggttttgtggctgcctcccttacagcaccaaattttgccagttaagtaaagcagaaacctagaatagtggcacacgttttggcttattcagtgtacacacacacacaaacacacaaacacacacacactcagtgccacactgggtcagacccatagtttcaattacttctgtttctgaaagtggcaccagggaactggctttgtgaagaataagattgcccttatgggtttttatcctcagaagttagggaagtttggttaagaagtatgacaaaagccccataagtagcgatttttacctttagcaaatgcaggaaaatagacacctaactagagatcatgaagttagaatttgtctccttctttggctgctacttcagcccctggtagtaaattagaataaagttcctcatttattagtgagctggttttgcagtctctaaagctcttttgcagctcttctattcactatggcctcagatacgataaatctgctagctgcaaaaattcaatataccaagtagaatatgtaggaccagtcaagttttaagtttgggagtgaggaaaagcagcatgtattttctattttaaattattttcttttcacattctaatttcttaagggtttggcttgatttatgccaggttctgggcctgtaagcctacattaatgtatcacagtactggataggatatttgatatctcttacttagcccagaatctcaaatgataaggagctgtagttaatgatatgtagcattttgttgaactttacagtgtagatctctgttagtccctgggtctgtaacaaatggactcatccttgtgcttttccataggtgccctgatgtttactgacataaatcaagatactatgtggctctataggggatgctgaaccatttgacagtctaggtgcacacagtcacctcacattatttaagccctgatctcagcattctaatttctctgtattccacagtgtatataatgtgtacgtgcttgtaattcattatatattgcttgtacattcctgcttgtaagtttcagcacataccagttccctctatttagaatgccttcttctgactgccctcagtcagttcataaaacacataaagctatcttttaaaaattcaactcaaaagtcacctcctgtggaatgccatctctgcgaa

SEQ ID NO: 3948 - DNA, 2265 bp, Homo sapiens
  SIMILAR (1)..(804): 981254mologous to Homo sapiens beta-adrenergic receptor,accession number A31613,Smith-Waterman Score=1367.
atggctccgtggcctcacgagaacagctctcttgccccatggccggacctccccaccctggcgcccaataccgccaacaccagtgggctgccaggggttccgtgggaggcggccctagccggggccctgctggcgctggcggtgctggccaccgtgggaggcaacctgctggtcatcgtggccatcgcctggactccgagactccagaccatgaccaacgtgttcgtgacttcgctggccgcagccgacctggtgatgggactcctggtggtgccgccggcggccaccttggcgctgactggccactggccgttgggcgccactggctgcgagctgtggacctcggtggacgtgctgtgtgtgaccgccagcatcgaaaccctgtgcgccctggccgtggaccgctacctggctgtgaccaacccgctgcgttacggcgcactggtcaccaagcgctgcgcccggacagctgtggtcctggtgtgggtcgtgtcggccgcggtgtcgtttgcgcccatcatgagccagtggtggcgcgtaggggccgacgccgaggcgcagcgctgccactccaacccgcgctgctgtgccttcgcctccaacatgccctacgtgctgctgtcctcctccgtctccttctaccttcctcttctcgtgatgctcttcgtctacgcgcgggttttcgtggtggctacgcgccagctgcgcttgctgcgcggggagctgggccgctttccgcccgaggagtctccgccggcgccgtcgcgctctctggccccggccccggttatgccaattctgccttcaacccgctcatctactgccgcagcccggactttcgcagcgccttccgccgtcttctgtgccgctgcggccgtcgcctgcctccggagccctgcgccgccgcccgcccggccctcttcccctcgggcgttcctgcggcccggagcagcccagcgcagcccaggctttgccaacggctcgacggtgagagacacttgtgagccctttaactgggagttctgctcccataagtttagcatccactccaatcactgccaccccaccagggaacggctgttttctccagaagatcttggactctgtgtgttcatggatgtgcccctcgcccacaagctagagggcagcttgttaaagacctacaaacaagatgattacccgaacaagatattcttagcctatagagtctgcatgacaaatgaaggccatccctgggtttctctcgtggtgcagaagactcgactacagatttcacaggatccctccctgaattatgagtacttgcccaccatgggcctgaaatcattcatccaggcctctctagcactcctctttggaaagcacagccaagccattgtggagaacagggtagggggtgtacacactgttggtgacagtggtgccttccagcttggcgtccagtttctcagagcttggcataaggatgctcgtatagtttacatcatctcttctcaaaaagaactgcatggactcgtcttccaggacatgggctttacagtttatgaatactctgtctgggaccccaagaagctatgcatggaccccgacatactcctcaatgtggtggagagcaagcagatattcccattttttgatattccctgtcaaggtttatacaccagtgacttggaagaagatactagaatcttacaatactttgtgtctcaaggctttgagttcttctgcagccagtctctgtccaaaaattttggcatttatgatgaaggagtggggatgctagtggtggtggcagtcaacaaccagcagctgctgtgtgtcctctcccagctggaaggattagcccaggccctgtggctaaacccccccaacacgggtgcacgtgtcatcacctccatcctctgcaaccctgctctgctgggagaatggaagcagagtctaaaagaagttgtagagaacatcatgctaaccaaggaaaaagtgaaggagaaactccagctcctgggaacccctgggtcctggggtcacatcaccgagcagagtgggacccacggctatcttggactcaactcccagcaggtggaatacctggtcaggaagaagcacatctatatccccaagaacggtcagattaacttcagctgtatcaatgccaacaacataaattacatcactgagggcatcaatgaggctgtcctcctcacagagagctcagagatgtgtcttccaaaggaaaaaaaaacactgattggaataaaactttag

SEQ ID NO: 3949 - DNA, 2645 bp, Homo sapiens
  SIMILAR (198)..(1421): 1001254mologous to Homo sapiens Beta 3 adrenergic receptor,accession number X70811,Smith-Waterman Score=2160.
gctactcctcccccaagagcggtggcaccgagggagttggggtggggggaggctgagcgctctggctgggacagctagagaagatggcccaggctggggaagtcgctctcatgccttgctgtcccctcccctgagccaggtgatttgggagaccccctccttccttctttccctaccgccccacgcgcgacccggggatggctccgtggcctcacgagaacagctctcttgccccatggccggacctccccaccctggcgcccaataccgccaacaccagtgggctgccaggggttccgtgggaggcggccctagccggggccctgctggcgctggcggtgctggccaccgtgggaggcaacctgctggtcatcgtggccatcgcctggactccgagactccagaccatgaccaacgtgttcgtgacttcgctggccgcagccgacctggtgatgggactcctggtggtgccgccggcggccaccttggcgctgactggccactggccgttgggcgccactggctgcgagctgtggacctcggtggacgtgctgtgtgtgaccgccagcatcgaaaccctgtgcgccctggccgtggaccgctacctggctgtgaccaacccgctgcgttacggcgcactggtcaccaagcgctgcgcccggacagctgtggtcctggtgtgggtcgtgtcggccgcggtgtcgtttgcgcccatcatgagccagtggtggcgcgtaggggccgacgccgaggcgcagcgctgccactccaacccgcgctgctgtgccttcgcctccaacatgccctacgtgctgctgtcctcctccgtctccttctaccttcctcttctcgtgatgctcttcgtctacgcgcgggttttcgtggtggctacgcgccagctgcgcttgctgcgcggggagctgggccgctttccgcccgaggagtctccgccggcgccgtcgcgctctctggccccggccccggtggggacgtgcgctccgcccgaaggggtgcccgcctgcggccggcggcccgcgcgcctcctgcctctccgggaacaccgggccctgtgcaccttgggtctcatcatgggcaccttcactctctgctggttgcccttctttctggccaacgtgctgcgcgccctggggggcccctctctagtcccgggcccggctttccttgccctgaactggctaggttatgccaattctgccttcaacccgctcatctactgccgcagcccggactttcgcagcgccttccgccgtcttctgtgccgctgcggccgtcgcctgcctccggagccctgcgccgccgcccgcccggccctcttcccctcgggcgttcctgcggcccggagcagcccagcgcagcccaggctttgccaacggctcgacggggcttcttggggagtttcttaggcctgaaggacaagaagcaacaactctgttgatcagaacctgtggaaaacctctggcctctgttcagaatgagtcccatgggattccccggctgtgacactctaccctccagaacctgacgactgggccatgtgacccaaggagggatccttaccaagtgggttttcaccatcctcttgctctctgtctgagagatgttttctaaaccccagccttgaacttcactcctccctcagtggtagtgtccaggtgccgtggagcagcaggctggctttggtaggggcacccatcacccggcttgcctgtgcagtcagtgagtgcttagggcaaagagagctcccctggttccattccttctgccacccaaaccctgatgagaccttagtgttctccaggctctgtggcccaggctgagagcagcagggtagaaaagaccaagatttggggttttatcgctgggttcccttattactgctctcaagcagtggcctttctcactttagccatggaatggctccgatatacctcacagcagtgtcagaaggacttcaccagggttttgggagctccagggttcataagaaggtgaaccattagaacagatcccttgttttcctgttgcaatcagataaataaatatcactgaatgcagttcatcctcggcccactttccctccgtttgttttcttttcataatccacttactcccttcccttctactctgcgctggcttttgacagaggcagtaaattaggcctaatcctcactcttttcttcctaatcttcatcaaacaaaaaatgaaaagtctgtctggacgaaggggagtgagcttgagcctttgatatcttgctcccccacccttcctgaaactcttgaaatccagttgccattgagtagcaaagccacgctccccacaggacttggacagagggcccacagggggatgggctggctgtggccaggtttagggcagggggcatttgtcccctccatgctataatccagtggtgccttacatggtgtgtgtgtgtgtgtgtgcgtgtgtgtgtgtgtgtgtgtgtctggaggcacaggcacaaagcattgcttgggttggtcaaatgtcttgtgtcataaatatattctgatgtttcccagcctttccacaacctctaccttcccactcaccttccccagctacaaaaatctgtattatcctcttaaagtaaaactggagttac

SEQ ID NO: 3950 - DNA, 2110 bp, Homo sapiens
  SIMILAR (1506)..(1673): 631254mologous to Homo sapiens Human myelin oligodendrocyte glycoprotein gene,accession number AAZ29204,Smith-Waterman Score= 183.
tttttttttttttcagatctttcaccaacaatttctttatttaataggggtattttatatagacaatcttttaaaaaataaaatgccttatttgtgttgcatacatttattccgagggagcctccctacaagtcaagagtattctcttagccagaaatacttctattgctagaaacatttttagaacagaacagatttttcctgttatcatggctgcatcaaatgttaccctgcattttaactaaaatggccaaacattttcaaagtcatcatgcactacaagaatctaaggcagtgtgtctaaaatgccaaacccagtacatttagttaaatatctggtcaattcaaaaagcaaaataaattgattcaattgtttaatcagttaaaccatctggccaacatagagtgaatcctcaaaagggcaacatgtcctaatagaaacgtgtgacaggattgtccaagcacacccaggccacacagaagagatgccattctatcttcatgatgatgtctggttagattctgttttgcaaatattttctctttgcatcattctcacttgctttttgcagtcatcgtttacagattttcctttgatagggaacattctttgaatacctgatgtaattctaaatttcaggttaaaaatagcagggcagaaaattagcacggcattttctccttcaactcttcaggaatgaggtaggcttgagggcttgctcactgcaacttggaggaggatcagttattccttattgccactctgtcttggctaatcagttatattttcatttcctcagtgaaatggaacccagaaagcccttgaactgctatcatatacaagcagtttattacctattgattttcaccaggtcaggtttggtctggctcatgtttgtaaactaaaactctagagcgtctcagagtttgggctcagatactaccactgctgttgtgcagatctggtagctttatgatttcaggattccaacctcaaagaattcttagaaagctaagtgaatgagaatttagtatatggccaataatattattgcaaaaggtaaggaaaatgtttaacataagaaactggatccttaaacagcaaggcaagagaatcagcatgtgaagggtagcatgtgaggtctatttttatattgctggacatctggtaaatggtttaatattattttcacatgtcattttgggctttcttccgagaggtgattacaaaatttatcaaagaccctcccaaagaaaactgccccgaaaatgtctgtgtgctgtgtgccttttagtatttaaaagtgaattggccaggtgcggtggctcactcttgtaatcctagcactttgggaggttgaggtgggtggatcacctaaggtcacgagttcaagacctcagctgatcacccaccttggcctcccaaagtgctgggattacagtcttgagccactatgcccaacctgcttgttttttgagatacaatcttgctctatcacccaggtggagtgcagtggcacaattacagctcactgtagccttcaactcctgggctcaagtgattctcctgcctcagcctcccaagtagctgggactacaggtgcactccatgcctggttaatttttaaatttattgtagagaaggggtctcactttgctgcccaggcttgtcaaacttttagctacaaaaagcttcatgcataattttttttttgttttgtatatagtgtggtaggagaaatacagggtcacaagataagaacatatgaaggaccctgataccttgattgacaaattattttccaaagggattttacaatttgaactagttgtgatttcaaagaatcctccccaagtagtaaagcttattgcttggaaaagaaaggttaagcagagtccctcatagcaggcatcctcagctaggctggaagagataccttgtgaaactgctgctcagctgcaggaaccccctccctaccctccctctcttccccgttgccactctttatgggtaggagaagaaatgggtggtgtacattggaagagctttaggttattaatggtttccagaatctttttcttttttctcttttcttctcccctcccctct

SEQ ID NO: 3951 - DNA, 651 bp, Homo sapiens
  SIMILAR (400)..(320): 351254mologous to Plasmodium lophurae histidine-rich protein,accession number X01469,Smith-Waterman Score=38.
atggtgatggagatggagatggtgatggtgatggtgatggagatggtgatggtgatggtgatggagatggtgatggtgatggagatggtgatggtgatggtgatggagatggtgatggtgatggtgatggagatggtgatggtgatggagatggtgatggtgatggtgatggagatggtgatggtgatggtgatggtgatggtgatggtgatggagatggagatggtgatggtgatggagatggtgatggtgatggagatggagatggtgatggtgatggagatggtgatggtgatggtgatggtgtggagatgcgacggttatggtgatggagatgatcttcctctgatggcgctgcctccatgccatgccctctgccagttctatgtggtgaacagtgagctgtcctgccagctgtaccagagatcgggagacatgggcctcggtgtgcctttcaacatcgccagctacgccctgctcacgtacatgattgcgcacatcacgggcctgaagcttcagcgagaacccagacctttcccaaagctcaggattcttcgaaaagttgagaaaattgatgacttcaaagctgaagactttcagattgaagggtacaatccgcatccaactattaaaatggaaatggctgtttag

SEQ ID NO: 3952 - DNA, 1540 bp, Homo sapiens
  SIMILAR (848)..(1048): 561254mologous to Homo sapiens thymidylate synthase,accession number D00596,Smith-Waterman Score=164.
ggggggggggggaccacttggcctgcctccgtcccgccgcgccacttggcctgcctccgtcccgccgcgccacttcgcctgcctccgtcccccgcccgccgcgccatgcctgtggccggctcggagctgccgcgccggcccttgccccccgccgcacaggagcgggacgccgagccgcgtccgccgcacggggagctgcagtacctggggcagatccaacacatcctccgctgcggcgtcaggaaggacgaccgcacgggcaccggcaccctgtcggtattcggcatgcaggcgcgctacagcctgagagatgaattccctctgctgacaaccaaacgtgtgttctggaagggtgttttggaggagttgctgtggtttatcaagggatccacaaatgctaaagagctgtcttccaagggagtgaaaatctgggatgccaatggatcccgagactttttggacagcctgggattctccaccagagaagaaggggacttgggcccagtttatggcttccagtggaggcattttggggcagaatacagagatatggaatcagattattcaggacagggagttgaccaactgcaaagagtgattgacaccatcaaaaccaaccctgacgacagaagaatcatcatgtgcgcttggaatccaagagatcttcctctgatggcgctgcctccatgccatgccctctgccagttctatgtggtgaacagtgagctgtcctgccagctgtaccagagatcgggagacatgggcctcggtgtgcctttcaacatcgccagctacgccctgctcacgtacatgattgcgcacatcacgggcctgaagccaggtgactttatacacactttgggagatgcacatatttacctgaatcacatcgagccactgaaaattcagcttcagcgagaacccagacctttcccaaaagctcaggattcttcgaaaaagttgaagaaaattgattgacttcaaagctgaagactttcagattgaagggtacaatccgcatccaactattaaaatggaaatggctgtttagggtgctttcaaaggagctcgaaagatattgtcagtctttaggggttgggctggatgccgaggtaaaagttctttttgctctaaaagaaaaaggaactaggtcaaaaatctgtccgtgacctatcagttattaatttttaaggatgttgccactggcaaatgtaactgtgccagttctttccataataaaaggctttgagttaactcactgagggtatctgacaatgctgaggttatgaacaaagtgaggagaatgaaatgtatgtgctcttagcaaaaacatgtatgtgcatttcaatcccacgtacttataaagaaggttggtgaatttcacaagctatttttggaatatttttagaatattttaagaatttcacaagctattccctcaaatctgagggagctgagtaacaccatcgatcatgatgtagagtgtggttatgaactttatagttgttttatatgttgctataataaagaagtgttctgc

SEQ ID NO: 3953 - DNA, 1750 bp, Homo sapiens
  SIMILAR (653)..(835): 831254mologous to Danio rerio thymidylate synthase,accession number AY005804,Smith-Waterman Score=271.
  misc_feature (1)...(1750): n = a,t,c or g
ttgagacacagtctcaccctgttgcccaggctggagtgcagtggtgtgatctccgctcacggcaacctccatctcccaggntcaagtgagttcccattcctcagccccagagctgggaccacaggcgcgcgaatttttgtatttttagcagagacggggtttcactatgttggccaggctagtctcgaactcaagttggccctcaagtgaatctgccccacccctggcgtccccagtgttgggatttcaggcatgagccactgtgccctggcccatgtaatagagacttttaatatagggagggtgtaccagaaggcaccagtttcctgtgggcaaacagaattattcctgctgtatttgtaatctgggtgccacggagggtaggcccagatcccttcagcttctgatgggaaggagcattgctttcagctngtaaaatggacacctgcaggaaaccttgcaccgatggatagtctccctcagctccgtgccatcgctgcagaggctgttatggacatcactgcagcccagtggctctctctcctggtctccaccatatgagatggcttctgtttctctcctgttttacttcgcctttagctgtggtctttcaaaccaccatccctccttatcttcctcaggtggttcctcagatcttcctgtgatggcgctgcctccatgccatgccctctgccagttttatgtggtgaacagtgagctgtcctgccagctgtaccatagatcgggagacatggacctcggtgtgcctttcaacatcgccagctacgccctgctcacgtacatgattgcgcacattcacgggcctgaaggtgggctgtctcgggaaaggtgacttgcccagcctacccacactgagctcctccagttctttaaatatgggaaaacaaattgccagagtttaagtcctctgattagcttttaaatttgatatgtgtaagtaagacatgaaccagcttttactttgaaaccttcctcttctggaaggttttctggccctgtggtatatgcactaacagatctatacaggttgtttgtgatacagcttctatggatcttctcaaaagctatgctgagattgggtatggtggctcatgcctgtaatcccagcactttggaagactgagacaggagcaattgcttgaggtctggagttcaataccagcctgggcaacataacaagatgctgttgctacaaaaaaatggaaaagctacactaaattatttttttaaaaaaagccttgcggtgtctgcatattctaatgtttttaaatgatgttttaaagaattgaaactaacatactgttctgctttctcccccgggtttatagccaggtgactttatacacactttgggagatgcacatatttacctgaatcacatcgagccactgaaaattcaggtaagaattagatgttatacttttgggtttggtaccttctcttgataaaaggttgactgtggaacaggtatctgctcaatgctgtgtccaagataaagatgactgctccaaatgtggggcttcagtttagggagaagtggtgggcaggtgggcaggacaaggcaggcatctgcctcagcaaccatgggcacttaacttgtcaggtgctgtgaggtactaagcaccagtaccagagagggaagagccacattcaagccaggggattgtccaaaaggaggcattttaactcattttaacttgaaggagaattgaagtgcaaagaattcgcc

SEQ ID NO: 3954 - DNA, 2425 bp, Homo sapiens
  SIMILAR (262)..(489): 1001254mologous to Homo sapiens DAN26,accession number Y08265,Smith-Waterman Score=403.
atgtgcccagctgcagccctgacccctacttctgtggccagccaatcagaggctccctggtccttcatgctcattcgagaatgcaatactatggtgacaccctccttgcgtggagagatgcagacaactcggctgcacgctgccacacccagctctaactcagacaggcatgtgtcaatgccattgttgctctacctggagcaggttacattccttcaggaacatgctggcacaggacggcgctggtggtcgatcgtgtggcgccggaggacgttccccgcggccggagccatggagatgccgctgccccccgatgaccaggagcttcgaaatgtcatcgacaagctcgcccagttcgtggctcgcaatgggcccgagtttgagaagatgactatggagaagcagaaggacaaccccaaattctcgtttcttttcggaggcgaattctacagttactacaagtgcaagctggcgctggagcagcagcagcgtcactctagaggatccccgcatcttccgggactcgggctccgagcgcgggggaacgggggcggggctgcagccacgcgtgcgcactgggacgacgggagggcgacctacgtctaccagtggccctggacgctcctgctcctggctgtcagcggcttctgtaactttgcccagaatgttatcgccttcagcatcctcaacctcgttagccccctgagctactcggtcgccaatgccaccaaaagaatcatggtcatcacggtgtccctgatcatgctgcgcaacccagtcaccagcaccaacgtcctgggcatgatgaccgccatcctgggggtcttcctctataacaagaccaagtacgatgcaaaccagcaagccaggaagcacctcctccccgtcaccacagcagacctgagcagcaaggagcgtcaccggagcccactggagaagccccacaacggcctcctcttccccccagcacggggactatcagtacggccgcaacaacatcttaacagaccacttccaatacagccggcagagctacccaaactcgtacagtttgaaccgctatgatgtgtagagtccaaaggacaggaccagactgttggtgactccttccccggcccccacagcagtatcagaaacttctgacaatcagtgaatgtacaacccagccgaggggacggtgcataactctccatcagaagccctggggttcctggccccccgtgagccgcaggaggatgcgttgcctgcagtgcagacggccgtgagctctgggcaaacctaaacagagaccagtgtctcatgctctttcttcctggagtctgtcatctgagggccgtgtccctgcggagatcttggccacgttgtacctttccatgtggaattattccccaagcacgtgtatgctcagaagcacttgtgtcttgcacttccagataacattcaggacctgtgtgaaaaagctggggtcactgtggctcgtagaccatgaacttggcagtgggggtgtccagggcggtgcttgagaacgtcagactggctagtttaattccctggcgcagatacgcataggaccaacagggtcaccaagcagacagggagcccgcgagaatcattcaaaacatccccagccacagagatggatccagtttcctggtcatccccttagcagttcacaagttcctgggaaaatgtttccaaagcaaaaagcgattgcaattagcatccagttcctgcagcctggtgctctgccctgcacgtcagggttggcatccacccagatccagatggaagggaaacttctctcttctcctttgcctcctcttccctcaccagagcagggcgcttctcttggggtggtgagaaggatcttcgagaaatcgtgtttcagtattttaagctctatttctgtggcacatgtcttttgagaggcatcttcacctcttctgtgatgacttggtatgttgtttggtaggagagatcttgattttcggaggatcttgcattcttctacggaaattcttggaacttgcggggtgtgtgtttttgccttggtccccattatgggatgcattaggactggcctatgcatcgaaaatctttttgtttgtaaacgtttaaaaacaaagttccccggccaggcacagtggctcgcgcctgtggtcccagcactttgggaggccaagatgggcggatcacgaggtcaggagttcgagaccagcctggccaacatagtgaaaccccatctttactaaaaatacaaaaaattagccgggcatggtgtcgcgtgcctgtagtcccagctcctcaggctgctgaggcaggcgaattgcttgaacctgggaggcagaagttgtggtgagccgagattgtgcattccagcctgggtaacagagcgagactccatctcaaaaaaaaaaaaaaaaaa

SEQ ID NO: 3955 - DNA, 437 bp, Homo sapiens
  SIMILAR (102)..(401): 881254mologous to Homo sapiens intercellular adhesion molecule 2,accession number M32334,Smith-Waterman Score=452.
  misc_feature (1)...(437): n = a,t,c or g
tttcgtcgtgaactgggcagatgtgacacgcgcaccttgtcaccttggcaccaatttcctgcccgggatcccagagctacccttcttggagcccacaggggaccctgactgtggccctcttcaccctgatctgctggccaagatcggatgagaaggtattcgaggtacacgtgaggccaaagaagctggcggatgagcccaaagggtccctcgaggtcaactgcagcaccacctgtcaccaccctgaagtgggtggtctggagacctctctagataagatactgctggacgaacaggctcaccggaaacattacttggactcaaacatgtaccatgacacggtacttcaatgccacttcacctgctccgggaagcaggaggcaatgaatatcaacgtcagcgggtaaccggagcagctgtgctgcngagccatcctc

SEQ ID NO: 3956 - DNA, 701 bp, Homo sapiens
aaggggctcaattttaagccaaggagttttcactcgcagctatctctgtcagctttttgaacaaagttacattcacaagcagcttcaaattgaacaagccaaaggttcagaaaactgttgcataaaattggagtgatctcacttatagcagtttatagcagggctgaaaatacactggcaaaagttcagacaccagtgggggaaaatgaacaagtaaagcttcgagattaattcactcattttttgttttgttctatgtcatggaataatggagactccaaaaagccacgctgaagatgtgaatgcattcataaagaaaaattgtgcataaggctatgaaaaattaataccggtattattctataataattaatgggcccgaccccctatattttaagagctccccatgggttaatttaattttataacaatattataaagtaggggctcttatccttattaaaaaggaaaagaagttttaaggagctttagtaatttacaaaaggtccccccccaagtaaaaaaaggtttattagtagtattaatatttttgacaagggctttcagtttggtttccacaggggagttccagggcatgattttggaaacctgggacctttgcctccaggtatcaagcgatttttaagccttagcctctcaaatagctgggaatgtaagcctgcatccttagagcggccgtc

SEQ ID NO: 3957 - DNA, 1248 bp, Homo sapiens
accttggctgtttcacaccacataattttgttttccttttatgtaacttaacgtataagcaagaaggatgcaatgttgattctaataacattcggcacttgaaagaatcaccaagtgtttttttaaaaagcggttttctggtggccaacaaattggcctgtggttatgttgagtgactaattgtattttcttttctggaaacttgtgcaaagttggcagttttgtgttaacactaatactttgtttggcatttgtgccctatactgaccagaccatttttatacaagtgaattttttttaaaaaagacacttactgaagtatggcaatagtttaaggataaaaaagaagcatggttattacacatccccttgtagtgtatgaaaaaaagtgcatgacgggatttatgtactagtacaggacattttaaaaaatcagatctgtgctgtaaagcatgccagcacctctttagcactatatctaacaggtagtaaaaacaagcccatgtttttttctttttttaaaaatgtgcattaatgctaacataaatgaatagagctagccagcaaactatcttttcctgcatatctaacagctggatgtaactgtaaaaattaaacaaaaaagttaaacaaccatcaatacaattgttttacatcaatggcccctcaaggctaaatatttacaggtgaatctgccatgctttaattgaagattctttcaaaaccttaaagttcacaaaagacaactataagaagttcctttttgtttcttttttcttttttttcccttttatttttgcaggcaacagtcatgggtacaacaaattgtctctttggggaagaccaagaattattctgtcaaaactggggctagttgcacactgtgtgtgtagtgtgtgtgtgtgtgtgtatgtgcatgtgtgtgtgtgtgtgtttaaaggggtactctgttttcaccctgaaaatccaaagatcccactccttttcccaaaactataaaggggaagtgaaaaaaaattcaaaagcacctagtgtttatcttgtttatctcaaggaaatacgtgtgtgtatatgtagccacagagcatacataaatgcacacacacacacacacacacacacacacacacaccccaagtacataagcgcacactgactatggcagttcaaacacgtaggccatctggtgagagctggcatttgtagtgtccattctgagactaatctactgaagtgaagggaatgttt

SEQ ID NO: 3958 - DNA, 448 bp, Homo sapiens
tttttttaacgttcatactaaatttattctgttacttaagagtgtttatggatttacattccatttgtggactaattttctcactggatcttctttcctgcagtaagaggtgatttgggtcctgtggaaggtcattgtctcaatttgtctggtgtttgcagaagagatgtctgcaaagtagtagaagatcaaattggtgccttttggaaatttttaaagtctccacaggtttccagaggtgactgtagctgcactgaaagtcactgcctggataactggcctggggtagttgcaggagtaggcctaaatccaggtgtgaagatccttgaactgggggtgtttctgtacctgttctgggactctgctccacttgccaacatttgagtggattcatttgtgttgtagtcaagattcccgttgtggcacaaggacacatgcactcgtgtcc

SEQ ID NO: 3959 - DNA, 416 bp, Homo sapiens
ttaacgttcatactaaatttattctgttacttaagagtgtttatggatttacattccatttgtggactaattttctcactggatcttctttcctgcagtaagaggtgatttgggtcctgtggaaggtcattgtctcaatttgtctggtgtttgcagaagagatgtctgcaaagtagtagaagatcaaattggtgcctgcaggttgtttttcctattttctgaatgttaatccttgccttctggaactcaacattaccccaggagagaagggctgatctccatgatgtggtttcctcagggtctcattaagggctggtgatacaggagcactgcctacccctcttcctcacgtgagagtggtacattctctgttgtcatggctgggatggctccatctggggtagttgcaggagtag

SEQ ID NO: 3960 - DNA, 513 bp, Homo sapiens
aacgttcatactaaatttattctgttacttaagagtgtttatggatttacattccatttgtggactaattttctcactggatcttctttcctgcagtaagaggtgatttgggtcctgtggaaggtcattgtctcaatttgtctggtgtttgcagaagagatgtctgcaaagtagtagaagatcaaattggtgcctggggtagttgcaggagtaggcctaaatccaggtgtgaagatccttgaactgggggtgtttctgtacctgtagagattgcagactgttctgggactctgctccacttgccaacatttgagtggattcatttgtgttgtagtcaagattcccgttgtggcacaaggacacatgcactcgtgtccaactccaaatagtagcttcacatagtatgtcagcactctcccaccatcatctcttctagaaggtcttccgctggattggaaatggcctgctgcaggacactcagcagctttcagtagttcatccagacatccagtt

SEQ ID NO: 3961 - DNA, 442 bp, Homo sapiens
gactgcacgctgcaggaattcggcacgagcttgtgccacagcgggaatgtgagctggatgacaaatggagatttggacttgtgataattggcctctgtgtcattgtgtggaagactgactggtccctttatttcctgtagcttgactaccacacaaattaatccactcaaatgttggcaagtggagcagagtcccaggacagtctgcaatctctacaggtacagaaacacccccagttcaaggatcttcacgcctggatttaggcctacacctgcaactaccccaggccagttatccaggcagtgactttctgtacagctacagtcacctctggacacctgcggagactttaaaaatttccagaaggtcaggaatttttggagacctttcttatggctacgttgcctgcaaaggtgaatcaataagcttctgaactgactta

SEQ ID NO: 3962 - DNA, 842 bp, Homo sapiens
tcagtaagaggtggtttgggtcctgcggaaggtcattgtctcaatttgtttggtgtttgcagaacagatgtctgcaacatagtagaagatcaaattggtgcctttgcaggcaatgtagccatgagaaaggtctccaaaaattcctgaccttctggaaatttttaaagtctccgcaggtttccagaggtgactgtagctgcactgaaagtcactgcctggataactggcctgcaggttgtttttcctatttttctgaatgttaatccttgccttctggaactcgatattaccccgtgagagtggtacattctctgttgtcatggctgggatggctccatgttgaacatataaattccaggttctagaagcaaaaaagcaaaagatgcattggatctgcatagggaactgcaagccatccaggaacctcaggacacactcagaaacaaccacgtggaccacatcgcccaagctcagctgcatggctctccgttgggctaggatgaggacctcttccaccaggctcaactggagtcctatcccatgtcccaggaccacaaggagcatctctttttttggaatcacactgctccactcgaaggacagccctcagttctctgtcttcaaaagaggctgcaaatggtgctgattgggagggagccgccagcagcatcaccctctacaactggggtagttgcaggtgtaggcctaaatccaggtgtgaagatccttgaactgggggtgtttctgtacctgtcctgggactctgctccacttgccaacatttgagtggattaatttgtgtggtagtcaagattcccgctgtggcacaaggtcacatcgac

SEQ ID NO: 3963 - DNA, 447 bp, Homo sapiens
cctttcagtaacctgaagctttcaccgtaaaagtgcttgtattgcccaaaaacccatcgtgtcgctggtcggggtcctgcggaagctggctgcctgccgggaacacccacgggctccctcaattctacatggcccttaccgtcacttgaagttcacagcacacgcaggcaaacagctcctgaacatgtccaccaccttcatgggcaggtcccaggccactggaggatgtgtccagacagacaccccaggtccaccgaccctgctgcaggacactcagcagctttcagtagttcatccagacatccagttggaagtgggatttcctggaggaggaggaggtgaacctggagctcccgccggcctctgggcgctccttggtggaaggagagggacttggtcctgagcctgccccggatctacctacaccacctcgtgccaagcatggag

SEQ ID NO: 3964 - DNA, 922 bp, Homo sapiens
  misc_feature (1)...(922): n = a,t,c or g
ttttttttttttttttttattctgttacttaagagtgtttatggatttacattccatttgtggactaattttctcactggatcttctttcctgcagtaagaggtgatttgggtcctgtggaaggtcattgtctcaatttgtctggtgtttgcagaagagatgtctgcaaagtagtagaagatcaaattggtgcctgccgaagaaggatgaagtgttgtagaacatggtggattttaatgccaattccaacaccacttatcatgtcagattatcaagaaccccttaaacataagttgaaatgaaactggggtagttgcaggagtaggcctaaatccaggtgtgaagatccttgaactgggggtgtttctgtacctgtagagattgcagactggtttgctgggactctgctccacttgccaacatttgagtggattcatttgtgttgtagtcaagctacaggaaataaagggaccagtcagtcttccacacaatgacacagaggccaattatcacaagtccaaatctccatttgtcatccagctcacattcccgttgtggcacaaggacacatgcactcgtgtccaactccaaatagtagcttcacatagtatgtcagcactctcccaccatcatcttttatagaaggtcttccgctggattggaaatggcctgctgcaggacactcagcagctttcagtagttcatccagacatccagttggaagtgggatttcctggaggaggaggaggtgaacctggagctnccgccggcctccgggcgctccggaacctccccgccggccccagccccaaagccagggcgatggcgcctacatgacaatgggtgaagaaaactcaggtcctccacgaaatcgtcgacccggtaattcctnnccggtgcggcttgctcagcctatttagtt

SEQ ID NO: 3965 - DNA, 883 bp, Homo sapiens
gtgacatcctaatgggctatgtgacgagaaagacgattacttaccaattaaattcactattacagcatataaacccaccactgtagctaaccattcaaaaacatttactaggcactccaagctcttagaagccccctacaaaggtatttttaaaactgtgcagagcaaagggtgacagaaaccactgttagaatgaaacaaatatgcgtgagttaaatgcagctgctaagactttaagtgttgggggagatgtcggtgaatgacagttactcacatcactatttacaacaaagctcaagtgtcaattctgaagtgccggggaagggtgaagggatgcggcagcgctgaacgcagaagccaccccaatcaacatgtggcggcacgcacaccctctgatgcctcaaaaacaaccacagcacaacgtaatggaggcgggaaacctcgttcctcaacgacttgtagcgttgtgtccaactctgtagactcatcgtcggatgtttgtcgatcgatgtccgtggaatctcagtcaatcgtcgcctatttcctgcactcccaggtgcaggcagccgggtacctgaaccctttgcatctcgccgttaaactctgccaagccccgggaacctctaacaactcagactgcctcaggcctcgtcgtcgacggtgtcaccgccagcacacgcccagcgaccacttcacctgctggccgagtaacgtgcaacaacgcatcaagcatccttcggcccgcacgctcgagtcagctccatggcctgctaagtcgccagctatcttcgcggatggcccgacgggtggcgcggcctgcatcctgcaggccctctttcgtgcggggagcaccgcgaaggcagcgatggtcgccagccgctga

SEQ ID NO: 3966 - DNA, 1335 bp, Homo sapiens
  SIMILAR (499)..(879): 961254mologous to Homo sapiens ninjurin2,accession number AF205633,Smith-Waterman Score=601.
atgcggggccgactcgggcctgcctttcactgcgggtgctgggcgggatcagggtgtccccgcctgctccagagtgtccacacggtggcgcgcgcggtccagagacgtgacttgggcgccgcggctgccggggggcgtttccaccccgaggaacccacgcgcaggacgggattaatgggaaacctggacccctccgaggcccaggacgggagcctcgcccgcaagtctggatgggccgaactaaaacccaccaaacgcgtgcgtcaagccagagttcgagaatcaaccgaagctgaaatggagccagcgtggggtggggggacccagaagggaggggcctccagcacaacctgcccccgaggggacggcgggcagaagggccgacaagctggtccgggtgggctggcggcctccacccgccacaagcgcacagggctctgcccactccccgccccttttctgctgatcctcgaggagcaggggaccgagctccccttgcctggaagctccgaccccaggagccagcccatcaacctgaaccattacgccaccaagaagagcgtggcggagagcatgctggacgtggccctgttcatgtccaacgccatgcggctgaaggcggtgctggagcagggaccatcctctcactactacaccaccctggtcaccctcatcagcctctctctgctcctgcaggtggtcatcggtgtcctgctcgtggtcattgcacggctgaacctgaatgaggtagaaaagcagtggcgactcaaccagctcaacaacgcagccaccatcttggtcttcttcactgtggtcatcaatgttttcattacagccttcggggcacataaaacaggactctggagttcaagatccagtgtccaatgcaccatgggtgaattcacagcagtggtggaggcagcagcagcaacagaaaaacccccagccacaaaagcaccggggttattagtgcaagagaagtacaaggtctccaggaaattgacagatatgtccacatcctctttacctcttctccatgtcctctcgggaggccttacccacaggcacgccggcctcaatgtccagtgccagggagtggcaagcccctgcccgccagctccccacctcccaatgcccaagcaccagaaacagcccgttctgtgcttctggtctgacgtgagccatccggaggaagttaatgccctaatcagtggccagctgtttggtggctactgggagatgtgtgtctctggaaggcacgagcctggggtggagcagagacctgccccacgtgggaccagtcccgcggccagggacaacgcccaagggacatag

SEQ ID NO: 3967 - DNA, 1077 bp, Homo sapiens
  SIMILAR (203)..(703): 411254mologous to Homo sapiens ICAM-2 preprotein (AA -21 to 254),accession number X15606,Smith-Waterman Score=177.
  misc_feature (1)...(1077): n = a,t,c or g
acacgcgcaccttgtcaccttgtcaccaatttcctgcccgggatcccagagctacccttcttggagcccacaggggaataaagtgaaacacctcaggctccaaccctcccaacccaaggctccctcctggagggagagaaaggatggaggacatcaggcagcccttggctggtccctgcgaacccgttgaagactgccagagatgtcctctttcggttacaggaccctgactgtggccctcttcaccctgatcttgctgtccagggatcggatgagaaggtattcgaggtacacggtgaggccaaaggaagctgggcggttgagcccaaagggtccctcggaggtcaactgcagcaccacctgttaaccagccttgaagtggggtgggtttgggagacctctcttaggattaaggtttttgctgggacgaacaggttcagttgggaaacattatttgggttttcaaacattttcccattgacacggtcctccaattgccatttcacctgcttccgggaagcaggaagtcaatgaattccaacggtcagcgttgtaccagcctccaaggcagggtcatcctggacacttgcaacccacttttgggtgggctnttgggcaagtcctttcaccatttgaagttgcagggggtgcccaccgtggagccccttggacagccttaaccctctttcctggtttccgtgggcaatgagactcttgcactatgagaccttcgggaaggcagcccctgctccgcaggaggccacagccacattcaacagcacggctgacagagaggatggccaccgcaacttctcctgcctggctgtgctggacttgatgtctcgcggtggcaacatctttcacaaacactcagccccgaagatgttggagatctatgagcctgtgtcggacagccagatggtcatcatagtcacggtggtgtcggtgttgctgtccctgttcgtgacatctgtcctgctctgcttcatcttcggccagcacttgcgccagcagcggatgggcacctacggggtgcgagcggcttggaggaggctgccccaggccttccggccatag

SEQ ID NO: 3968 - DNA, 512 bp, Homo sapiens
gcaagttggtttgcagatcaaaggcagtgtgtgagaagtacttaacccagcacctggcatatagtagatgttcaggacatcgtagcaggaataagggagacatctcacaaaacattttgtgagaaaggatcagtttctatctagtcaatgtcttaaacattcataggttgttcatggtgggagctgctcgaggaatcatcctagttttatggaggaggaatctgaagctggaggaattgtctccttcaagattacttagttaaaggcaaacaggttcatagccagtggctcttcaccaacccacaaaaaggcctcagattataattttgaagattaagtatatgaaagtgctatttgagtgattaagtgtaagcatcagatcattttgaactggtgagatggctcacgcctggaattccagcactttgggaggcccaagagggaggattgtttgggcccgggagttcgagaccaacctgggcaacattttgagagaaagtccctacaaaaaa

SEQ ID NO: 3969 - DNA, 379 bp, Homo sapiens
  SIMILAR (1)..(201): 1001254mologous to Homo sapiens HUMANES SEAP-GEN; FLANKIERT VON 5'-ECORI UND 3'-HINDIII RESTRIKTIONSSCHNITTSTELLEN,accession number A37554,Smith-Waterman Score=348.
gggatgggggtgtctacggtgacagctgccaggatcctaaaagggcagaagaaggacaaactggggcctgagatacccctggccatggaccgcttcccatatgtggctctgtccaagacatacaatgtagacaaacatgtgccagacagtggagccacagccacggcctacctgtgcggggtcaagggcaacttccagaccccgcgccccgctgatctttgcttcagtccttgaatcacctgtgggacttgaggactcgggatcttcaggacgcctggagaaaagtggtttcctgccaccctgctggccaaggaggctcctggggtggggatcaccagggggattttgacacagccttcggctggcccccactaagctt

SEQ ID NO: 3970 - DNA, 701 bp, Homo sapiens
  SIMILAR (3)..(467): 1001254mologous to Homo sapiens adult intestinal phosphatase (EC 3.1.3.1),accession number M15694,Smith-Waterman Score=798.
ggttgggggtgcccacggtgacagccaccaggatcctaaaggggcagaagaatggcaaactggggcctgagacgcccctggccatggaccgcttcccatacctggctctgtccaagacatacaatgtggacagacaggtgccagacagcgcagccacagccacggcctacctgtgcggggtcaaggccaacttccagaccatcggcttgagtgcagccgcccgctttaaccagtgcaacacgacacgcggcaatgaggtcatctccgtgatgaaccgggccaagcaagcaggaaagtcagtaggagtggtgaccaccacacgggtgcagcacgcctcgccagccggcacctacgcacacacagtgaaccgcaactggtactcagatgctgacatgcctgcctcagcccgccaggaggggtgccaggacatcgccactcagctcatctccaacatggacattgacgtgcgacccccgggccaagggctggggctgggcagaggggaaggtggcacaggctcagatccaggcaaccaaaagcctgatctgggtcagcaggttctggaggtgatccttggcggaggccgcaagtacatgtttcccatggggaccccagaccctgagtacccagctgatgccagccagaatggaatcaggctggacgggaagaacctggtgcaggaatggctggcaaagcaccag

SEQ ID NO: 3971 - DNA, 2781 bp, Homo sapiens
  SIMILAR (15)..(1619): 1001254mologous to Homo sapiens preplacental alkaline phosphatase (EC 3.1.3.1),accession number M14170,Smith-Waterman Score=2782.
gctgccctccagacatgctggggccctgcatgctgctgctgctgctgctgctgggcctgaggctacagctctccctgggcatcatcctagttgaggaggagaacccggacttctggaaccgcgaggcagccgaggccctgggtgccgccaagaagctgcagcctgcacagacagccgccaagaacctcatcatcttcctgggcgatggggtgggggtgtctacggtgacagctgccaggatcctaaaagggcagaagaaggacaaactggggcctgagatacccctggccatggaccgcttcccatatgtggctctgtccaagacatacaatgtagacaaacatgtgccagacagtggagccacagccacggcctacctgtgcggggtcaagggcaacttccagaccattggcttgagtgcagccgcccgctttaaccagtgcaacacgacacgcggcaacgaggtcatctccgtgatgaatcgggccaagaaagcagggaagtcagtgggagtggtaaccaccacacgagtgcagcacgcctcgccagccggcacctacgcccacacggtgaaccgcaactggtactcggacgccgacgtgcctgcctcggcccgccaggaggggtgccaggacatcgctacgcagctcatctccaacatggacattgacgtgatcctaggtgggggccgaaagtacatgtttcgcatgggaaccccagaccctgagtacccagatgactacagccaaggtgggaccaggctggacgggaagaatctggtgcaggaatggctggcgaagcaccagggtgcccggtacgtgtggaaccgcactgagctcatgcgggcttccctggacccgtctgtggcccatctcatgggtctctttgagcctggagacatgaaatacgagatccaccgagactccacactggacccctccctgatggagatgacagaggctgccctgcgcctgctgagcaggaacccccgcggcttcttcctcttcgtggagggtggtcgcatcgaccatggtcatcatgaaagcagggcttaccgggcactgactgagacgatcatgttcgacgacgccattgagagggcgggccagctcaccagcgaggaggacacgctgagcctcgtcactgccgaccactcccacgtcttctccttcggaggctgccccctgcgagggggctccatcttcgggctggcccctggcaaggcccgggacaggaaggcctacacggtcctcctatacggaaacggtccaggctatgtgctcaaggacggcgcccggccggatgttaccgagagcgagagcgggagccccgagtatcggcagcagtcagcagtgcccctggacgaagagacccacgcaggcgaggacgtggcggtgttcgcgcgcggcccgcaggcgcacctggttcacggcgtgcaggagcagaccttcatagcgcacgtcatggccttcgccgcctgcctggagccctacaccgcctgcgacctggcgccccccgccggcaccaccgacgccgcgcacccggggcggtccgtggtccccgcgttgcttcctctgctggccgggaccctgctgctgctggagacggccactgctccctgagtgtcccgtccctggggctcctgcttccccatcccggagttctcctgctccccgcctcctgtcgtcctgcctggcctccagcccgagtcgtcatccccggagtccctatacagaggtcctgccatggaaccttcccctccccgtgcgctctggggactgagcccatgacaccaaacctgccccttggctgctctcggactccctaccccaaccccagggactgcaggttgtgccctgtggctgcctgcaccccaggaaaggagggggctcaggccatccagccaccacctacagcccagtgggttaccagggcaggctcccttcctggggaaaagaagcacccagaccccgcgccccgctgatctttgcttcagtccttgaattaacctgtggggacttgaggatttgggatcttcagggacgccctggagaagggtggtttcctgcccaccctgctggcccaaggaggctccctggggtggggatcacccagggggattttgacacagccttcggctgcccccccactaagctaattccacacccctgttaaccccccagggggcccttctgcctcatggcaaaggcttgccccaaatctcaacttctcagacggttccataccccccacatgcccaattttcagcacccaactgagattccgaggagcttcctggggaagcccctgggtgcaggaacactggtcgagagccaaaaggtcccttcccccaagacatcttggacacttgggcatagatttctccaagaaggaaagactccccctgcctcccccagggcctcttgctcttcctggggagacaaaggcaataattaaaagggaagtgttttgtaattcccaggcattttggggaggccgaggtggggcggattcacggaggttcagggagatgggagacccatccttgggtttaacacggtgaaaccccttatctatgcgcctgtagtcccagctacccagggaggcttgaagcagggataattcgctttgaacccgggcggcgggagatttgcagttgagccgaggtcatgccgactgcacttgcagcctggggcgaacagagcgagatttttgcctcaaaaataaacaaataaattttaaaaataaataaataataaaagaaagtgttagacaatgaaa

SEQ ID NO: 3972 - DNA, 224 bp, Homo sapiens
gaatttgagccaaccaaaatattaaacctgtcttacacacacacacacacacacacacacacacacacacacacacaccggattgctgtccctggttcaagtgtgccaagtgtgcagacagaacatgagcgagtctggcttcgtgactaccgaccataaacccacttgacaggggaaacatgccttgggaaggtttaattgcacaatcccaaccttgagctgcg

SEQ ID NO: 3973 - DNA, 484 bp, Homo sapiens
  SIMILAR (453)..(133): 981254mologous to Homo sapiens unnamed protein product,accession number AK023903,Smith-Waterman Score=528.
ttgtttttttgagaagcagcagctgcatttgtaaaaatgtgaaagtgccagttcagaggtgttgtagcttgccaccttggaaggcgtgtgtgggccggtagctctgtgaacacacgtgtgaacccggcgttaggacacccgggccctccttcgtagtgtgaacactctggccgtgtcctgcagcttcgccttcttagctccttgctgggattttccagcatcccttagacttgtcctcttttgtcctttgggtctgaggtcacactgggcctcttggctctccatggagctcagtgtgggtgtgtcttgccggcaggcaggttccggggccgcagcatccccatcgcccacccggatgttcctggggctgtaggccgccagctggcacagggccacggctgccgtctgcttctgctcctcgatgctgtcctccgcgcatgcgtctggagcctcgtgcctcccgtcgatccgggacatccggaaa

SEQ ID NO: 3974 - DNA, 1583 bp, Homo sapiens
  SIMILAR (1581)..(1504): 611254mologous to Mus musculus putative,accession number AK009737,Smith-Waterman Score=93.
tcgatacgacttttttttttttttttttttttttttttcgtacacagtaaacataggcaatttttattagtcaatgttagaaaatattttttaacgaactatgtagtttacaaagcttaaagtatttgctatctggcttttaagaaaatgtttgcccatcccttccctggagacttggagagcaaggatggctctctataccttttatagtacctggcatttagtaggtacatattaaatatctgttgaaagaagtgaagagcctcaaggcccagctctaactcctctttaatgggaggctctttttttggaagggcagggctagacaggtatgggtcagttctcttctgatagtcccagagtctacagcgaaaccaaagatgaaaagctctgaaaggaagagacaccagtactcacaggtctcatgtcccatgctcccgtccaaggggacctagctacttccttaccctttctcattttcagtagaagaaaagtgttgtgagactggttaagaccctttcccaccaattgctgtggtgaaccctccagcaagggcatggctactttcaggaaagcaaagagggtcctctgcttctctatccttcccaaaaaacatgggctggggtagaccctaaagagcaggcatggaggactgtgggaaggacctcagccttgctgtagaagctctctgcaaagcaagaggcagggtatggtaacaaatgccaattcctggttaaattggacttgacaggtgaaagatgtcaggctgtgtgtggtcacattgtacatatgcatgcctgggggttaccaggctgtatgcaaatatacaaggaagaggtaggctctgagaacctgccagggcccctgggatgagctgtggatttttgcccctgatcccatgaattggagggtcctctgctcaaaacatatgatatacatgtcttcttttaatttggtatcgtctttaggtccggaagagaaaacattcccttccttgtaccaaagtcctcaggctcaggttccctgagtccacagagggttgcctcagacgaactgggatctgaagtcctgagaaagcaccagcttccaccactcccaagtcctggagggtatccagtaactgctcccaggcagcaccaataaagcaattctccagaaagatgggcaggcctcccacaccatcatgcagggtacaggggcactcacaccaggcccagcacctccagcccgtggtccttggcccctgttgcgctggcctccacagccaacagctgctcgagcgtcagagatttggcatagaagtgggccacaacacgtggccttgatccggcgtgagagctgcggtagtcagggcgctccacgcggaaggcggccgccgcctcgcccagcagttccagcagaccacggttcagcccgtcctccaggctgctgtcttgcgagtccacgaatccgccagggaagcccaggcgcccatcaaagcgcatctgcatctgagagaggaggaagcagtatggcgtagcgcagagggaggcggccagagagaattccagggtccggcgcgtgcaggagcgcatagcaggcat

SEQ ID NO: 3975 - DNA, 541 bp, Homo sapiens
  SIMILAR (52)..(249): 461254mologous to Homo sapiens X-linked retinopathy protein {C-terminal, clone XEH.8c},accession number S58722,Smith-Waterman Score=156.
tgttcctgcaggtcttgatatgcgaggacgctgtgtcttacctgccacattttcttcttctttcttgagacagacccttgctccatcacccaggccagagtgtggtggtgcgaacacggctcactgcagcctcgaccctcaggctcaagcgatcctcacgcctcggacccccaaagtgctgggatcacaggcgagagtcaccatgctggcctgaatcttcagggtattttacggttgaagtgtcacttacttaaccatccctgtttcaagagtgtaggtggtcaccctgtctctgccgctgacctggcctggaccctcggctgtgaaagggaggggtgggctgggctggaggaacctgaagccctcgtgatgtcacaagcccatctggctgggcatcccctgcgctgcacatgccccaggtggcccccacagcagaggcgagccactggagggtggagggcttccacgggacggtcttcagggggagaaggaagggcccaggcccccaggagactcaggagaccagagcctggggtcaggg

SEQ ID NO: 3976 - DNA, 1021 bp, Homo sapiens
ttttttgtaaaattttaaaaatttaaatttattaggatttattaacacaattacacagaataaagttcaggatttcattaatgatggtcaccaatatgtgcttctttgtggctttttaacccataattctcatgattcaaatttattcatattatagttgaatttcatacacagcttcacaatgtggatattacaggtccaccagtaaaattaatgaaaacatatctttcatgaaaggcacataaagaatctaaactaacacatttaaggaactttgataactttgaatttctttacattacaaagaagaaaatcctccaaatgaaacagatatgaatatagtttatgggttacacacacacacacacacacacacacacacacacacacacacacaaatatacttcaacccagtgacaacacgtaacttggaaactacttaccagcaacgtggtactgaaagactacccttttccaagatgagtaaaaaaaggagggtggggtgggaagttctggtttacttggatgaacaagggtcagagatggctcgtcatgaatagtcgaaagagaattattctatcaaagctcagtatctagctgatacatgacgcttatttgagcacacatataatctctgacttattaagcactattgctcattttgtaagtgtaatcgtccgtttcattctcagaaataatagtataattgaaaaagaaatgatataatctcaagcaagtggagaaatttgaattatctaagggaaaaaagtaattgtagcatagtgtgataattacatttgaaattagttatatgtataaatttaaatcttgcattatatcagcaatagagtattcaaagatccttcttgttatcttcccaacaaggagctatcatgtatgctaggtccaagagactcctcaagggaaataaaagcctcccccatcaatgtctcaaaattcattatgtccacaggttttttttttacccacaaaaatgctcttaggatccctccaaacttag

SEQ ID NO: 3977 - DNA, 3585 bp, Homo sapiens
atgctggagagcaaagaggaggatgtggaggtagaaaagtggtctcctttgagtctgcatcttcatacactgaagggatatggacaggtgcaagaggccagatactcacccaaggtaatcattgagatttggaaaatgggagttgattggtccacaggcctagttttaaaggcagagcagcattcttttgcatttggtgttatggaaacaggaatcagaataagaaaaaagaaaacctcaaatgaaagcaaatctggaggcccctccccatctcaaatgggaggctctgggaacctgattggaagaggaagaagaaagggaggagttaaaaataactgtaaagagccaaatctgagaactgaccctgctaaaaaagtcagacaagtcaagtggtgcagctggtgtgtgctagaaggtgagtctgttgaaatagtcagtgaggtcagagtagaagtaggagaacttaacatcataaaagactggggaagagagagtgtggagaaaggaggggcagtaatatccatggaagcagagagagtaaaaggccaagctatgatagcaactggtggagtgataactggcctggccgccttgaaaaggcaagactctgccagatcacagcagcatgtcaacctcagcccgtctcctgctacccaagagaagaagcccatcaggcgccggccccgggcagatgttgtggttgttcgtggcaaaatccggctttattccccatctggtttttttcttattttaggagtgctcatctccattataggaattgctatggccgttcttggatattggccccaaaaagaacattttattgatgctgaaacaacactgtcaacaaatgaaactcaggtcattcggaatgaaggcggtgtggtggttcgcttctttgagcagcatttgcattctgataagatgaaaatgcttggcccattcaccatggggattggcattttcattttcatttgtgctaatgccattcttcatgaaaaccgtgacaaagagaccaaaatcatacacatgagggatatctattccacagtcattgacattcacacgctaagaatcaaggagcaaaggcaaatgaacggcatgtacactggtttgatgggagaaacagaagtaaaacagaatgggagctcctgtgcctcgagattggcagcaaatacgatcgcctctttctcgggttttcggagcagttttcgaatggacagctccgtggaggaggatgaacttatgttaaatgaaggtaagagttctgggcatcttatgccccctttgctctctgacagctctgtgtctgtctttggcctctatccacctccttccaagacaactgatgataagaccagcggctctaagaaatgtgaaaccaagtcaattgtgtcatcgtccatcagtgcttttacattgcctgtgatcaaacttaataactgtgttattgatgagcccagtatagataacatcactgaagatgctgacaacctcaaaagtaggtcaaggaatttgtcaatggattcccttgtggttcctttgcccaacaccagtgaatccttccagcccgtcagcacagtgctaccaaggaataattccattggggagtcgttgtcgagtcagtacaagtcatctatggctctcggacctggggctggacagctcttgtcttctggggctgccagaagacagtttgggtccaatacatccttgcatttgctctcgtcacactcaaagtccttggacttagaccggggtccctccactctaactgtttcaggcagaacaacggaaacatccaagttgggcctagggttggatcgggaacaacaagcaaaggggatatatggaaactagagaacaaagaaagaccccgatgggataggtttgcttgtgcccaaagttggcatcaaaaaaggactttaccaataaggagaagcttcctaatgatttcaagatctcacaaataatttgagttttgaaacatgatgagtttttgggtaacaacctaaagaggggaacttctgaaacaaggttttaatgttaaaagaatatatcattttacaagggtatatattttaaaacgattttcactggtgtttccttcttaaagtattggctgtaagcctttttaatcaaatggtttgtagtgtattaaaattggctgcttagttctgtaatgaagatggttgtatgtttgggttacttgtgactgcagtactctatgttaccacacatgattttatttttctcttcctttgaaagcatgatctcttttattaatatgaatgcaaaatgcttgcatccaaattaaagcttattttctttacttttaagttctttgattgccctattcataaaatgaaatgtccagtatggaaaacatagggtaccaaagtgtggaccaggagtacaaattcagtcccaatactcaatacgtattatagatgaccatgagtgccaacccttggggatgtgattttccggaataattgttctttgtaggatttggttacattatttaaaatgaaaaagatctagttttagtgtgagctcagtaatgttaattggttaagttcattgtgaatcttgagttttagataagtagttattttttttcaatatcacttttgtttttagtgatattatatcaagaaacaacgtattcaagagccatggctgacagtgccagatatacttagggataaacatcaaagcgcgactatatgctggtataacgttagatactcggaatcacaatttatttgcgagctgacttgataaactaaatgaaccattaaaatttgtagaaatgctatcctgaaataatttatatacatggaagacaatgttggacttaatgaatttaagatacattatatactagttaatgctaactagtctcgagtacctgtttttagccatctgttactgtccaatagcacctcattcccacattctattttcccccggtattctttagatcctagtatttggaaaacaatcggctaaccttgacatttctttttaccttcatatgccactatctcggtagttcgaaaaaaatttagttcttgataaattgccttgaagtttaccttgtgctggagagcccttatgataactccaaagactttcttacggtataatacatgttgtttaggattgtgtttcttagtcactgaagataataaatattaaaaatggatgttttcatcagaaaattttcatgttttcctttaaggtaacataattgtaagaattgtttaataaaatactcaggaaattctaaaggtttctcccaatacctaaacatttctgaacatcagtattgcagttgtggaagagcagaaggaggatacatttgtttgtgttgctccccaaaattccaccttgcatttgcatcacaaacttccctcaattgaggcagttttctttgttagaacattaagtctgtgtattgtaatagagtgggctcaatattttactataaagcatttaataaactgttaccaatagaagtttgtgttcttcacacctttgctattgctttttaaataaaatgtacatttctgcttaaaa

SEQ ID NO: 3978 - DNA, 403 bp, Homo sapiens
  SIMILAR (48)..(401): 921254mologous to Homo sapiens glyoxylate reductase,accession number AF134895,Smith-Waterman Score=553.
tttcgtggtccgggtcggcggctgcactgcggatgagaccggtgcgactcatgaaggtgttcgtcacccgcaggatacccgccgagggggccaatctcaaagtcatcagcaccatgtctgtgggcatcgaccacttggctttggatgaaatcaagaagcgtgggatccgagttggctacaccccagatgtcctgacagataccaccgccgaactcgcagtctccctgctacttaccacctgccgccggttgccggaggccatcgaggaagtgaagaatggtggctggacctcgtggaagcccctctggctgtgtggctatggactcacgcagagcactgtcggcatcatcgggctggggcgcataggccaggccattgctcggcgtctgaaaccattcggtgt

SEQ ID NO: 3979 - DNA, 414 bp, Homo sapiens
cggacgcgtgggcggacgcgtgggcggacgcgtgggcagctacagcgagggcctcggccatccaagggtctcccaggtgaccttccctccaccccaaagccagtcctgtgtcaccaatcaaaggaaaggaagccgtcagcagagatgaacagaataaccaccaaggaagccacttcctcctgccccccaaaatcccctcttggagagacccgccagaaactctggaggagcctcaaaatgctccccgagagaggccagagggtccggcagcagctaaaaagccacctcgccactgtgaacttgtcgtcactcttggatgtccggagatccacggtgatctcaggccctgggaccggaaaaggcagccaagatcactcaggggatcccacctcggaggacagaggctacacggat

SEQ ID NO: 3980 - DNA, 510 bp, Homo sapiens
gcctccccaaagccagtcctgtgtcaccaatcaaaggaaaggaagccgtcagcagagatgaacagaataaccaccaaggaagccacttcctcctgccccccaaaatcccctcttggagagacccgccagaaactctggaggagcctcaaaatgctccccgagagaggccagagggtccggcagcagctaaaaaagccacctcgccactgtgaacttgtcgtcactcttggatgtccggagatccacggtgatctcaggccctgggaccggaaaaggcagccaagatcactcaggggatcccacctcgggggacagaggctacacggatccctgtgtggccacatctctcaaaagcccctcacagccccaggcaccaaaagacagaaaggtccccaccaggaaggccgagaggagtccaagccagagcaccagggcttggcagagcctgagaacgaccagctcccggaggagtaccaacaaccgccaccctttgcccctgggtactgctag

SEQ ID NO: 3981 - DNA, 966 bp, Homo sapiens
  SIMILAR (953)..(831): 971254mologous to Mus musculus putative,accession number AK008285,Smith-Waterman Score=216.
ttagactcctgaactgcatgctctaactctggaggactggtatccagccctggctttgatctctggctccttcaggttaagaacctgctctgctagaggggccaagctgctcccagacagctggtcacaacactccaatgggtggtgccaggcaaagcacttcatagggtagtggcagcaggatctgttcttgtttgcatgtgccagcggcagcacagcggggtgcacgcttatcggctgtgacagagtgctagtggatgtcagggagccagcctctgggagggcatttgtagcagcagcagtagtggcagtatggctggggtgggtgcaggggccacgctggcaactgtgcacctgttcattggtgccgatgatggggttagcatgggggcactggtgggtgcaggactgtgtgtgccctttgtgcatgttcacacgggacagaatgaaggaatcgcattcacgttgaaagtcttctgtccccatgcacaaagaagggtatgtctgtgcacttttgaggactttcagagatattggccattggcttttgtcctcatcaggttcaaagaggaccacttggaaaggttttacaaagcgctggctgcccagctgcccgggccatttaccaggcttgtccataggagacagagcctccacgcagttcccaaatgcatccatgctgttccatgcagtttcacactgttccatcttccacaggaaggtctgcaaagacctgaattccttgcaccctggggtctccatttgaaggcaaccccagtgtggccttttgcgaaccctcgatgctgctccatactgggggcaggcggctacttcgtccagctgactttgggaatgtcgtaatgctccgtgagtgtgtccaggtgtctgttgaagtcctccactctctgcttgtgggttttggatgccttctttaggatcctttccatttgcttccactggctccat

SEQ ID NO: 3982 - DNA, 467 bp, Homo sapiens
tcggcgagggcctcggccatccaagggtctcccatgtgaccttccctccaccccaggattttatgacagaggccgggaagctgcccctaccgctacccccacggctggactggtttgtgcacacccagatgggccagctggcccaagacggggtccccgagtggttccatggtgcaatctcaagagaggatgctgagaacttgctggagtcacagccactgggatcctttctcatcagggtcagtcacagccatgtgggctacacactctcctacaagtaaggcctgggccgggatccagggcaggggcaggtgggctcttgggtttccttggagggggcaaggggtgcttcatgtcatagcttctcaaaaagcagcagtaactgaggctgtggatctgagaacgggagctgctagccaagcaatgagtgaagcttttagccgtagtggcatgttttatctgaggcg

SEQ ID NO: 3983 - DNA, 630 bp, Homo sapiens
cccgccagaaactctggaggagcctcaaaatgctccccgagagaggccagagggtccggcagcagctaaaaagccacctcgccactgtgaacttgtcgtcactcttggatgtccggagatccacggtgatctcaggccctgggaccggaaaaggcagccaagatcactcaggggatcccacctcgggggacagaggctacacggatccctgtgtggccacatctctcaaaagcccctcacagccccaggcaccaaaagacagaaaggtccccaccaggaaggccgagaggtcggtcagctgcattgaggtgaccccaggggacaggagttggcaccaaatggtagtgagagccctatcctcccaggagtccaagccagagcaccagggcttggcagagcctgagaacgaccagctcccggaggagtaccaacaaccgccaccctttgcccctgggtactgctagagaacaggtccaccctggctctgggactcgctgccaggggctgccacactcctgaatgccttaacatttcttccatggccccacaccatggcatccgggggtcttcgggaacccgggaaatggaataaagatgtttttggggtctgaaaaaaaaaaaaaaaaaaaa

SEQ ID NO: 3984 - DNA, 2115 bp, Homo sapiens
  SIMILAR (1438)..(1779): 501254mologous to Mus musculus putative,accession number AK005347,Smith-Waterman Score=292.
atggagccagtggaagcaaatggaaaggatcctaaagaaggcatccaaaacccacaagcagagagtggaggacttcaacagacacctggacacactcacggagcattacgacattcccaaagtcagctggacgaagtagccgcctgcccccagtatggagcagcatcgagggttcgcaaaaggccacactggggttggctcacctgcttgaggaaacaggaactgcctcggggcagccagccccgccccattgacgtgcagaccttgaatcgaaacccaggctcctgcaggcactggcacagctacagcgagggcctcggccatccaagggtctcccaggtatgtgacccaagagcctcagccctcgaggagacagaacggtccagagcagtactgctctgggactgggatctggggatgcaaggctctgccagccgtgaccaccagggggcatccacgggtcagaaaccacggcttggagacccacccggccaggccacagagagaggcctccccaaagccagtcctgtgtcaccaatcaaaggaaaggaagccgtcagcagagatgaacagaataaccaccaaggaagccacttcctcctgccccccaaaatcccctcttggagagacccgccagaaactctggaggagcctcaaaatgctccccgagagaggccagagggtccggcagcagctaaaaaagccacctcgccacctgtgaacattgtcgtcactcttggatgtccggagatccacggtgatctcaggccctgggaccggaaaaggcagccaagatcactcaggggatcccacctcgggggacagaggctacacggatccctgtgtggccacatctctcaaaagcccctcacagccccaggcaccaaaagacagaaaggtccccaccaggaaggccgagaggaagctatgacagaggccgggaagctgcccctaccgctacccccacggctggactggtttgtgcacacccagatgggccagctggcccaagacggggtccccgagtggttccatggtgcaatctcaagagaggatgctgagaacttgctggagtcacagccactgggatcctttctcatcagggtcagtcacagccatgtgggctacacactctcctacaaagcccaaagcagctgctgccatttcatggtgaagctcttggatgatgggactttcatgatccccggggagaaggtggcccacacctcgctggacgccctggtcaccttccaccagcagaagccaattgagccgcgcagggagctgctgacacagccctgcaggcaggctgagggcggggaccacaagaaggatcccgcaaacgtggattacgaggatctcttcctctactccaacgcagtggccgaggaagctgcctgcccggtgtctgcccctgaggagctttttcctccccacatcaggctcttctatcgctaccaggacctggccccacagctcgtgcccctcgactataccacctgccccgatgtgaaggtgccctacgagctcattggcagcatgcccgagctgaaggacaaccccttccgccagaggattgcccaggtattctctgaggatggggatggccacatgaccctggacaactttttggacatgttttccgtgatgagtgaaatggctccccgcgacctcaaggcttactatgcttttaaaatttatggccttcaaatggagaccccagggtgcaaggaattcaggtctttgcagaccttcctgtggaagatggaacagtgtgaaactgcatggaacagcatggatgcatttgggaactgcgtggaggctctgtctcctctcccccaactccctgatggcggcccccaggaacaatcctcaaactgcaccagctctttcagctctcaccttccttatctgtacatcagccgtggtgacaatatggacaagcctggtaaatggcccgggcagctgggcagccagcgctttgtaaaacctttccaagtggtcctctttgaacctgatgaggacaaaagccaatggccaatcatctctgaaagtcctcaaaagtgcacagacatacccttctttgtgcatggggacagaagactttcaacgtga

SEQ ID NO: 3985 - DNA, 1582 bp, Homo sapiens
  SIMILAR (20)..(82): 951254mologous to Homo sapiens CGI-144 protein,accession number AF151902,Smith-Waterman Score=94.
  misc_feature (1)...(1582): n = a,t,c or g
tgcagtgtcgtggaattccgagcaggtccaaaagggacccctgaagctgaaaggcgtcgcatagctgggagtgaccaagcggtgaggcccgagggcccgcgggattccgtcttcatcccccttagaccttttctcgggacccctggccctgatcctccgacccgccgcctcctcatgtctttttccaggaagaagaaaaagaaggacaaagacaaagcgaaacatcctggaagcaatgggagcgagcaaaaagaacgaggaggagaagcggtgcggccntggacaagcggaccccggcccaggcggacttcgagaaaatgcaggagaagcggcaaatggaaaggatcctaatgaaggctatccaaaacccacaagcagagagtggaggacttcaacagacacctgggcacacttcacggagcattaccgacattcccaaagtcaacttggacgaagtagccgcctgcccccagtatggagcagcatcgaagggttcgcaaaaaggggcacactgggggttgtgtgtggtttcctttgggtatattctggaaaacatggcttacaccacacccttgcatcttcttgctacagactgcttttccgaagctgtgttaccctcattctggaacttgattaaagtaagatcgtccttgtactcagtttaggcttcttggcaacatacagaagatacacccttttcgtttggatgggaaagtttcttaagtttatccagaggtaaagcccattgtgtgtctgtgtcatgttaaaaatgttttcacccgagttgcatgttaacgctctgagggccagccagctgtcttctcctggatgagacagactccagagggtaaggagctagcgccatggtggcctgcagtatgcagagccccgcaggacccagcgtgggcgcccttccaagcttcctctagctttgggcctatgctgtcccctgcaggccctagggaagccacttgcaactatgcggccttcagacttcctcctcagccacctggccactgagacagcatagcctgggtaacggaacagccacctaaggcaagaatggaacggacacaccttgctcctttctgagcccgtttcccaaaaccccccttccaggtgcttctaatgggtgttgccatagcagacgctgctaatgcatcacagcattctttgaaatggaaccagacacagcctgcctctcaatcctcagctgggggctcctagcagcctcttgtatttactcagagttgacacatcacacagatcctgtttggcattcctaccttacggacgtctcaggggtgacaggaccagggcagagccccggtacaaacagacaaggctgcagtcaaatgggagggtccaggtgtccgtgttggagggctgggatcttgtagggcctgtgcgtcctggctgaggatcaaaccacatatgttattgggagaaacgatttctgttgacgtagatattgaaagaataatgaaggcagaagagaaaaacgaagtgtggaatttggggttgtcctgtgtaaattacacaataaagcaaaagtcagttattgtaaaaaaaaaaaaaaaaa

SEQ ID NO: 3986 - DNA, 1641 bp, Homo sapiens
  SIMILAR (628)..(843): 661254mologous to Homo sapiens Human PRO831 (UNQ471) amino acid sequence SEQ ID NO:22,accession number AAY99346,Smith-Waterman Score=210.
cctgttgtggggctgaagctgctcccacctccctgacctacccctgctgcaccattcccccaactgggctggaaggttccataactggccagctgcccccataactggcagcattcccagacccagggtactctaataggggcggctcaggcactgagactaccgctcaaccccagggtggttttcaggagtccgaggtagccttcaatcactggactccatggccttcccttcgtgttgaccggaccttccttccagggcttttcctttgggggaggcggagaggggagaagaaggaagggaagggcagaaggaaggagggaagaaaagaaagcaaaggaacagaaggaaggaaagaaagatgggaggaagtgcagcaggaatagcaccctctccccgggaggccctagcttccgtgaggggccatcaccagccattccttggagggggctgtctccgcttttgcttgagcagggttcccaggagggagaaagagaagacaagagcctgatgcccaactttgtgtgtgtggggacgggggagtcagggccccccaagtcccacaatagccccaatgtttgcctatccacctcccccaagcccctttacctatgcctgctgctaacgctgctgctaacgctggctgctgctgctgcctgctttaaaggctccatgcttggagtggggaactggtcgggtgcccagaaagtctcttcgtgccactgacgcccccatcagggatttgggccgttctttcccccttcctttctgtgtctcctgcctcatcggcctgccatgacctgcagccaagcccagccccgtggggaaggggagaaaagtggggggatggctaagaaagcttgggagattaggggaccagaagagggtagtgggtgggctaggggggctgccttatttaaagttggtttgtttatgattcttatactaatttatacaaagatattaaggccctgttcattaagaaattgttcccttcccctgtgttcaatgtttgtaaagattgttctgtgtaaatatgtctttataataaacagttaaaagctgacagttcgcccttactcttggaggtccatgttccaggagggggcaattccttttcccccctggggggtccatggggtgtcccccatgcccccacatattggcacgtgccaggggaggtaaagtgcctgcatcccaaaatcggttctaggtcaactggcctcaaactgatttgccatgagctcacaaaatgaatccctatgcttaatgacccaggtcacataaaatccagcccacttacaggttttctggcatctgtttgggtgtcctaatttttttggcagtgtcattggaagaattttttttaaagcagtttattttaagaacatactgattaaatgcaggatcgctactaaaaaattgttttgtatccttggtgggtgtcctctggctattttatctacttttgaacactttcaggactttttagccagttttgcctttcttgaaaaatgttaatgttttcagcaataaatacattttgataatgactttgtttgtatcattttatgtttcacaaagtagagttgcttgatgaatgagatagcctgaaaaataaaatgcaaagagttcaatata

SEQ ID NO: 3987 - DNA, 497 bp, Homo sapiens
  SIMILAR (2)..(298): 971254mologous to Homo sapiens glyoxylate reductase,accession number AF134895,Smith-Waterman Score=504.
ggatgctgcaggggccaatctcaaagtcatcagcaccatgtctgtgggcatcgaccacttggctttggatgaaatcaataagcgtgggatccgagttggctacaccccagatgtcctgacagataccaccgccgaactcgcagtctccctgctacttaccacctgccgccggttgccggaggccatcgaggaagtgaagaatggtggctggacctcgtggaagcccctctggctgtgtggctatggactcacgcagagcactgtcggcatcatcgggctggggcgcataggtgaggctcccaccggcccgcttgcccgccccggctctcacagcgtggtttgcatccctggcaccacgtgtctgaaggctgagaagacccacatgctgtcagggcactttgcttgcagtagagatatctctaatgagggatacagctttgtaaaacacaggcaaatacataaataaaccaaagcagccttccttaagaactcaaaaa

SEQ ID NO: 3988 - DNA, 410 bp, Homo sapiens
  misc_feature (1)...(410): n = a,t,c or g
cannnnnnnnnnnnnnnnnnnnnnnnnnnnnnnnnnnnnnnnnnnnnnnnnnnnnnnnnnnnnnnnnnnnnnnnnnnnnnnnnnnnnnnnnnnnnnnnnnnnnnnnnnnnnnnnnnnnnnnnnnnnnnnnnnnnnnnnnnnnnnnnnnnnnnnnnnnnnnnnnnnnnnnataatctcattccacatagccttatagatcctgtaaatagggggggtcacaaaagtaatatattgtgttatggaagataattttgtactgtgctgtttcctaaatcataccaatatcctaaagtcatgcacttcccagatgatcgtgatcctccaaatgctttgtaagatggggcagggcgtggaaatatatatatnnnnnnnnnnnnnnnnnnnnnnnnnnnnnnnnnnnnntagtattt

SEQ ID NO: 3989 - DNA, 757 bp, Homo sapiens
ttttttttttttccaatgcaacttgcaccaaagctttatttgctatttttcatagtctgaatgcaacatctttgtacatgcaaaggtcatcttgttttattgcagtcgaccagatttccaactgctcttctgtgcctatggaaactttctttacagttacaaaatataaaagcacttgtaggacgtccaatactctgtgagggtctggtaagcccccatttgttttttaacattaaaaaataataagtttttcctagaatgacttcctcaagtcacacgggttaggaggattctttctggggactgggataaaggtgcctctcggtctgcccttccggttcaggaactcctaggaggcttgtggaattccctaaggggcaattggcaagggaacaccgcaggcagggaaggctttaactttccctacacaaaggaactcgaggctcccttttctatcgtggactcaaggatctgaggggagggaccccggaggaaagggttaggggaaaatatatacctatacttgtgtgtgtgtgtgtctctgtgtgtgtgtgtgtatatatatatatttccacgccctgccccgtcttacaaagcagtgtggaggatcacgatcatctgggaagtgcatgactttaggatattggtatgatttaggaaacagcacagtacaaaattatcttccataacacaatatattacttttgtgacccccccctatttacaggatctataaggctatgtggaatgagattat

SEQ ID NO: 3990 - DNA, 589 bp, Homo sapiens
ctacgaagttccggtccaggtctctgacttcgggcttgttcgctggtggcgtcggagccgagccggactggtcaggtcagaggcacgcaggggccgttccacgggcccagccccgccgtggccgtggccgtggctggcgtgcagctcgcccatcttcgcccaaacatgctgggcgtgtcgctccttcttgccttgtcggttctcttatcactacgtggcccgtcaaccatcccaaagaagcaggaaatgaaagtggcgctttctccgccccaggtctttccccctcttttctagggttccagggacatagtctcgaggcaagatggagggtatgaggggccttcaacacttcactttcatccctttctacccatcacaacgatacaaaagcaactacaccctggatttttccaaacaactttttatttcctcaagaagtcttccttaaatccctatgggaacaaagaaagcctgccactagaatcgagggcccagtatacgggggcttgcaaattctcacacctccccccaatataaaaatatagacttttttttgtggtcccaaaaaaaaaaaaaaaaaaaagtcgac

SEQ ID NO: 3991 - DNA, 534 bp, Homo sapiens
  misc_feature (1)...(534): n = a,t,c or g
ccttggactgggaattccnttgccagctttcaagggacatattcatctgaccacagggagaagctgacatctgtcatattcttctgcctcacgtacacacacacacacacacacacgcatacgcactcttaggctttcaagaaggaagtgatgtggcagagtgaccgctggcacgtgtcgccactccactgaaggatccactgaagaatgagcttgcacaaagggccgtaagtcatggctgccaacaattgccccatggcccaacttatatgacctctattcttggctgaccacaagccctgcccacgggcgagtatccatggtgctgattcttccagttgtcccaaaacaaattttcaatgaattctgatggccccaaggcttcccttgttggccaagtcactgataaggttccacttgcctcaaccagcctatagctcttggacagggggagacagagtcagacgcaacacctgtcctgtgtcccagacagtgggggagggaggacacctggggcctcagtgctcacccgtg

SEQ ID NO: 3992 - DNA, 1364 bp, Homo sapiens
  SIMILAR (1157)..(1321): 1001254mologous to Homo sapiens Human ORFX ORF2549 polypeptide sequence SEQ ID NO:5098,accession number AAB42785,Smith -Waterman Score=297.
tataaccccctttgcttttccccacaaacgtgtttaactagcgccaaatttggcccatttttggaacaccccccctcccgagcccccttcaaaaggacaaggcctagtgattcgtccgcacacaaacccgtacgctaaggcgcatccatcaggcactgtcaggcatcgcggctctcgattacagtgcgaaggattctcagcatagtggtacgcaagtttccagtacgcgtgaaacgcgccagtgcagctaaattaccctactaagggataagttgcgccgttaataaatcttttttttttttttttttaacacttatgcatttattttcatgtgtaagaagaaaaacgtaactagcacgtgaacatgactgcatggatacacggctcagcacgaggctaaagtcagaagtgagtgaaaacaaaatagcatgttgatttaagtgaaataacagaacaggaggcctttggttataacaattgtggaggtggtctgtgaatgcagaagttcgggactccctgctctatgctccaggacaagacgctgtggtctggggccgaagccccttgggggttctacaagagaagcctgccccaagtgcacgggcccctggtggcattctcgtggggagcgtgtgagacccccagggaggggaaagcacattctggtttaacttgtcccgtgccgtacaaaaatgttcttagaagttgataaaagcaaacaatgattgattcttcctttcaaagggaagaagaatcttccagggtgtggtcttgaggacgcagaggttacaacaacatggctgggcttgcagggcccaagtaggacttgaggtcataaccagaggacttgaagggacaccgtgtccttggcaccatacttggagaagtgcttgtttggtgtaagggggagagggggtgcatggcccaaagtcaaggctgaagggaggaacgcttggcccctgcaccctgttcccagcataataccaggctctcaccccatgcctgctgaactcaaacacaagacccgggaggtgcccgccagaaaggcaaggtcgggggatgctgaacatcccggggtgtctgcggaccaccctctcctcttgggtcctggccctggccccactttgcaccacacattcccagggcggggaagtccatggctgtgccccaactgggtcccattcctgtacatgtgcgaaccaagggggtgtttgctattatgctccccactaaatccaaagaatgttggttcccatcatttcaacctcaacattttcaaaaagcacttttttttttggagacagagtctcgctgtgtctcccacactcctgaccccaggctccctatcctctcctcgtgccacc

SEQ ID NO: 3993 - DNA, 900 bp, Homo sapiens
atgtgtctgtctttggacccatgcaagcttctatctcctgtgaagatagtggcctacatcgatcggtgtgtgtgtgctggtaggagctcctctcagtctcccgtgatagcccgcaagggcaagtgtttggtcagccccaaagggttctctgttgtgaaggtggctgctctgagcagaaggttgctgccagtcctacccacagccaggaagagtgagaaaggctcagaaacagcccccaacaggcttccaggctgccatgctgcattggcggggaggaaaactggatgtggcatcctaagtcctggcccagtttctgctttaccacttcctagccatccatttttctcctcaccctctgttccccatgaggcagccagtgagagcttcataaacatgtcagatcctgtaattcaggggtctctaagccccggggtcacagtccagggccagttaggaacctggccgcacaagcaggaggaatacacacttgtggtatatattattgatggtgtagattttgtcactagtaactccagcagaagagttgtgatagagacgtattttaaagaattggctcgtgggattgtggggcctggaaatctgaaatctgcagagaaagcagcagctgaaattcagaccttggcgctgagagcgctgcttttgcgggtcggtggacggagagttccatgtaacaatctggaaggaaacttcacggacaggaagactgctggagaagagaagcgtgttagcccatttgagctgatgtctacacataccagcatcatccaccgatcagcacacgggccacatctagacccctacaaccgccacacatacctctataacaggccctatgcaaccaactaccccagcaacatcaccccccaagatcactcctaa

SEQ ID NO: 3994 - DNA, 3826 bp, Homo sapiens
  SIMILAR (488)..(2581): 991254mologous to Homo sapiens EXT2,accession number U62740,Smith-Waterman Score=3691.
  misc_feature (1)...(3826): n = a,t,c or g
ctgtctgagcatttcactgcggagcctgagcgcgcctgcctgggaaaacactgcagcggtgctcggactcctcctgtccagcaggaggcgcggcccggcagctcccgcatgcgcagtgcgctcggtgtcagacggcccggatcccggttaccggcccctcgctcgctgctcgccagcccagactcggccctggcagtggcggctggcgattcggaccgatccgacctgggcggaggtggcccgcgccccgcggcatgagccggtgaccaagctcggggccgagcgggaggcagccgtggccgagccacagggatctgattcctcccagggggatgtcctgcgcctcagggtccggtggtggcctgcggcatcccttgcggtgccagaagccgtgggacgagtgtctttaatgttatagagctactcagagttgctgtttctccttgagatgcttttggagtgtgaggaagaggctgtctgtgtcattatgtgtgcgtcggtcaagtataatatccggggtcctgccctcatcccaagaatgaagaccaagcaccgaatctactatatcaccctcttctccattgtcctcctgggcctcattgccactggcatgtttcagttttggccccattctatcgagtcctcaaatgactggaatgtagagaagcgcagcatccgtgatgtgccggttgttaggctgccagccgacagtcccatcccagagcggggggatctcagttgcagaatgcacacgtgttttgatgtctatcgctgtggcttcaacccaaagaacaaaatcaaggtgtatatctatgctctgaaaaagtacgtggatgactttggcgtctctgtcagcaacaccatctcccgggagtataatgaactgctcatggccatctcagacagtgactactacactgatgacatcaaccgggcctgtctgtttgttccctccatcgatgtgcttaaccagaacacactgcgcatcaaggagacagcacaagcgatggcccagctctctaggtgggatcgaggtacgaatcacctgttgttcaacatgttgcctggaggtcccccagattataacacagccctggatgtccccagagacagggccctgttggctggtggcggcttttctacgtggacttaccggcaaggctacgatgtcagcattcctgtctatagtccactgtcagctgaggtggatcttccagagaaaggaccaggtccacggcaatacttcctcctgtcatctcaggtgggtctccatcctgagtacagagaggacctagaagccctccaggtcaaacatggagagtcagtgttagtactcgataaatgcaccaacctctcagagggtgtcctttctgtccgtaagcgctgccacaagcaccaggtcttcgattacccacaggtgctacaggaggctactttctgtgtggttcttcgtggagctcggctgggccaggcagtattgagcgatgtgttacaagctggctgtgtcccggttgtcattgcagactcctatattttgcctttctctgaagttcttgactggaagagagcatctgtggttgtaccagaagaaaagatgtcagatgtgtacagtattttgcagagcatcccccaaagacagattgaagaaatgcagagacaggcccggtggttctgggaagcgtacttccagtcaattaaagccattgccctggccaccctgcagattatcaatgaccggatctatccatatgctgccatctcctatgaagaatggaatgaccctcctgctgtgaagtggggcagcgtgagcaatccactcttcctcccgctgatcccaccacagtctcaagggttcaccgccatagtcctcacctacgaccgagtagagagcctcttccgggtcatcactgaagtgtccaaggtgcccagtctatccaaactacttgtcgtctggaataatcagaataaaaaccctccagaagattctctctggcccaaaatccgggttccattaaaagttgtgaggactgctgaaaacaagttaagtaaccgtttcttcccttatgatgaaatcgagacagaagctgttctggccattgatgatgatatcattatgctgacctctgacgagctgcaatttggttatgaggtctggcgggaatttcctgaccggttggtgggttacccgggtcgtctgcatctctgggaccatgagatgaataagtggaagtatgagtctgagtggacgaatgaagtgtccatggtgctcactggggcagctttttatcacaagtattttaattacctgtatacctacaaaatgcctggggatatcaagaactgggtagatgctcatatgaactgtgaagatattgccatgaacttcctggtggccaacgtcacgggaaaagcagttatcaaggtaaccccacgaaagaaattcaagtgtcctgagtgcacagccatagatgggctttcactagaccaaacacacatggtggagaggtcagagtgcatcaacaagtttgcttcagtcttcgggaccatgcctctcaaggtgtgggaacaccgagcctgaccctgtcctgtacaaagatgactttcctgagaagctgaagagcttccccaacattggcagcttatgaaacgtgtcattggtggaggtctgaatgtgaggctgggacagagggagagaacaaggcctcccagcactctgatgtcagaattangtaggtttaaggttggaaaggttgaccctacttggatcttggcatgcaccccacttaaccccactttctcaagaaccaagaacctagaatgaatatcccaagcacctcgagctatgcaacctctgttcttgtatttcttatgatctctgatgggttcttctcgaaaaatgcccaagtggaagactttgtgggccatgcctccagatttaaatcccagctgaggcctcccctttgttttccagttccccatgtaacaatctgggaagggaaactttcacgggacaaggaagacttgctggaggaagagaagcggtgttagccccatttgaggtctggggaatcatgtaaagggtacccagacctcacttttagttatttacatcaatgagttctttcagggaaccaaacccagaattcgggtgcaaaagccaaacatccttggtgggattttgataaatgccttgggacctgggagtgctgggcttgttgcacagggaaggagcaccagccgctggagtcaggatcctgttcagttccatggagcttatttcctcttttggtttggcttttttgatatgattaaaattattttttattcctttttctactgtgtcttaaacaccaattcctgatagtccaaggaaccacctttctcccttgatatatttaactccgtctttggcctgacaacagtcttctgcccatgtctgggaacacacgccaggaggaatgtctgataccctctgcatcaagcgtaagaaggtcccaaatcataaccattttaagaacagatgactcagaaacctccagaggaatctgtttgcttcctgattagatccagtcaatgttttaaaggtattgtcagagaaaaacagagggtctgtactagccatgcaaggagtcgctctagctggtacccgtaaaagttgtgggaattgtgaccccccatcccaaggggatgccaaaatttctctcattcttttggtataaacttaacattagccagggaggttctggctaacgttaaatgctgctatacaactgctttgcaacagttgctggtatatttaaatcattaaatttcagcatttactaat

SEQ ID NO: 3995 - DNA, 812 bp, Homo sapiens
ttttttttttttttggtaaaataatgttttattccatggatgaacagacgctaccatgccacatccccacttccctccgaccagatgtcgtggccagagctggcttccccttccaaacctagctggctttgtagtcgttcaggcccattgaaatagcaaacgcacagtcatgtagcactcggatcggtcctgtttatcagcacgttggtcctttcacaaatgggggtgaatcacctttaaaacacccagtgatggagaccttccaatcaccctaactactaacggacgttcagagctcatgtgggataaacccaaagccccaaacgccaaaatgcaacagggacgcatctcctctgctgatggggatgccaagggacacccccgcagggctgggagctcggagaagtcagtcctgacattcagcttgtccacaagctcaaaaggaaatgacggtaatggatatatttcaaactagcacttctagagtccagatcggccacagtgtcagcatgcaggctcaacacggggttagcactggcgggaggaggctgggttgactgcacagaggcctgacacacattgcttcctttatatacaagagaatgaaatatacactgggaacaccggctgcacatttggtgggggtgtatcttacaaggctaacgtagcacatcatcaacctcctgctcgtggcaggaaggtcacggagccacccccacgatgggagagggatgcgcgcaggcccacagaaccctcaggactcccgtggcccgagcacacacagcgggcctgtgggtggagttgacgctttg

SEQ ID NO: 3996 - DNA, 1738 bp, Homo sapiens
  SIMILAR (1551)..(1399): 1001254mologous to Homo sapiens Human secreted protein encoded by gene 62 clone HHFGL41,accession number AAW75118,Smith- Waterman Score=279.
tttcaagttcattacgtttaatttttttccaaaaaagttttgcattgacagctgtacaatactttggtgttaacctgtggtcttccttcacctcagtgaactctgccctgcccatctgtccagaggaagtcttagctcctaccccccaccctccctggcgcttggatgggaggcgacacagtatgggattgtgaaatccctgctgcgatgctgggtatctggaaggggagaagggggtggaagcagcgcagggaatgctgtgagatgagaagagctcacatcgatgggaaatggccctggcccaggctccagaatgtgacagcaacagtggcctggctgtttttcccggggggcgggggggcgggactggcaaactgggaggagaggcaattaagacgcaacaatcaaaccaacctttaaatagtaacttttaaaaatataaaaacagttcaggtacaatgacttttcattcttttttttcttcgggaataactttcttctaccctcaccctcccttctggctagagccttaacaagaggtggcagatggacatctgagacccagagagactctggacgccccacgcgcccagccttggagaggcacagggtgtgtcgccagcctccacatcccatgcccggtgcgctcagctggggagcaacctcactgaaggtgggtggctttccctggagcccctcccacctcctcagcagacggaatcacacattacaaaataatccataaaaatgcaagtataaaacatttatcttcgatatgctacatccaatggagagcctgccaccagggactcacagcggcctttagcttttctttaaaaggagaaaaaaaaaaaggaccaaaaggaaaaaaaaaacaaacaaaaaaaacccaacccaaatcctaacacctcagaacatgttggtaccaaaaggtggcacctgccagaggcgatagtctacctaacctgtttgggccacaagagactgcaatctgcaagaaatatccacagtgtgccaggatctgtgtccccctctcccaccccccaacccccactgctctgcccagggtgggggtgagggggatcctcttttcagactcacaaccctgtaggtttatacactttcccccctctaaggggagaggaagagactgtaggcgggaagggggagaaggcattttataaaaggacatcacttctaattctttttattcaaattaaaaaaaaaaaaaaaaggcccccacatcagttgctttttttctttggtagctccctgagctgagttgctatgctggcttctaactttttggcctttttaggctgggtcccaagattcaaaaaagctggagagggggttcctttgaacttccattgctcacaacaataactaagggggcccccaaagagaaagaccaggctgaggaggagagagggagagaccaagaaagagagacacagagagggcaagaggcagccagagtgcaagagaccacagaaagctccatttctgcgggtgtccgcctggacgggcccccatctcagtgccttccatccctcagtctggccggctggttatcagtccggatgcccagacccgtgtggaggcacacgcattccagcaggcaccttacggccaacctggttgccttttccacactctaagacttttctcctctttcttcaattggttcccctccctgtctcctcttcccaggtgagagcccgggaattccggaccg

SEQ ID NO: 3997 - DNA, 426 bp, Homo sapiens
  SIMILAR (265)..(306): 851254mologous to Homo sapiens putative 2-hydroxyacid dehydrogenase,accession number AF113251,Smith-Waterman Score=64.
attctttctgtttcagatgaggaaattcagaaaggttaagttacttgttcagtccctgaaccctgatcttccatcttcatatccttccaaagtgggagataatctaaataggaatgaggactgcccgtttttgagtgctcatttatagttctgagcttcctggcaggcagatcaaagagggagcaaagtaactccatggaaatgtcccagcagtagacattggtaaatatggttgaggctgatgttaccaccagatgtttgattcgtagtgggatccgagttggctacaccccagatgtcctgacagataccaccgccgaactcgcagtctccctgctacttaccacctgccgccggttgccggaggccatcgaggaagtgaagaagtaagtgaacgcagaccaggtgcggtggctcacggctgta

SEQ ID NO: 3998 - DNA, 984 bp, Homo sapiens
atgccggccacagtgagcttgtggtatttagcttgccctaatccatccccatatcctcagcttcaaggtagccttgaaaagcaaccaccttttacaacagtaacagtgaatatctgcaccctagcagaatatctgcacttgagagaggactttaccccacgccgtgtctgcctgtgtgaactcaagcctctgataagctctccatttctgccagggctgaggtgtctggaaatcggacagtttaagaggcctccgtcaccgcgtctcccggccgctgtgccttctgtacgtcacgtactcaaagaggccgcccccagagcggcgaggcgacgccggcgcggacgcgtctcctccgaggaaaagccggaaggccgcattccgctctccatggaaacgcggctgacgtctctggaggaattgctgacactggaggatgttactgtggagttcacctggaggagtggcagctcctgggcccttttcagaaggatttgtaccgggattgatgttggagatctacagcaacctgctatcaatgggttatcaagtcagcaaacagatgcactctccaagttggaacgaggagaagaaccatggacaatggagatgaaaggcacagtcgaatctgtccaggtatgtgagaagcagcaagatcactcttcatccctacagccaaaggacccgtcattaacgccccgttcctcagcgactgcgttcaaatacagccccaatcaggacgctccacgcccatcggtacacagacccacaggccgcgagtccatgcccagaactcgaccacccgagcccgaacctctccagacaccactggcagcgacaaaacgccgatccacgtccgaaaacgcttcctattcagacgcgctcctgcgcggactcgggaagctgagcggtaaagaccgtgaagcgaggcgaggaccacggagccgcccgggatcgcgagttcagactgcgggcgccgctctatga

SEQ ID NO: 3999 - DNA, 1664 bp, Homo sapiens
ggaatcgccgcgacctcttaaaagctgaacttacttccctaaacttcttccacttctgggcccctcgcccaactccctccccctctaaacctccagagacggtcagccgcgtttccatggagagcggaatgcggccttccggcttttcctcaggaggagacgcgtccgcgccggcgtcgcctcgccgctctgggggcggccatctttgagtacgtgacgtacagaaggcacagcggccgggagacgcggtggacggaggcctcttaaactgtccgatttccagacacctcagccctggcagaaaatggagagcttatcagaggcttgagttcacacaggcagacacggcgtgggggtaaagtcctctgaacagacacggaacagaaataagttagtcttctcctcgcaggggacagtgaacggcgcaaacttctcaaaggccagaacccattattaccacaaaggcgcggcatcccttcttagcggttatgatggctgtgacgtctcagctcaatggaaaattaaagtcacctctgggcacctcagttcactattgtaaatgcgaagttttttaggaagccgtataaaaaactgaagccagagagactagaacaaaaaaataagcgagcggtgcgttgcaggtaacggagccagagcccttaggggagagcatcatgggggcggccatcttaggggacgttcggtgtccgtacggcagaaccatattctctctgagaagcttgcggtggaactggcccatggaaatgtctttagaagagaagaaccacctggctctgttcttgactctggaaaagaatccttttctagaattatttaggttgttgccagattaatttcctttagagagtttcccttgccccccacgacttcctatctttaaagcccaacaatagtatgtgaaatccctttcatatttgaaaccactgactattgctgctgcatctctccggtttctcctattcttaagtgcttgggcaatccagaataatctcccaatgctaaagtcagctgattaattaaccttaattacaatgcagagtcctttttgccatgtaacataaccatgggaattactctggggttgtagatctggctatgatatgatgacactaatgaatattttgcaataaaaacatactattttaaaatatatatatacatatatctttatatatgtatatttctacagaattattacaagttatgtcttatgatggtttcttataagaagcaaggaggaaaaggtccttaacattttcaattgtgttttttttaataataaagcatgcattctaatttacaaaaaccacaataaaggtactttcatcatgtcagtcttgaggctgaacaacacttaacattctttttccttttacctgtctgccttctcccttcccctacactctctataccccaccctccaggctctctgttccatcatcttatgcgtatggcccctttcccctgtgccctcttattacttccatctatcacgcagacacacactgtcactcccctaaacactctagtgttaaacaattgctgctgattgttttttgacaagtgccctatggggtaggatgttcacataaataaagtcaagccaaatagagaaatactatgagaatagacctattcagcag

SEQ ID NO: 4000 - DNA, 424 bp, Homo sapiens
  misc_feature (1)...(424): n = a,t,c or g
ncntttacagaagcatgttttatttcaatcctgttaagggagagggatggaaaacacaaaataaggggaggggtctctttatataatacacacaccaggntcaactacaatgaataatacccattccatccctcccccaccaactcctatgtgggttccaaggccagctgagaatagatgggacaagaattaagacactttggcacagtaacatggccaatgcaccgaaagatggagagaagagantttcccagggagcaaggccctgggctncagctgcttccccagtggaggggtaatgagaaaactttgggctcagcaggaaggcagggggaagatcacagactacgggctgaatagagtcaagatgtctatccagtccattctgttctctgctttctctaagatcacttctcttcaggct

SEQ ID NO: 4001 - DNA, 1041 bp, Homo sapiens
atttttacaaaaacagaagcatgttttatttcaatcctgttaagggagagggatggaaaacacaaaataaggggaggggtctctttatataatacacacaccaggatcaactacaatgaataatacccattccatccctcccccaccaactcctatgtgggttccaaggccagctgagaatagatgggacaagaattaagacactttggcacagtaacatggccaatgcaccgaaagatggagagaagagaatttcccagggagcaaggccctgggcctcagctgcttccccagtggaggggtaatgagaaaactttggctcagcaggaaggcggttgtcaaaaatctgggttaccttaactggactctccgaaaacacaaaataaggggaggggtctctttatttaatacccccccccgggtccactccaaataaataatacccattccatccctcccccaccaactccctatgtgggtttccaaggccagctgaaaaatagatgggacaagaattaagacactttggcaccagtaaacatggcccaatgcacccgaaagatggagagaagagaatttccccaggggaggcaaggccctgggccctccagctgcttcccccagtggaaggggtaatggagaaaactttgggctcagcaggaaggcggtttgtcaaaaatctggggttacccttaactgggactctccagatcacagacttacggggctgaatagagtccagatggtctatccagttccattcctgttctctgctttctctaagatcacttctcttcaggcttgcaattattgagggttggcctgcttctcctcttcatcttggaaggcagggggagtaagtgcttattctgcccttcctatatctaggccacttaattactattttcttggctctaaagagacagaagccaactaacaagtccggctctctttgtgaaagtcggcttgaaagagcccttgtgttgcatccctctccattaacaggattgaaataaaacatgcttctgtttttgtaaaaaa

SEQ ID NO: 4002 - DNA, 1219 bp, Homo sapiens
  SIMILAR (1068)..(520): 581254mologous to Homo sapiens Human cell-cycle phosphoprotein CECYP-1,accession number AAY16600,Smith-Waterman Score=434.
ctttttaattatctttcatgcttaaaggcaaatgtattcagttccatttccatgcagcacacaataaggttatctatgtgccttatttcttttccaaatcaacagtttgggcacakkcctttcaggatccattcatcctccacggtcagccatcttgtaatgtggttctcataagtgtcttggcatgggggtaaaggaaccttcttgttgacctacagactgaccttcttgttgacctacagacctacagactggccaagtagggggtgtactgggaggagagctaaggactattgtcctcttctgccacccatgaagctcatgggtgccacattgacttgtaccagcagatgcttaggagaagccactcagattttgccatgggcaggggaagaagggcatggggagaaggagggagggaggggactcgatggtccccatggatggggagtttaggagggctggctgggctgggaaaaaacccagggaacaatggaacatggaggtcatcttccgttaggatgccatgccaaggcagaaaagcctccggaaaaatccccccagttacttagaacattcttcttcacaaaatgacaccacctccctgcagctttggctcctgacctcagtaggtaatctgattggctcttacggatcttcaagctgctctttgggctttcttcaatgtccttctcccactcgttgccagtcaaactttgatgtacccaagtatggtttgcaagctgaaggagaaaaaatccacctccccacaagctgttgcagccaactttccaaccttctggaatatgaaacctgtgcaaccatccagtgacacctcccaatgaacagcttgggttgccaacgctatactttttctgctgaaggtccagattcctgcccgaacagcttacgccaccatggctgcttcttagcaaattccgcaaggtccagtgactcaaaatttccctcaaagtttccttgactggacgcggccatttcggtgagcttgtctcgcgaggacacacgtagaggatctgcgcggtaggccgcggagtggcgcgcagttgtcagccaccacttggcttccggcacgtggggcagatgtttccattcccacggcggcagcggaagagggagggccgggcgcgccgcggctgcttgcagtctccgcaagcggctacctcacagagctcagcgtgcggtgtcacaggccccgcgg

SEQ ID NO: 4003 - DNA, 1152 bp, Homo sapiens
  SIMILAR (961)..(1119): 541254mologous to Mus musculus putative,accession number AK005190,Smith-Waterman Score=142.
atgggtagtgaggccggctgcctggtgcgggcagagaggtttcagttgatcgtagagagggacgtgagaagcagcttcccttcctggaaggagctgagcatgccaggcttcatccagaagcagcaggccagagtctatgtccagttctttctggctgatgccctgatcctgcctgtgcccagaccctgccttcattcagcaacaccctcaacacctcagacagatcccaccggcccagagggaccccacctaggacagagccggctcttcttgctctgccacaaggaggccctcatgaagcgtaatttttgtgtccccccaggagcaagtccagaggtgcccaagcccgccctcagtttctatgtgttggggagctggcttgggggcacccagaggaaggagggtactggatgggggctgcccgagccccagggaaatgacgacaatgatcagaaggttcacctcattttctttggctcttcagtccgctggtttgagttcttgcacccgggacaggtgtaccgactcatagctcctggccccgctacaccaatgttgtttgaaaaggatggttcatcctgcatatctcggcgtcctctggagttggctggctgtgcatcctgcctcactgtccaggacaactggactctggagcttgaaagctcccaggatatccaagatgtgctggatgcaaacaagtcattgcctgaatcctcactgaccgacctgctcagtgacaaatctcacaatgtttattgttgtttccggtcatccacttatgtgcaggtcctgagttttccccctgagaccaccatcagcattcccctgccccacatctacctggctgaacttctgcagggtggtcagtccccattccaggccactgcctcttgccatatcgtctctgtcttcagccttcagctcttctgggtgtgtgcttattgtaccagcatctgccggcagtcttcagccagggttgacgagcccatgaccatgttcctctggacactttgtactagcccctctgtcctccgtcctattgtgctttcttttgagctggaaaggaaaccgtcgaagatcgtcccattaggaactcctagtcgttcatcatcatttcagccctttgccgccagggccaaaggtggaaagtga

SEQ ID NO: 4004 - DNA, 728 bp, Homo sapiens
  SIMILAR (549)..(502): 681254mologous to Mus musculus putative,accession number AK005190,Smith-Waterman Score=55.
tttttttttatattggtgtagcagtttgtgaatctggagtccttggttcaatcacagaacaagtagggagaggagccaggacctaggccttcaggttttcagcaaggaaggactctcaggccatccttgcagttcagttaacaggaggaagcaaggatccccagagagctggagtactctgactctcggatagaaaggcaggacaatcggagcctggggttcacgtgagtcaagaaagggagctctccacactggaatcgctgtagccgaggaggttctaatgggacgatcttcgacggtttcctttccagctcaaaagaaagcacaataggacggaggacagaggggctagtacaaagtgtccagaggaacatggtcatgggctcgtcaaccctggctgaagactagaaagagaaggtcaaggttaactggctcctaaaccctttgccaaaagcccaggaatttgggtatccgagtccctccctcccagccacattacacctcaagttgggctccaggccctgcaaactgcaagaccactctgcctggcacttggacgaaatctaggagggaggcccactctataggacacagccctagtgctgctgccacatggtgattcatacaggtcaccacggcttcggcagtcccatcctccaccaggagcctatggggagcaggaggaaatactcgcgcctatagcagcccaggtcgactggtcctcaaac

SEQ ID NO: 4005 - DNA, 2385 bp, Homo sapiens
  SIMILAR (1795)..(1953): 541254mologous to Mus musculus putative,accession number AK005190,Smith-Waterman Score=142.
tttcgtcttcgcttcgacgatttcgtcccctctacctgtgggctaccaatgccctggaggagctggcctgcaagctgtgtccccatgtgctgagacaccaccagttcctgcaacattcctctcctgggagccccagcctgggactgcaactcctggctcctaccctggatcttctagctccgccaggcagccctgttcggaatgcacacaatgagatccttgaagagccacatcactgtcccctccagaaatacactcggctgcagactccctcctccttccccactctggccaccctgaaagaagaaggacagcgtaaggcctgggcctcctttgaccctaaggcccttctgcccctcccggaggcctcctacctgcccagctgccaactcaatcgccgcctggcttggtcctggctctgtctgctgccctctgccttctgcccagcccaggttttacttggggttctggtggcttcatctcataaaggttgtctgcaacttcgggaccaaagtggttccctgccctgcctgctgctggccaagcactctcaacccctcagtgacccacggctgataggctgcctggtgcgggcagagaggtttcagttgatcgtagagagggacgtgagaagcagcttcccttcctggaaggagctgagcatgccaggcttcatccagaagcagcaggccagagtctatgtccagttctttctggctgatgccctgatcctgcctgtgcccagaccctgccttcattcagcaacaccctcaacacctcagacagatcccaccggcccagagggaccccacctaggacagagccggctcttcttgctctgccacaaggaggccctcatgaagcgtaatttttgtgtccccccaggagcaagtccagaggtgcccaagcccgccctcagtttctatgtgttggggagctggcttgggggcacccagaggaaggagggtactggatgggggctgcccgagccccagggaaatgacgacaatgatcagaaggttcacctcattttctttggctcttcagtccgctggtttgagttcttgcacccgggacaggtgtaccgactcatagctcctggccccgctacaccaatgttgtttgaaaaggatggttcatcctgcatatctcggcgtcctctggagttggctggctgtgcatcctgcctcactgtccaggacaactggactctggagcttgaaagctcccaggatatccaagatgtgctggatgcaaacaagtcattgcctgaatcctcactgaccgacctgctcagtgacaatttcacagattccttggtgtctttctccgctgagattttgtcacggacactatgtgaaccccttgtggcgtctctctggatgaaactggggaacacgggggccatgagaaggtgtgtgaagctaacagtcgctcttgagactgctgaatgtgaattcccccctcacaaggatgtatatatagaagacccacacttgcctccctcactaggactacttccaggagcccgggtccacttcagccagttggagaaaagggtttccagatctcacaatgtttattgttgtttccggtcatccacttatgtgccgggccttgagttttccccctgagaccaccatcagcattcccctgccccacatctacctgggctgaacttctgcagggtggtcagtcccccattccagggccactgcctcttgccatatcggctctggtcttcaggcttcagctcttctggggtgtgttgcttattgtaccagcatctgccggcagtcttcagccagggttgacgagcccatgaccatgttcctctggacactttgtactagcccctctgtcctccgtcctattgtgctttcttttgagctggaaaggaaaccgtcgaagatcgtcccattaggaactcctagtcgttcatcatcatttcagccctttgccgccagggccaaaggtggaaagtgatttggaagagaagagcttttcgtccagcagaagaaatggtaccaaaatcagtctgtaaaggaagtaaattggggagttggcggcaaggcagagagcatagctatgatggtctcagtcagtaaggctgggccctgcaggaagtcaaatatgaatgcctagaggtgttcacaagcacaaagaaggtgtagggggaggcaagtgccaggcacaagcaggggcaggtgaggactctgggtgactgtgctatagggccccaggctacggttagccctgtaggtttcccaagggcctggcctaaggcagatccttgatcgatataccttgagaccagaaggtgctccgaaatcacaaccgtacaattaggggatctaggaacaattctttggagataccaatgaa

SEQ ID NO: 4006 - DNA, 1060 bp, Homo sapiens
  SIMILAR (104)..(1057): 681254mologous to Homo sapiens glyoxylate reductase,accession number AF134895,Smith-Waterman Score=964.
ggaaatccccgggccagcttctgtactgccaggtccgggtcggcggctgcactgcggatgtgttcggtgcgactcatgaaggtgttcgtcacccgcaggatacccgccgaggtgtagggtcgcgctcgcccgggcggcagactgtgaggtggagcagtgggactcggatgagcccatccctgccaaggagctagagcgaggtgtggcgggggcccacggcctgctctgcctcctctccgaccacgtggacaagaggatcctggatgctgcaggggccaatctcaaagtcatcagcaccatgtctgtgggcatcgaccacttggctttggatgaaatcaagaagcgtgggatccgagttggctacaccccagatgtcctgaccagataccaccgccgaactcgcagtctcccctgttcttaccaacctggcggccgttggccggaggccttctagggaagtgaagaatggtggctggacctcgtgggaagcccctctggctgtgtggctatggactcacgcagagcactgtcggcatcatcgggctggggcgcataggcccaggcccattgctcggcgtcttaaaaccattcggtgtccagagatttcttgtacacagggcgccagcccaggtcttgaggaagcagcaagaattccaggcagagtttgtgtctacccctgaagctggctgcccaatctgatttcatcgtcgtggcctgctccttaacacctgcaaccgagggactctgcaacaaggacttcttccagaagatgaaggaaacagctgtgttcatcaacatcagcaggggcgacgtcgtaaaccaggacgaccttgtaccaggccttggcaagtggtaagatttgcagctgctggactggatgtgacgagcccagaaccacttgcctacaaaccaccctctcctgaccctgaagaactgtgtgattctgccccacattggcagtgccacccacagaacccgcaacaccatgtccttgttggcagctaacaacttgctggctggcctgagaggggagccgatgcctagtgaactcaagctgtag

SEQ ID NO: 4007 - DNA, 1368 bp, Homo sapiens
  SIMILAR (5)..(361): 1001254mologous to Mus musculus putative,accession number AK013005,Smith-Waterman Score=646.
gtccgaggagagtgaggaagaagatgatgatggtctgcctaagaaaaagtggccaacggtagacgcctcttattatggtgggagaggcgttggaggcattaaaagaatggaggttcgttggggagaaaagggctccacagaagaaggtgctaagttggaaaaggcaaagaatgcaagagtcaagatgccggagcaggaatatgaattccctgagccgcgaaatctcaacaacaatatgcgtcggccttcttccccccggaagtggtactctccaatcaagggaaaactcgatgccttgtgggtcctactgaggaaaggatatgatcgtgtgtctgtgatgcgtccacagccaggagacacggggcgctgcatcaacttcaccagggtcaagaacaaccagccagccaagtacccactcaacaacggctaccacaactccacctcccaacagggcacctcctccctcccgccctcctccaaggccttctgtctagagcccaaagttcctgctctgggctctctcagaaacttcaggagatgttagaacaagtctttccagttagagaagaggagttgtgataaagcccactgaccttcacacattctaaaaattggttggcaatgccagtataccaacaatcatgatcagctgaaagaaacagatattttaaattgccagaaaacaaatgatgaggcaactacagtcagatttatagccagccatctatcacctctagaaggttccagagacagtgaaactgcaagatgctctcaacaggattatgtctcatggagaccagtaagaaaatcatttatctgaaggtgaaatgcagagttggataagaaatacattgctgggtttctaaaatgctgccttcctgcctctactccacctccatccctggactttggacccttggcctaggagcctaaggaccttcacccctgtgcaccacccaagaaagaggaaaactttgcctacaactttggaaatgctggggtccctggtgtggtaagaaactcaacatcagacgggtatgcagaaggatgttcttctgggatttgcaggtacataaaaaatgtatggcatcttttccttgcaaattcttccagtttccaagtgagaaggggagcaggtgtttactgatggaaaaggtatgttgctatgttgatgtgtaagagaaaacagatgtgtgcaaaagacaggggcgtattcatgggagcatcagccagtttctaaaacccacaggccatcagcagctataggtgggtggctttggccagacatggaccctaaatcaacaaacaatggcattgtcgaagagcaacctgttaatgaatcatgttaaaaatcaaggattggcttcg

SEQ ID NO: 4008 - DNA, 546 bp, Homo sapiens
gacgttagtcgagcatttaattacttgtacaagaactggaatgcagtaggtatgcaatacatgtttgtcaaatagttttagaaagtgctatgatgaagcgacataaccaaagacataacgcaattattttgatttcaagtccagcgctcttccgagtaactaggaaaaatgaggggaactgtgtaggcagaatgctgtggaggggtggaaatctgaggtccccaagagtctctaagtgtctctttagatcgaatcgaaggtcttttaaacaacagatataccagatataatgcacaactctttctccccccacccccaatacagtgggactaataacagcatctacctgacaagatattatgaagattagggcaaatgcgttaataaatgcaaactgcttaaaatagtgcctggaagtatgtgctggctatcatcatcatcatcatcgtcaccatcaccaccaccaaacaagcctggaacgctccaagcccaagtgtacacttggacacatggcactctggcattccgaaaaatactcctcgtgcc

SEQ ID NO: 4009 - DNA, 1700 bp, Homo sapiens
  SIMILAR (1460)..(1579): 821254mologous to Homo sapiens cE132D12.1 (novel protein sharing domains with RAS-related proteins),accession number Z80897,Smith-Waterman Score=167.
ggaaaggtagctcttcccaatcagagaatctggatgctgggctgggctctgcaccaaccagctgggccgcttcacccgctgggccccaaactactcatctgtgaagcgaaggcaccgcgcttgatgccttctgcaacgttcttcagtttggaaatccttctgtttcgttggggatatttcacggcctcttctcaaggttgcacttttgccagctgccagggatcgtctcaaaacaggttcttagtgcattcatagcttgagctgctgtcttgaaagtagtacattcctttttctgccaacttttttctgagaaagtttttgaatgcacacgtgcacccaacagagtgagagtggctgttaagagagagggcgccatttcctttgccctccagcctgtccctgtgcaccctgggaggggcccgttttttccaccgcttaggataaaatctaggggcaagttcctgaacttctcttgtctctctcaggtaacaaaaattcttttggggctcctttagttcacaaaggtattcacgatttcaggtattaaagtgcccagccctgggtgattgtcaaaattctgaacttgatttaaagtggcacctcctctcacagtcttccggagggagagaccggagccaggagtgcagcgtgtttgctggggtctgtcgtggcccactccacacctgctgggtggatccggctggtgccccatgggcgcctctgagatgcccctccccaccccatcagtggcgctgtctcacctgcaggctgcttctcacaggtggtcccccctcactcctcctgcagccccagttcctggctgttcattcttattgggacccgtcaccctcctggaggcggtcccagccgagcccccttaagacagcaccaggctggctccacttggcccccgctggttcagggaagtgctgctgcagccgtttagtttgacaaaggaggcagcgaggccgtctcattggtagccctctcctggcttgcccagccaccacctcacctcgattcctcccaggccttgggtccagcaccagcctaggaagagggtgccccattgctgtctagctcttcttcgggatggggggctccaggttccttggtattttgcctttgccctttggagcctcagtcaaaactgaggaaaggtgtcattttcacatctcgtcacacgtacagtgactgcaactaaaagcacaggctttgtagaaacagacatgggttcaggccccagctccaccattcacaaggtgtgtggcttcctgcaaggtaccttcatctctgagttacctgactccatctgagtttccttcttgtaaaactggcatccatgaaagtggctacctcgaagggcgtgaagatgaaatgaggtggaaagtaggtagcccccgaatgagggaagcattgagtgagagctggccctctgacccttctaaaagaacacagccaactttttaaactgtctttccagaaagagatggaaaacttcgaagcccctttccactgccttgccaagcggttccaccagctgtaccgggagaaggtggaggttttccgggccctggcatgacgagctggagcagatcgtgctgcacaaccggagaagacagaattacctctgctcttttaatatataatgatggctttaaataaaattaggagaaaatgtcaaaaaaaaaaaaaaaaaa

SEQ ID NO: 4010 - DNA, 1116 bp, Homo sapiens
  SIMILAR (367)..(1113): 761254mologous to Mus musculus h2-calponin,accession number Z19543,Smith-Waterman Score=960.
atgcatcaagaagacctcagagcctggtatcttgatcttggacttcctagccaccagaatgctcagcctacagcctggaagtgccagcgggcaccttcaccctacacgcatcaggatatggccttgatcccttcccccacagcccggtggctcagtcctgagaaggaaccaaagcagggggaggtgggggaaaaatccctgctgcctgatcccacgctgccactcacagaccctcggttgactggcagcactgaacaggcccatgccgaaggcctggccgctctgatgagcgccctgcgtgtatcccatcttcagggacgtggaggagttgtcacacttgtcgattcccagcttggtgtcatagccgtaagctccacgcagttcaacaagggcccctcctacaggctcttggcggacgtccagaacaggcttctgcccaaatatgactcccagaaggaggcagagctccgcagctggatcaagggattcactggcctctccatccgccccgacttccagaagggcctgaaggacgggattattttatgcacactcgtgaacaaactgcagccgggctcagtccccaagatcaacggcttccgtgtagaactggcactagctagaaaacctctccaacttcctcaaggcaatggtcagctacggcatgatcccgtggacctatttgaggccaacaacctgtttgagagtgggaacaatatgcaggtgcgggtgtctcttctcgccctggcagggaaggccaagactaaggggctgcggagcggggtggacatccgtgacaagtactcagagaagcagaacttcgacgacaccaccatgaaggccagccagtgcgtcatccggctgcagattaccaacaaatgtgccagccagtcaggcatgaccgcatatggcacgaggaggcatctctacgaccccaagaaccgcatcctgccccccatggacaattcgaccatcagcctccagatgggtacaaacaagtgcgccagccaggtgggcatgacggctcccgggacccagcggcacatctatgacaccaagttgggaatcgacaagtgtgagaactcctccatgtccctgaagatgggctacacgtag

SEQ ID NO: 4011 - DNA, 904 bp, Homo sapiens
  SIMILAR (710)..(898): 711254mologous to Homo sapiens neutral calponin,accession number D83735,Smith-Waterman Score=241.
agcagggtgggagagagcaggctggaaagtggagctcagttgtctatgtctgtccgtctgtccgtctgcctatctgctagagccagaactttggggtcacaggccagggcctggcaacagtgaggcactctacaaacagcatgaggtgtgacaaagtctgctgccgagctctataaacagcactgagcgctgaaacaagcgccaggttctgtcaaaaatgaaggggtcagcaaaatgcaccaggctgtgcaaccagcccagttccctctagctccagcacagactcttatctccagccctgactgccgaaaccctccagccccagctccagcccctcaggaggggactgcgtgggaggaatgactccagcaagccggcagctgacccgtctcctgcctgcacgcctcccgctgtggtccactgccggtggtcttcagctctctcctcgtcccacccccatggtctgctgacagcccagctcagtgcatccctgccatctctgctctaccgctggtcctcccaacaaccaacttacagctggggctcagctatccctgtgtccccagtccagagcctgcctctcagccctcccaaggcggccttgagcgctgctcctgctcctccaggggagaggtcagctggggagagcaacagggagaagaggacagggagaggttggttaacaaatacaaacttacagctagataggagtaatgagcacacctatgacaccaagctgggaatcgacaagtgtgacaactcctccacgtccctgaagatgggatacacgcagggcgctcatcagagcggccaggccttcggcatgggcctacagatatacgaccccaggtactactggggaggcccagtggcccacggcgctccctcgggctccggcccctga

SEQ ID NO: 4012 - DNA, 470 bp, Homo sapiens
  SIMILAR (184)..(444): 801254mologous to Homo sapiens PLAC1,accession number AF234654,Smith-Waterman Score=369.
  misc_feature (1)...(470): n = a,t,c or g
agagtgactctcctatgaaggtaaaggccacccctcttcagttccagtgactgagatacatttttccaatcctgggggcaaatacagacacagcaagttccttcttccctttggaaatttggcagaaatcctcactggacggcttcctgtttcctgtggttcattatctgattggctgcagggatgaaagtttttaagttcataggactgatgatcctcctcacctctgcgttttcagccggttcaggacaaagtccaatgactgtgctgtgctccatagactggttcatggtcacagtgcaccccttcatgctaaacaacgatgtgtgtgtacactttcatganctacacttgggcctggggttgccccccaaaccatgttcagccacacgcctaaccagtttcacctaccgtgttactgaatgtgggcttcagggccaaagctgttttttcaggacatggttatttaa

SEQ ID NO: 4013 - DNA, 2249 bp, Homo sapiens
  SIMILAR (560)..(889): 471254mologous to Mus musculus putative,accession number AK005501,Smith-Waterman Score=254.
atgtggatttcagcttttgtctgtcatgctttttctgttccagctgccttcaccagtgagcacaaagccacatttcaaaggaaactgacaaattatccccagctgccagaagaagtgcagttctgggcacatactgaagatctgttagttaaagagcagtacagactcaaggaatctgtcaccagttcagcagctgacgagctcagctcaggggacactttagtctatagttctgcttcaacatctcacaagctacacgagtatgatccactcattcaacaaagacaacgtattaaaatcctaatccaaaggtggcttcacggcccctcaggtttaacagctgagactttgtttccagactcacagggagaaagacgttctgcctgtgtttatgtgtcagttgcagaatttgtgggtaacaggaaatcagccggttcaggacaaagtccaatgactgtgctgtgctccatagactggttcatggtcacagtgcaccccttcatgctaaacaacgatgtgtgtgtacactttcatgaactacacttgggcctgggttgccccccaaaccatgttcagccacacgccttaccagttcacctaccgtgttactgaatgtggcatcagggccaaagctgtctctcaggacatggttatctacagcactgagatacactactcttctaagggcacgccatctaagtttgtgatcccagtgtcatgtgctgccccccaaaagtccccatgggctcaccaagccctgctccatgagagtagccagcaagagcagggccacagccaggaagggatgaggaaatgctacggaggtgtttcagcttgttcacagtccagttcaaagggcccaacttgcggttgtccaccttgtgtctttcagtgaagaagagcatacccagatgaggaaactgaggctcagagaagtggagattgtaccattaggaaatgacatcactggaactcaaacccagaggatgtgttccaagtgtcagtcccagatggatgtttgtgaagccaacatgttagatatgagctcaacaacccttggtcagcaccaagaacaccaaatggtgcctaagccaactcttgaggatgttagccatcatctttaccgccagcacagcaccttgttctcacttcttccggttccttttttcccttctcaggtactccctgtaagcaccgagcaaaaagcttcgctcagccaccttgcgccgtcccggcagctcaaaggacaccgccagaggacccgtgagcgtggggtggtgtccgtcccaggagcctctgggtgcgcgctgcgctacctcgtgcccttggctttgccgtttgccatcctccgttttttctccccgagccctcgctattcgtctcggtggcggctccgggagcctctccgccggctgcgccgctcgcctccaagggagcgttccgtgctggcccctcgctcggctccgctccgcctccgccacgccgctctccgagcttcggcagcagccagcgccccctccacgctgcgaccccggctctcggctctccgtccctgtagctccgtgcccagcacctcgcgccccgcaacctcgccgtctcccaagtcccgggccccgcttctgtcgctgtccgtcgctgtccgtgtgtcgctcgctcggtctgtctctccgcctccccagcccttccttcctccctgtctccctcgctggcttgcacgttcgctcgctctcggacgcggcgaaacagcttcgcaggcaaatcccagaaacctttgcaaaaagcttgcaatgaaatttaagaagttcttcgatttcggcgccattttcgagtggagccagagcttccccctttctccccgtcctgtacggttccccctggagccagaaggaagcccggtgccagccagccttcctgaaagaccaagcccgcgccatccggcttcctccagtggacgcctgcaggacccaggcctcatactgtgttccttatgtcattacctgttcatcagaaccgactatgcagtagtgaccagagcaggaaatggaggtgaatgtgtttggttacaaaaattcccggtgaaactggctagtcttatgatgagctttggcctatacattggacacttcctgggtgtgcctcctgcaaatccgcaggaagcaccaagaaccaggtccttcttcacccccaaatctgtcatggagcccagcgctgttcccggcacagcagagcgggtgctccatccaggttga

SEQ ID NO: 4014 - DNA, 1220 bp, Homo sapiens
  SIMILAR (293)..(709): 441254mologous to Homo sapiens Amino acid sequence of a human secreted peptide,accession number AAY12939,Smith-Waterman Score= 165.
atcagaccatcagaaggatttgtataaagagtgactctcctatgaaggtaaaggccacccctcttcagttccggtgactgagatacatttttccaatcctgggggcaaatacagacacagcaagttccttcttccctttggaaatttggcagctgccttcaccagtgagcacaaagccacatttcaaaggaaactgacaaattatccccagctgccagaaggaaggaaatcctcactgggacggcttcctgtttcctgtgggttcattatctgattgggctgcaggggatgaaagttttttaagttcatagggacttgatggatccctccttcacctctggcgtttttcagccggtttcagggacaaagtccaatggactgtggcttgtggttccataggactggtttcatgggtcacagttgcacccctttcatggttaaaccaacgatgttgttgtgtaacatttttcatggaacttacacttggggcctggggtttgccccccaaaccattgtttcaggccacacgcctaccagtttcacctaccttgttactgaatgtggggcttcaggggccaaagctgttctcttcaggacatggttattctacagcactgagatacactactcttctaagggcacgtccattctaagtttgtgatcccagtgtcatgtgctgccccccaaaagtccccatgggctcaccaaggccctgctccatggaggagtaggccagcaagagcagggccacagcccagaaggatgagaaaagcctacgaaggtgttcaagcttggtcaaaagtcccagtcaaaaggcccccaactgcgattggtcccacccttgtgtccttccagtgaaagaaagaagccatacccccaggtccccttgttcacccaaagcagggtcttcagggaggcttcaaccttcttgcagcccatcctcacttttctttgatatttcttgagggattgggtctctttcacacagatgatatgattggggtcccatgtgatccctcaggtttggggtctccctgaagatgcctatttcctagaattagtatatagtgtacaaatgtctgacaaataagtgctcttgtgaccctcatgtgagcacttttcgagaaagagaaacctatagcaacttcatgaattacgcctttttctatatttttatattcgatgtgtaaacaaaaaataaaataaaattctgatcgcat

SEQ ID NO: 4015 - DNA, 2189 bp, Homo sapiens
  SIMILAR (2097)..(2002): 901254mologous to Homo sapiens Unknown (protein for MGC:10745),accession number BC003514,Smith-Waterman Score=162.
aatgtgtgtgtcccagaaatgcctggtggcctgcgggggtctttaaccaaggggatgctggcttgaacccaggcctacctttcccctaagaagccagccaggagctgagtgaaggcaacagggatgcccccatccccttctggccagcgagctgctcctatgatgtcaccctctgtccaccgtgacaaagacagacacatcctgcagaagaatctgggtcgcaagcaggtgacctgcctccagcaggaagcaaaaccaaggcggtggaggcaggagagcacggagacagacgccccgaagctctctccctgttcctccccaaacgctaggcgatgggaaagacggggacaatgcagagtaaatgtgtgccgtgacacctcagtatgcgacacaagccaagaattctaagtggattcacgagccacgccacccagccttgggtcttccctcttcagccgtcagagccaggatcagtctctggctttgcaccaagggcttgctgtcccctcacacgggtgtcttgcgtcttcgcttgggcaggggtggcttgccccacgtccccattctggacaagccaacgccctcccacccagtgctgagagctgcatgcgagtcccatgagcaccctctgtgcacacaccttccagaacttagagccccaacaaaagcgggagtgggggcagcatggtcccaacaatccccagggacgctcctctgtggctcccatgcaagtgcccatttgggctgcacgcttccctgaccggacgctgaaggccggcctgccacgactggccatgcccctcaaacgaccgagatgtcttctagtccctcagcccagagcagcagatgagaggctgaagttagcgggggaaacaagaggaaccctgtggcttcctgtgcatgggggctccctttggacataagctgccacagtccctgcctgcccaccttggctgacaaggcgctgcattgggagtgccccagacctagtttcaggtacttctgtgaggagaggggtagagagcccaggtgctcctcctcaccaccccctccacactcctggggaagtcactggccgcacatacatctgtggaaatcgggcccaggtggccttgggaacgtggcttttgtgcctcaacaacaaaaagaggtggcaatgtttagctcaaagcagtgaaggggaactgggctgcttttgccctgcgttcaacacagggaacggcccagggcaccaccatgctttccctccacccccaattacgtgaggagctgacccaggtgagcataccctagaaaaggggggcggggtcagtaaatgggcccgtttcctcatcagctggggccccaggtctggggtagtttgggaacgtttctgccaaacctcagctaaaaacgaaaacacagatgtcaccttccagccaaccctgggcctacagggcccaggcacagctccaaccagaagagacaaaaattcatcatccaacattcacagaaaacacgcctgaaaccctgggtttgttctccgatttgtgttcctcaaaaggcggtaaaacttgcaaggttaggtgtttaaaaacaccttcgttggccattgagaactggagacagtgagccacccgtccccagagggagctcggaagccgaagggccactcccgtctccaaccactgcaggcgggcacgggcagggcagctgcagacgcccgggaaaggtgtccatcaggccccctggaatacaccacagatcctatttcttaaagtgtaacgagccccaagggctgtctggcatgcgcgccctctgcaccccactagctctcgcctggggggtgcctagtgtcaggcttcctggccgcagaggccacagcccagccatgcaagtttgaggtgctggggggcagaggtggccaggagaagagcttttcctggggcagtgggaaggctgggctagggtggtggtgcatcctctgcaggcacagcgcctctgggtcagagaagaacagagaaggatgtcctttcgagggcaccagcagcccgccattccttcaaagtgccccacctcgcccacatccccatgaacactcctgctggtggcctccatggctgggatgaaacgattccacttcaacacccaacacaccaaccccaaccccaagtgcacctggcaccttccagctgtcccggacgcgtggg

SEQ ID NO: 4016 - DNA, 4056 bp, Homo sapiens
  SIMILAR (3532)..(4053): 431254mologous to Human herpesvirus 6 U88,accession number X83413,Smith-Waterman Score=324.
tttttttttgccaccgcacctggcctttattatttttaaacagtatgaaatttagaagcaaacacgtatacaaaaaaaaaatcccattacatttattaataatatatctttagatttctcattcctgttcttttaaatggcgcccactggtctcatacaagaggaggctgtgtgacctttctggaattatagaaatatccgcatccagccatgtgctgagcagacccaatgtaaaatgttcaagcaaggttttccaaatgtctctttggatatattttaatcatctctgcagaagaactcaaaatctcagagcagctccactccagatccaggggcaggaggcagcctccaggggaggcgaggctcggtttttacggaggaatctggcctttatagtgtgtggcctggcatgggaccagcctctggggaaagaagaagcaccaagacgttgaacaggggctgttgggccgatggcttttagcagccacataaatccctcctttgatggtccaggggtcagttacgagcctgggtcccccaggctaggaggagacgaatgaaagaatcttgctgtggtctttcctgcaaaggcaaacagcagtaaacattgattacccagtcaccgggaggaattcttgtgaagcgcgcacctctgtgtgcctttgctctccactttcaagagaggactttaatcacaggacaaaggagaagacccaggcccatttcagtctccgggacgggtcacagcgagccgtgtgaacgctggccttgcttcacacgttgcccatgaacaccaacaggctgtaactcaaggcttttgcgtaacaacaaataagcttgctagaagtacccaatttcaagacacgcacccactctaactgttctcaagaaagtctcacgctcacctcgccgtgggaagaagctgggccctgcctcccttaacaacaatggggcaaacggccccctgctggcactgtgtccctgccttcaggcctgggagctcttaactttctgccaacagggttttccaagtctacaaacccccacgccgcaggagcacatgcagatgaactggcaccgtgctgccgccgggccggggtggacgcagggtggacgcgggcctgtctgccgcgagtgggagccccagctctcctgagcctcgggcacttacagacacgaaggctttttgctcaagggctcgactcctgttcctgctgaactgagccagtgtgtaaaatgagaactgatatcagctcagtaggcaccggagggcgggtccaatcgacagcccggagaagcagcgcctcagctgggagctccgtgggcaccgtctgctgacgcaggagacgcgaaggcctggactgcaaatacaagagagagttctccgcgcccagaacaacaggagctcctccgaaagccccgccccgccccgctcacagccatgagctaccacatgatttcacacgacttaggtgatgcatttgagttttagttttttgtaagaagaatttttgcaactttcaatacatttgacctttcagacagatgtccgattagtggatgtttctgtggacagacttaaggactcagtacatggctagcattcccagcaggagacagtgcatccttggggtcaagtggtctctcatcctccaggatcgcgctccgcacccaagctgactgtgcagcagcggccggcccgtcagcaacggcctctgccccagcggctccatcttaactgtccccatctcaccttctcttcaggtgcagaacttagccgctgtgaacaaagcggaaaccaatcactgttcaccaatcagataagctctgccccctgttagagaggtcatcgctgggcataaataaagggacggtgaccggtgagcatcttcctcagctggtggcttcttttgtttccaaagaagagttacgatatgcacctgttctccaatctgcagtgagcgcaaccacggtttctggaggagcagccaaggtcgtggttgcgtggtaatccctggcaatgtgattttaatcttaagtcacaaatcagcatgccaggaacccaagcagccagagcacctgagagcagcgccaccccgtgctgtctgcacacactgggcttccgcggaaggacgccggcgacactgccgccttcacgcctgttatgctagcaaacaggtggagtttctgtttgttgttcgtttagttggcatcctagaggtataatttcttgaatcaaagggactccagagatgaccataaaaatgccagtgcagctttggaactgaagaaaaatgcagggaccggccatgcgacacacacaattgctaaaggcagctgtccttgctattagtttactgcctctaacccttggggacaagatcccttctctccaggcagattctagctgccctgggaaggctttggggactctcaagtcaggaggtccccctgctggaaggggccctgggacaatcccggccactgttcctcacggggactggttggggggcaggcttgcaacccctggatgcatctggaggggtggggacaggatcgaagatgctggggagggggaaaagggagacttgtgaccaagatgactcctctgcctgcctgggcaaaaattccccataaagagtggcgaggggtgtgccctgtggtgctgctccaaaacctgcaccaaagggaatgatgaaaggactagctggccttgtagtttcacacactttaacacgtacgccacgaaataacaaaacgaaagagaaacaccatttacactgattactattatgaggccggcagtgaggtaagtgcacagtctgtgtgccgccagcccgtcctggaggggagccgcgtcaagtctgcagcaggcgtttcgctacgagacgctcagtcccgtttccctttcctggcacacatggttcctgactcttctggaagaatatgatcatgcttctgaaaaactttttatttcttttcattattagagttctttcagataaataagctacttaaacacgttacacagaaatggttttcataagcacaaaacattagaagaaaactcaatgttcaaaactgagtgaagaatatcaacaccaaatattcaatatccatgaaaaattatagagaagctataacacgaaaaatgcttcagatttgataaagtttttttaaagaatacaaaattagacatcccctattaatatcatataaaacactgaagaaaaacggagcagccacagaaataatgatgattgttagagaaaaaaaatctcacagctatcctaacaaaaccttgtgtactaccgctaggttgctttaatagtgtagaaacccatactgagcaactaactgctaggaagtaaatctaacaggttaattccaggcacaattaacagaggaagtgatttaaataatctaggactccaatagaagccaggggagaaattccgctccaacacaacaaagcaaaaagtaggacctgccctcaagacacagggtcatggaggccatatgccacgtgtgctgtgtgcgccgcgggtgctgtgtggtgcgtgcactgtgtgtgccacatgtgctctgtgtggtgcgtgcggtgtgtgctgtgtgtgccgcaggtgctctgtgtggtgcacgcgctgtgtgtggtgtgtgtgctgcctgcagtgtgcgcgctacgtgtggtgcatgtgctgtgtgtgctctgtgttgtgcatgcgctgtgtgtggtgtgtgtgccgcgtgtactctgcgtggtgtgtgtgctgtgggtgctccaggtgctctgtgtggtgtgtgtgctgcgtgtgccgcgtgtgctctgtgtggtgcatgcgctgtttggtgtgtatgctgcatgtgccgtgtgtgctctgcgtggtgcgtgcgcttgtgtgtgctgtgtgtgccgcgtgtgctctgtgtggtgcgtgcgctgtgtggtgtgtgctgtgcgtgctctgtgtggtgcgtcctctggtgtgtgtgtgctgcatgcaatgtgtgtgctacgtgtggtgcatgtgctgtgtgtgctgcgtgtgcctggag

SEQ ID NO: 4017 - DNA, 355 bp, Homo sapiens
agggccctggagcgaagcaccacagccgtctgctcggtggtacatgcttttgggcagcaacgtcatgcatataggcgcacaagcttcaagcgcacagtgaaaacacgtgatgactacctgctcagacagatgttaatgagtcacatggtccagctggtgcaaagtagcaaagcttcccaggaagagtccatccagaggttctgtgatcctgctgccgcgggactgcctgcggcccggagtccggcactaaaaaggttccgagggcccacgtctcccgagaggctgtggcgcagtctggacccaagccattgtgagagcggcggcgatttcgaaggtccccaagacccactaggta

SEQ ID NO: 4018 - DNA, 437 bp, Homo sapiens
  SIMILAR (148)..(435): 731254mologous to Mus musculus putative,accession number AK004845,Smith-Waterman Score=360.
tttcgtggtactgctacctagtgggtcttggggaccttcgaaatcgccgccgctctcacaatggcttgggtccagactgcgccacagcctctcgggagacgtgggccctcggaacctttttagtgccggactccgggccgcaggcagtcccgcggcagcaggatcacagctcttgaggctagtgcgcctctaggcaagatgtccctgcccatcgggatataccgccgggcagtcagctatgatgataccctcgaggaccctgcgcccatgactcctcctccatcggacatgggcagcgtcccttggaagccagtgattccagagcgcaagtatcagcacctcgccaaggtggaggaaggagaggccagtctaccctcccctgccatgaccctgtcatcagccattgacagtgtggacaaggtcccagtggtgaaggc

SEQ ID NO: 4019 - DNA, 817 bp, Homo sapiens
  SIMILAR (375)..(815): 511254mologous to Mus musculus putative,accession number AK004845,Smith-Waterman Score=325.
  misc_feature (1)...(817): n = a,t,c or g
gatattcggcacgaggttcagaagagacatcacactcgattattttgtgctgataggacagaaagggtaatctcacctctgttgtaatactgttataaaccaagggtactgctacctagtgggtcttggggaccttcgaaatcgccgccgctctcacaatggcttgggtccagactgcgccacagcctctcgggagacgtgggccctcggaacctttttagtgccggactccgggccgcaggcagtcccgcggcagcaggatcacagaacctctggatggactcttcctgggaagctttgctactttgcagcagctggaccatgttcctcattaacatctgtctgtccgcttagtcatcacatcatttcactgtgctcttgaggctagtgcgcctctaggcaagatgtccctgcccatcgggatataccgccgggcagtcagctatgatgataccctcgaggaccctgcgcccatgactcctcctccatcggacatgggcagcgtcccttgggagccagtgatttcagagcgcaagtatcaacacctcgccaaggtggaggaaagagaggccagtctaccctcccctgcatgaccctgtatcagccattgacagtgtggcaaggtcccagtggtgaaggtaaagctacccattcatcatgaattctcggtcacaaacagacccaggaaagcattctcattttgagcgacaggcagggctgagagattgctgctaccaccccacaagggcctcacccacgaggagacaagtaccttcgagtggccgagccctcacanactaaagtacagagggggagg

SEQ ID NO: 4020 - DNA, 1900 bp, Homo sapiens
  SIMILAR (455)..(1300): 671254mologous to Mus musculus putative,accession number AK004845,Smith-Waterman Score=924.
  misc_feature (1)...(1900): n = a,t,c or g
agtgctgcctgcccgctgggtggtactgctacctagtgggtcttggggaccttcgaaatcgccgccgctctcacaatggcttgggtccagactgcgccacagcctctcgggagacgtgggccctcggaacctttttagtgccggactccgggccgcaggcagtcccgcggcagcaggatcacagaacctctggatggactcttcctgggaagctttgctactttgcagcagctggaccatgttcctcattaacatctgtctgtccgcttagtcatcacatcatttcactgtggtggcagggactcagctcggaattctgtataggaaaaagcacctggattcccagtcttttcaatgggcttcaaagacaaccagaagttgcctgctccttgaaggctaagttgcgccctctaaggcaagaatgtcccctgcccatcgggattataccgccggggcagtcagctatgatgataccctcgaggaccctgcgcccatgactcctcctccatcggacatgggcagcgtcccttggaagccagtgattccagagcgcaagtatcagcacctcgccaagtgtggaggaaggagaggccagtctaccctcccctgccatgaccctgtcatcaagccatttgacagtgtggacaaggctcccaagtgggtgaaggctaaagctacccatgtcatcatgaattctctgatcacaaaacagacccaggaaagcattcagcattttgagcgacaggcagggctgagagatgctggctacacaccccacaagggcctcaccacccgaggagaccaagtacctttcgagttggccgaagcactccacaaactaaagttacagagtggagaggttaacaaaagaaggagaggcagcctgcatcagcccagtccaccccaagcaccactccgcactcctttacctaagcagaggcccaggggctggttcacttctggttcttccacaggcttacctgggccaaatcctagtatcatggactctggaagttgggggattaaggacaagaaactttgttcagataagtggagcctctttggaccgagatcccttcagaagtacgattctggaagttttgccacccaggcctaccgaggagcccagaagccctctccattggaactgatacgtgcccaggccaaccgaatggctgaagatccagcagccttgaagccccccaagatggacatcccagtgatggaaggaaagaaacagccaccacgggcccataacctcaaaccccgtgacctgaatgtgctcacacccactggcttctagagccctctttccagggattctggtaaaggtggtttcttgcatcccactccccttttaccttggctttgacataggaaaggtatatttmamcmacttaatcagctgggcgtscgtggctcacgcctgtaatcccagcactttgggaggccaaggtaggtggatacctgassgtcaggagttcaagaccagcctgggccaacatggtgaaaccccgtctctactaaaaatacaaaaattagctgggcgtggtggtgggcgcctgtagtcccagctacttgggaggctgaggcaggagaatcgcctgaacccaggaagcagatgttgtaccgagctgagatcatgccattacactccagcctgggcgacagaacgagacgccatcaataaataaataaataaagtaaagtaaaaaacctattaaattgaggctagagctggagatgtaattggtttttgagaaacattagtataaagcttgcccttgttgtgtggaagaagccattttgtactgctttaaagttaggactaatattcttcaggcacgggtgtatgggacncataccnatttttcagcangacccnttttnattttttttt

SEQ ID NO: 4021 - DNA, 681 bp, Homo sapiens
aagtatgcaggatgcctgcttttttatgcagttgtggaaagaatgtaaaatgttttaatatattctttgttaatctgagaacttgatactgaatcgtttatgtgggagaaggaaggagtaacataaaacatgtttttatcactcaaagtaagcaatggaggtaacaaatattgtgcattttaacagtaatatttgaagatttgtagaatattcacctttaaaactagttagtatgcatttataattttaccagaatatacaactaacaattcaacagtgatgttctttgcatttgtggggagatgtgtgatgttcttggttttctggtttggaatggaacgtttatagccttgcctgtaaaaatgtgccccagcacttaatgagtgaccgtttgaatccatatgtagtcccattggtgctaatgagagtagctgctgtgaaacaggaataaaatgtgtctgttcacggaggtgccggtgtggatgcacctacaaggccaactctctgatccagggtgagggagagatggaagaattaacagatctaaaagttggcctttgttgtctcaaattggggttttgtacacacatgccatgcatgtgtgtatacaactgtaatctggaaccttcaggaagtaaaaatttatttggaagtttccttagtaaaaaggtaattagggta

SEQ ID NO: 4022 - DNA, 1744 bp, Homo sapiens
tttcgtctgacttctggctggccagaggctgcggtccgtcaagggcttgcctcgcttcagaatcagtaacatagatcttaagtgcagttgattaataagcagtgagttactgtagcttcctttagctctaccgaactctttttaaaaactcaaacttgagcagccttagaaaaggggttggggggtgggaaccacaggccatttctctaagtgggctgctgtgaagttttaaatgaaagctctagctttaggagcttgagccatttcctgactgcactggcctggcagtctggctgctgcacaagagtttttaaagaggggtcggagcccgcccgtgagagcgggtcttctcaccatgtgggggctgtactacgtgggtggtcttggtttctctttcacagaaatgctctctcaccaactttgccccacttgtcccaactcctctcctctttagaggaaaaaactgtggattacctcaacttgaatatggaaactgtggatttgaaaaaagtcaaaacggtgaagaaggcatcaaagccaaaaaggcaaaactggctgaggcctctgttgatgctcctcagcctactcgggaacgtgaagggggcagctggcgaaagggcattcctggggccacttgctctgccccactgataaggcacacccgcggtgcactgtgagctctttgaggactgaggccaggggatgcctcctggaacctgccaggcctctctgttctgtgaaggtcagtatccacttgattcctccaggcggcgctccaggtgggaggagcagggtcttctgctgtttccaaaggaatggccatgacactgcttttgaccttagaagtggatccagggacccagcaaagagcgggggtgggttcccagggacaggcagtcctcccggggcttacatgctttttgctaactttcctattagcagcttcagtttatatcacccagagtgcgtgggataatgttgaagtcgctgaagttacgggttattttatgtttttacatgggatttttctgtttttgattggaagaaggagacagaaattggaggaaatgggattattatcctagggaagggccgttggcaaggagttgagccggcccctctgagccctgggggctatctgacctgaagcctggacactgggcccttcaggtcgcaagaaaaagttccctcctaaattctattaggattttggagaatttttgcacagtaagaagctctgggttgctccttgggcctctccaaaagggaaaagttcaattcaaagattggtaaaacctaccgaagtattccccagcccgtgttgccggatcctaggttgggataggttggtcccctcaaaaaaggtagggtgagaactgggcttccctcattggccccccagatgtcaaatacctaatggaccataaggaggcctccctaccgtgcccaaaattccacttttatacctagtttttccagtgctttaatattttgtaactttaaatttttaaaactcgtatttacaaacactactgttaacttcagtgaaactgaattgtgccgattgaagctttttgcttatcatagtatttattacactacttaattcagtaaatatataaaagtagccttcaatttatttttatattattttacatgtttttacctgccagttgtgtatgtgaatttaccttggtaatcgaggatgtcatgctaaggaccaataaactatcactggaacagg

SEQ ID NO: 4023 - DNA, 381 bp, Homo sapiens
  misc_feature (1)...(381): n = a,t,c or g
caaaaaattaagtcttcaaaactcttttgaagtccactgggtgcagaacatcccccactgtgcctgaaaaccaaggaacttcaaaagagttttgaagacttaattttttgtaaaacacttacttgagattttgggttatccataatagaatgtatttcattagattctctgattctatataagaatgtgaaaagatcgatatattgttgttagaaataatgctatttctttccaannnnnnnnnnnnnnnnnnnngaaagggagttttgttttgccacccaggttggagggcaggggggggatttcggttcattgaaccctttaactcccaggttaaagtttttctcttgccttacccccccaataagctggattacgggg

SEQ ID NO: 4024 - DNA, 475 bp, Homo sapiens
  SIMILAR (475)..(143): 831254mologous to Homo sapiens Human secreted protein encoded by gene 110,accession number AAY36333,Smith-Waterman Score=476.
  misc_feature (1)...(475): n = a,t,c or g
cnaacccaggacaggggtgcattagggccaggctgatgcgctgtagagtagtcgtaggtcatgaggctgaaaccatccagcacgggggccagctgctcaaactccttgtgcgtgaacatgcccagctggtcggtcacgcgcttctggttagcagctggttccagacctccaccacgaagccatcgaaatgctggttctttgccacctggaccacggtcttgctcagctcctctatctcatcctcactgtctaagacgttccggaaatcatcgtaagtccagtcctcaaacaggagccgagnactatgtgcagnccttggcatgcttcctgacagctcgcatccacccttggtcacgtcgtggaggcccgtgacctcaaacatctcacggccacgtctcttcagctgcagccagacgggtgagatctgtgtgaacttgctcccaaagaccttggtgacatcgtagccatggctgtt

SEQ ID NO: 4025 - DNA, 1539 bp, Homo sapiens
  SIMILAR (209)..(556): 421254mologous to Homo sapiens Human secreted protein encoded by gene 110,accession number AAY36333,Smith-Waterman Score=178.
accggcaaactgtttccgggtcgacgatttcgtggccgtccggcctccctgacatgcagatttccacccagaagacagagaaggagccagtggtcatggaatgggctggggtcaaagactgggtgcctggggagctgaggcagccaccgtttcagcctggccagccctctggaccccgaggttggaccctactgtgatttcacctaccatgcgtacactcttcaacctcctctggcttgccctgggcctgcagccctgttcacactaccctgtcaaagtcagatgccaaaaaaagccgcctcaaagacgctgctggagaagagtcagttttcagataagccggtgcaagaccggggttttggttgtgacggacctcaaagctgagagtgtggttctttgagcattcgcagctacttcttcgggcaaaggcccggggacagacactttgctggggatgtactggggctatgtcactccatggaacagccatggctaacggatgtcaccaaggtctttgggagcaagttcacacagatctcaccccgtctggctgcaacctgaagagacgtggccgtgagatgttttgaggtcacgggcctccacgacgtggaccaagggtggatgcgagctgtcaggaagcatgccaagggcctgcacatagtgcctcggctcctgtttgaggactggacttacgatgatttccggaacgtcttagacagtgaggatgagatagaggagctgagcaagaccgtggtccaaggtggcaaagaaccagcatttcgatggcttcgtggtggaggtctggaaccagctgctaagccaagaagcgcgttggggctcatccacatgctcacccactttggccgaggctctgcaccaggcccggctgctgggcctcctgggtcatcccgcctgccatcacccccgggaccgaccagctgggcatgttcacgcacaaggagttttgagcagctggcccccgtgcttggatggttttcagccttcattgaccttacggattacttttacagcgcattcagcctggccctaattgcacccctgtcctgggttcgagcctgcgtcccaggtcctggacccgaaagtccaaagtggcgaagcaaaaatccttcctggggcttcaacttcttatggtatgggactacgcgacctccaaggatgcccgtgagccttgttgtcgggccccaggtacatccaagacactgaaggaccacagggccccgggatgggtgtgtgggacagcccaggtctcagggcccttcttcgagtacaagaagagccgcagtgggaggcacgttggtcttctacccaaccctgaagtccctgcaggtgcggctggagctggcccgggagctgggcgttggggtctctattctgggagctgggccagggccaggactacttttacgacctgctttaggtggccatttgcggcctccgctggtggacgtgttcttttctgagcacatggagtgagtgagacaggtgtgaaatgacaggcctggcactccgtttgctgtg

SEQ ID NO: 4026 - DNA, 711 bp, Homo sapiens
tgacacgccaagcttggcacgaggataaatttcacgatccttttctaaagcgtgtctccaaatgttagtaggcagttctaaaaataattggtttcacttatggctttaaaagaaaatcctcaaaaaggaataacttatttcaggaatgtaatgtgggctctttaaaataagtaacacaccaatgttagtttctagtattgacaccacaagttttaagtggatcccaagatgtaattgctcttactgcttgtgcttaagttgttcgagccattgtctaaacacctatcattgtctaaatggcaattattttgccattgtaaaaaaacactatcagcttggccttatagtggggtcctaggatatctggaaagcatccaattggaattaatatagtgctggaagggaaagcctggatgcacttttttgctgttggctggtgtcttcagtcaaatcagatatctggaaagcatccaattgaattaatatagcgctgaaggaaagcctggatgcactttttgctgttgtctggagtcttcagtcaaatcatcatgctttttattaacaaacaacttctttaaaaatgtatactatttctgattactgtttcagagttaaaggggaacagtacagcttgaggttgcacatcagggtagggcagctatgacattctttattatggtattttattttaaactaagctaacacattggg

SEQ ID NO: 4027 - DNA, 858 bp, Homo sapiens
  SIMILAR (574)..(858): 981254mologous to Homo sapiens R32184_3,accession number AC004528,Smith-Waterman Score=493.
ggcgcgacgctgggaggcatgtcggagcacgtggagcccgcagctccggggcccgggcccaacggcggcggcggcggcccggcccccgcgcgcgggcctcgcacccccaatctcaaccccaaccccctcatcaacgtgcgcgaccggctcttccacgcgctgttcttcaagatggctgtcacctattcgcggctcttcccgcccgccttccgccgtctcttcgagttcttcgtgctgctcaagagggttctggagaggaggccccagctcactgtgggcgtggaagagttgaggctcctggtggtcttgcctatggctgtgcggccacaggtggctcactgcaccccgggcattggtgcacctgccagcaggtcacgggtcacggaggggccctgtgctccaggctctctggcttgtgattttgagtctgatcaattcttccctgagagtctggggttccatgtggccgtgggcgcccccttggcccagctgggtcctcagttttgcggatcggggcagcaggtagacgtgaccctcaccaggctcgggggtgatgcctggacctcaggttgggaggccctgtttgtgctcttcgtcctggcctacatccacatcgtcttctcccgctcgcccatcaactgcctggagcatgtgcgtgacaagtggccgcgtgagggcatcctgcgtgtggaagtgcggcacaactcgagccgcgcgcccgtcttcctacagttctgtgacagcggcggccgcgggagcttcccgggcctggccgtggaaccaggcagcaacctggacatggaagatgaggaggaggaagagctgaccatggagatgtttgggaacagctccatcaag

SEQ ID NO: 4028 - DNA, 388 bp, Homo sapiens
  misc_feature (1)...(388): n = a,t,c or g
nnnnnnnnnnnnnnnnnnnnnnnnnnnnnnnnnnnnnnnnnnnnnnnnnnnnnnnnnnnnnnnnnnnnnnnnnnnnnnnnnnnnnnnnnnnnnnnnnnnnnnnnnnnnnnnnnnnnnnnnnnnnnnnnnnnnnnnnnnnnnnnnnnnnnnnnnnnnnnnnnnnnnnnnnnnnnnnnnnnnngggggggcccttttaaaaaaacccttggggggcccaaatttaacgggggatggaaaggaaaaattttttcccttaaggggggggttttaaaaaccacctggggatttttggaaaaaaaccttttttttggggggggaaaatatgggcccaacccccccccaaaatttaaaggctttagggnnnnnnnnnntttttaaggggaaaagg

SEQ ID NO: 4029 - DNA, 3306 bp, Homo sapiens
  SIMILAR (249)..(1286): 1001254mologous to Homo sapiens retinal degeneration slow protein,accession number U07149,Smith-Waterman Score=1843.
  misc_feature (1)...(3306): n = a,t,c or g
gaattcttcagcgcccaggaccaggactatcccctgctcaagctgtgattccgagacccctgccaccactactgcattcacggggatcccaggctagtgggactcgacatgggtagcccccagggcagctccctacagcttgggccatctgcacttttcccaaggccctaagtctccgcctctgggctcgttaaggtttggggtgggagctgtgctgtgggaagcaacccggactacacttggcaagcatggcgctactgaaagtcaagtttgaccagaagaagcgggtcaagttggcccaagggctctggctcatgaactggttctccgtgttggctggcatcatcatcttcagcctaggactgttcctgaagattgaactccgaaagaggagcgatgtgatgaataattctgagagccattttgtgcccaactcattgatagggatgggggtgctatcctgtgtcttcaactcgctggctgggaagatctgctacgacgccctggacccagccaagtatgccagatggaagccctggctgaagccgtacctggctatctgtgtcctcttcaacatcatcctcttccttgtggctctctgctgctttctgcttcggggctcgctggagaacaccctgggccaagggctcaagaacggcatgaagtactaccgggacacagacacccctggcaggtgtttcatgaagaagaccatcgacatgctgcagatcgagttcaaatgctgcggcaacaacggttttcgggactggtttgagattcagtggatcagcaatcgctacctggacttttcctccaaagaagtcaaagatcgaatcaagagcaacgtggatgggcggtacctggtggacggcgtccctttcagctgctgcaatcctagctcgccacggccctgcatccagtatcagatcaccaacaactcagcacactacagttacgaccaccagacggaggagctcaacctgtgggtgcgtggctgcagggctgccctgctgagctactacagcagcctcatgaactccatgggtgtcgtcacgctcctcatttggctcttcgaggtgaccattacaattgggctgcgctacctacagacgtcgctggatggtgtgtccaaccccgaggaatctgagagcgagagcgagggctggctgctggagaagagcgtgccggagacctggaaggcctttctggagagtgtgaagaagctgggcaagggcaaccaggtggaagccgagggcgcaggcgcaggccaggccccagaggctggctgagggccctggggcccctcccctcccgaacactgagaaatagtgcactccaagaaacgtggatctccccctcatccaactccgaaagtctgaatctcccaaggagggcaccatcttacagagactctccctgacggtggaatttaagtttagggtccctaaaagcatttgacacacagttgttgaatgactgacccaaaatgtgaatgaagctaatgtgaatgtgagtgaagctcccttcaggcccgctgccctaggatatgccctcctggtgactcgggggctgtctcagacgactagcccaggacccatctttctcacacggatttagtcccaccctatggccactggccgtatctgagggctgctccccttttagaatttacctcttatgagctccatgttgcttcactctatccaaagtgtcacttggtgcataagcacagaaatctgaaaaatggccatgttgtctttttttttttttttttttaatgccaagattgacaggttggccgtttgcttaatgccagaagttgggggaaagttacacttttctaagaataatggactcttaaggcattgagggctctaaacaggattctttaatcatggagcaagagaatttcaaggcaggggattttatcccccaccaaaaacacagtgaaaggcctgcttttgtgtcccattcacatgccctcggtcactgagtctggagtgaaccacgggttgaggaagtcaggctgttggcgtgtcccagcaccacaccatccctaaagtgccaggtgatctcctgtggctcatcggtggaagcagtggggtaggctgctgccctgctgtggaagaggagcaacaatcagacatgagtccaccctttggagaccaagcctcagctctttggtggggcccagggacacgccacacaggtggccatcacagccccatggacaacactaattgtccacagcaaagggcaaggaatcctctgggagcttcttccgtttcttcccccaagatacccatcttgaaaaacactatttctggaatgcttctgcatcaaaggagattctttgagatagcccatcttcctgagcttagcaaatacaggagttttcactttctttaggaaagagaagctttcaggggaaggagagaatgattttgctgacttcccaagccctggtgaccagacccaaggcagggcccagcataattccctccagttggatgaacattcaaagagagctcgttccctaccctggctggagaacccgaggccagaaggcaaaaaccagaaagggaacagtccataacttacctctgcttctgaccgatggtgtttggggaataggttactttgggactgagttttggggtcctttggtgtcctaaggaactttagtgtagagaaaataagacttctggtgctgctggggtatgttcttgggcttaattcccccaagcagaagaccagatccaagatgtttggacaccctgtcagacgttggtcccaagtttaattagatttctgaatctcgttgaggccaaggaatgatccatactgaaaaaatgctgagccagccatctttggcaaaggtccctgagctcttgctatctctcaagagtgctgagaaccacggtgaaagtgctgctctaggcccacaagtgtaactatgctgttaacagctgtcaatagataattaaaattcatactgtgtgnnnnnnnnnnnnnnnnnnnnnnnnnnngggggggcccttttaaaaaaacccttgggggggccaaatttaacgggggatggaaaagaaaaatttttttccttaaggggggggtaataaaaaccagggccgggcccggtttttaaaaagggggaaagggaaaaaaccgtaacttgggaatttttgaaaaaaaacttttttttggggggggaaaaaattggaacaaccccccaaaaaaaattaaaggctttagggnnnnnnnnnntttttaaggggaaaagggggaaaaacaaccggaaaagcctgg

SEQ ID NO: 4030 - DNA, 396 bp, Homo sapiens
  SIMILAR (1)..(396): 891254mologous to Homo sapiens dJ37E16.6 (novel protein),accession number Z83844,Smith-Waterman Score=610.
aacaagaagaagaagcgagatggtgacgaccgttggtttaggctcgttcttagcttcgacgaggagaagaggcgggagaaggcagccattgaggagattaagcagcggctgaaagaggagcagaggaagcttcgggaggagcgccaccaggaatacttgaagatgctggcagagagagaagaggctctggaggaggcagatgagctggaccggttggtgacagcaaagacggagtcggtgcagtatgaccaccccaaccacacagtcaccgtgaccaccatcagtgacctggacctctcgggggcccggctgctcgggctgaccccacctgagggaggggctggagacaggtctgaggaggaggcgtcatccacggagaaaccaaccaaagccttg

SEQ ID NO: 4031 - DNA, 438 bp, Homo sapiens
  misc_feature (1)...(438): n = a,t,c or g
ttttttttttttttaaggagtggctgagaatttaatactggtaaacactataaattgtaaatgtaagttgtaaatgaccttgtcactggagaggggagaaggaactggagtcagacgtcccagcagaaacagcagcggcaacatgcggtaggcacacctggagagcaacaggcactttggtaagtggttcatgcacatggtcttattttagtctcggggcagccctaagaggtaggtatctggtgtcaccttacacatgacgagacaaaccagagaggtcagcacagcaggaagctcatgcaggcgaccaagcaggcagagcctgggntttcaaacccgagccctgctgtgtgcaagaacccctggggacttcagctgttcctgcttcacagcaggctgagcacccagagccacttggagggcccataataggcacca

SEQ ID NO: 4032 - DNA, 542 bp, Homo sapiens
  SIMILAR (124)..(519): 571254mologous to Homo sapiens R32184_3,accession number AC004528,Smith-Waterman Score=282.
cggcacgaggggcggcggcggccgggggcccgtgaggggagcggcggctgcgagggcggccgatggcggccgggaggcgccctcggacacttgcgggtcgcttagggcgcgacgctgggaggcatgtcggagcacgtggagcccgcagcctccggggcccgggcccaacggcggcggcggcggcccggcccccggcgcgcgggcctcggcacccccaattctcaaccccaacccccctcatcaacgtgcgcgaccggctcttccacgcggctgttcttcaagatggctgttcacctatttcgcggctcttcccgcccgccttccgcccgtctcttcgagttcttcgtgctgctcaaggccctgtttgtgctcttcgtcctggcctacatccacatcgtcttctcccggctcgcccatcaacttgcctggagcacgtgcgatgacaagtggccgcgtgaaggcaatcctgcgttgtggaaagtgcggcacaactcgagccgcgcgcccgtcttcctacagattctgtgaccagcggcggccgc

SEQ ID NO: 4033 - DNA, 936 bp, Homo sapiens
  SIMILAR (35)..(547): 761254mologous to Homo sapiens dJ37E16.6 (novel protein),accession number Z83844,Smith-Waterman Score=607.
tcttcagggagaggaagccggcggcctcactgctatgggccgcaacaagaagaagaagcgagatggtgacgaccggcggccgaggctcgttcttagcttcgacgaggagaagaggcgggagtacctgacaggcttccacaagcggaaggtcgagcgaaagaaggcagccattgaggagattaagcagcggctgaaagaggagcagaggaagcttcgggaggagcgccaccaggaatacttgaagatgctggcagagagagaagaggctctggaggaggcagatgagctggaccggttggtgacagcaaagacggagtcggtgcagtatgaccaccccaaccacacagtcaccgtgaccaccatcagtgacctggacctctcgggggcccgggctgctcgggctgaccccacctgagggaggggctggagacaggtctgaggaggaggcgtcatccacggagaaaccaaccaaagccttgcccaggaagtccagagaccccctgctctctcagcggatctcctccctcacagcatcactacatgcacacagccgcaaaaaggtcaagaggaaacatccccgacgggcccaggactccaataaagcccccaagggcccctcgtaccagcaaggcccagcgcctctgtttgtgtgtgggtggtggtgtgtggtgggtggtgtggtgtgttggtggttgtgtgtgtgtggtgtggtggtggggggggtgagtgttttctttcttagcttggctgtccctgtagcccagcctgcacctaggtgtgcctaccgcatgttgccgctgctgtttctgctgggacgtctgactccagttccttctcccctctccagtgacaaggtcatttacaacttacatttacaatttatagtgtttaccagtattaaattctcagccactcctttcaaaaaaaaaaaaaaaa

SEQ ID NO: 4034 - DNA, 1257 bp, Homo sapiens
  SIMILAR (604)..(633): 901254mologous to Homo sapiens Human secreted protein, SEQ ID NO: 4483,accession number AAG00402,Smith-Waterman Score=55.
  misc_feature (1)...(1257): n = a,t,c or g
ggacatagaaaagacagtacaaaggttgtaagtgtcctgtcgctaattcccagggccagaatctcacaagaagatcctctcaaagacttaaaagcctggcttacaaaaataaccagaaaccaaacttgtaagcagttacaatttcttccttttgcttcttgaccagctgagatacagaatatcttgaggtctggttcagctgatgaaaaattctgtctcagaaacgatgagtaagaaaccatacaagaaaaagaagtccctcatctatctgcatacacgcaatgtgggagaagtggggtggctaggaaactctgggcctgctgcccccttcgattctttttttttttctttgtgaattgaatgtacgatacaaatggtaggccttcatgtgagccagttactacatgaatcttcatttcccacagtggtttgttcattcatcagcgttaggcttggtcctggctccacctttctcctctccgggcactgaccccacctttccgtgtatttactgtaggctattaaatatgatcatgacccgccttgcattttcattcatcacctgtttatgcccaaatttaaaggaagtttggctctttttggccaaaaaaaaattgtaatagtcggcacgctgggatttgtaggggccagcaaaattgcgggcagtggaaactagtttcacttcttaaagcccttccatttcccacaaggtttaaggctctcggaaaccccatttgatcctttggttcctatttcgatcctccttttggaatctgaaaatcggtctccatgttgtatggcaggattaggaagtttgccttgtttgttaactcttccaacacagggtatcagggagaaagaggccttatctgttcctccatccccccatgttttgacagactgctaaggaattcctcaggacttcctttggttgggggattttactttcccaaaagtctggatctgatttctttcaggggtaggacaagcttggtcctagtgctctgcttcaggtcttatcagaaggaaacccagggaataggaaaaggtaggatgccttgacttttgtccctgttgtgggggacttaaagtgttttttgccagaattgttcaaaagctccggtttcaaactctgtaggagttttcatggggaaaaacaaaacaaaacaaaaaaggtggcttattcgtccccggagatgttgtnagtaaggttcttccagcacggctttggggttttncccaantggggaagccaag

SEQ ID NO: 4035 - DNA, 383 bp, Homo sapiens
  misc_feature (1)...(383): n = a,t,c or g
ntgtacagaatcgaactctgcacttctctctcctttacgagccgaaaaggaaaagcaagccagaatcttatttatattgttataaaatattccaagatgagcctctggccccctgagccttcttgtaaatacctgcctccctgtctcaaatccaatagttcacagctgagctggcttctgtggtgtgtgctcgtttggggggtggggtggaaatactgccaaggctggggggggccacctctccatctggtcagtttgtggggtgggtactctgccagcagatgggaggatatagggaaacagcacacaagtctaaggggggtgcccaagggggttattttcatcatatatatataacataaatatatagtaaaatagacgag

SEQ ID NO: 4036 - DNA, 358 bp, Homo sapiens
  SIMILAR (285)..(40): 871254mologous to Homo sapiens triiodothyronine receptor,accession number M24899,Smith-Waterman Score=363.
  misc_feature (1)...(358): n = a,t,c or g
actccttctccttccccatcggccttctggggggcttcagggagaggctgcattgcctgcnaggtccttcgcanactccggttcctcctcagaggagctcggggagtccgcctnactgctgtcgtcntccccacagaccgctcgggcatgganaattccgcttcggtggagcagctccaggagacgctgctgcgggctcttcgggctctggtgctgaagaaccggcccttgganacttcccgcttcaccaagctgctgctcaagctgccggactgcggacccttcatcagcagcttgggccanaagtgcggaatgttgtgtttgcggtggttgacgtagtgctcgaacgccagcaggt

SEQ ID NO: 4037 - DNA, 2514 bp, Homo sapiens
  SIMILAR (2103)..(634): 1001254mologous to Homo sapiens triiodothyronine receptor,accession number M24899,Smith-Waterman Score=2575.
  misc_feature (1)...(2514): n = a,t,c or g
cctgctcagtgccatgttcgacttcagcgagaagctcaactccctggcgcttaccgaggaggagctgggcctcttcaccgcggtggtgcttgtctctgcaggtaggtcaggctctcgcctgacccgggggaggaggcagacgcagttcaattcaacacacctnnnnnnnnnnnnnnnnnnnnnnnnnnnnnnnnnnnnnnnnnnnnnnnnnnnnnacatgattcagacacagtctagcttgggaaacagactcatgcccgactaattataaaacagtgagataagtgtcacagtagaagcatgaaccaaggaagcacagacaactatttctgcctgggggagctggggaaggaggtgacacttgagttggggcctcaaaggacaagtaagatgttgccaggcagagaaagggggaagggcatcccaggcagagggaactacacagcaaaaagcaagggagtctggccatgtttggcctgctgaggaagggaaggtggtcttacgggatgggaggtgaccagccctgctgagcccacgctcccagctttcaggcacctcctgctcttggggcagaggcctgggagaaggtatggcactccttctccttccccatcggccttctggggggcttcagggagaggctgcattgcctgccaggtcctcgcagacctccggttcctcctcagaggagctcggggagtccgcctcactgctgtcgtcttccccacagaccgctcgggcatggagaattccgcttcggtggagcagctccaggagacgctgctgcgggctcttcgggctctggtgctgaagaaccggcccttggagacttcccgcttcaccaagctgctgctcaagctgccggacctgcggaccctgaacaacatgcattccgagaagctgctgtccttccgggtggacgcccagtgacccgcccggccggccttctgccgctgcccccttgtacagaatcgaactctgcacttctctctccttcatcagcagcttgggccagaagtgcggaatgttgtgtttgcggtggttgacgtagtgctcgaacgccagcaggtacgcctcctgactcttctcgatcttgtccacacacagcaggcccgagcggtctgttgacattagcagcacagcctgcagcagagccacttccgtgtcatccaggttaaaggcagagagtgacttgcccagttcaaagatggcgtcggagactacgcccaggccgccattcttgagctgctcccgcttgacagccatctccccactcagcgtcagggtgtcgctctcagggtcgtagcggacagccgcccgcagggacatgatctccatgcagcaccccttcaggaggatgatctggtcttcgcaaggcagctcggagaacatgggcagttttttggcaaagtccaccacacgggtgatggccggggtgatgatcttggtaaactcgctgaaggcttccaggtccaccttgtctccgtccggcatggagacaatgggtgactggccaatgtcatcgggcaggaatttccgcctctgtttccaatggctgccctgggcattggtgctgcgatgggcctctgtggcaatgtggatcagatcccactcttcaggagtgggctctggtcgctgctgcagtgatcggatcatctcctccttccgccgccgctcccggttctgctcaatcagcttacgcttggccacccgcttcgagtcatctagaaccaagtccatggccatgcccacggcgatgcacttcttgaagcggcacagctggcactgattgcgggtgatcttgtcaatgacacagcagctgtcatatttgcaggaataggtgggatggaggttcttctggattgtgcggcgaaagaagcccttgcagccctcacaagtgatacagcggtagtgataaccagttgccttgtccccacacacgacacactgctcgtctttgtccaggtaactagggatataccctgacatgctggttttcagggaacattggccgttctttctttttcgctttccatctggtgacctggcactgttctcctctgggtctgacccacactccaccttgcttggcttctgttccattcacttcaattccatccaggatgccctccagcacgccaagagactggggtgggcacactggcccccccggcacacccacaggccacccaccccctgccacccaggccctagggcacagcacccatgatacccgcctcagcacttggcctttcacaccatgccctgcgccccaaggggggcgggcggtgggaggggccagggagtggcaggtgggagggctgggggcaagctgggtttgtgggtcccgggctgtgtgctgggggagtagcttcggagtcttgtcctgtccagagatccctggcgtggcgcgccggaccgggctgggcagcgacgcgggggtctcagcgccccgtgctgggggcgtccatggggggccggtggggccgggccgcccgcctcctgcgcccgggg

SEQ ID NO: 4038 - DNA, 2809 bp, Homo sapiens
  SIMILAR (628)..(1929): 901254mologous to Homo sapiens triiodothyronine receptor,accession number M24898,Smith-Waterman Score=2049.
ccgaggcgctccctgggatcacatggtacctgctccagtgccgcgtgcggcccgggaaccctgggctgctggcgcctgcgcagagccctctgtcccagggaaaggctcgggcaaaaggcggctgagattggcagagtgaaatattactgccgagggaacgtagcagggcacacgtctcgcctctttgcgactcggtgccccgtttctccccatcacctacttacttcctggttgcaacctctcttcctctgggacttttgcaccgggagctccagattcgctaccccgcagcgctgcggagccggcaggcagaggcaccccgtacactgcagagacccgaccctccttgctaccttctagccagaactactgcaggctgattccccctacacactctctctgctcttcccatgcaaagcagaactccgttgcctcaacgtccaacccttctgcagggctgcagtccggccaccccaagaccttgctgcagggtgcttcggatcctgatcgtgagtcgcggggtccactccccgcccttagccagtgcccagggggcaacagcggcgatcgcaacctctagtttgagtcaaggtccagtttgaatgaccgctctcagctggtgaagacatgacgaccctggactccaacaacaacacaggtggcgtcatcacctacattggctccagtggctcctccccaagccgcaccagccctgaatccctctatagtgacaactccaatggcagcttccagtccctgacccaaggctgtcccacctacttcccaccatcccccactggctccctcacccaagacccggctcgctcctttgggagcattccacccagcctgagtgatgacggctccccttcttcctcatcttcctcgtcgtcatcctcctcctccttctataatgggagcccccctgggagtctacaagtggccatggaggacagcagccgagtgtcccccagcaagagcaccagcaacatcaccaagctgaatggcatggtgttactgtgtaaagtgtgtggggacgttgcctcgggcttccactacggtgtgcacgcctgcgagggctgcaagggctttttccgtcggagcatccagcagaacatccagtacaaaaggtgtctgaagaatgagaattgctccatcgtccgcatcaatcgcaaccgctgccagcaatgtcgcttcaagaagtgtctctctgtgggcatgtctcgagacgctgtgcgttttgggcgcatccccaaacgagagaagcagcggatgcttgctgagatgcagagtgccatgaacctggccaacaaccagttgagcagccagtgcccgctggagacttcacccacccagcaccccaccccaggccccatgggcccctcgccaccccctgctccggtcccctcacccctggtgggcttctcccagtttccacaacagctgacgcctcccagatccccaagccctgagcccacagtggaggatgtgatatcccaggtggcccgggcccatcgagagatcttcacctacgcccatgacaagctgggcagctcacctggcaacttcaatgccaaccatgcatcaggtagccctccagccaccaccccacatcgctgggaaaatcagggctgcccacctgcccccaatgacaacaacaccttggctgcccagcgtcataacgaggccctaaatggtctgcgccaggctccctcctcctaccctcccacctggcctcctggccctgcacaccacacgctgccaccagtccaacagcaacgggcaccgtctatgccccacccacggtgtatgcagccccagaaggcaaggcacctgccaacagtatcccggcagggcaactcagagaatgttctgctgggcatgtcctatgaacatgttacccgcatggacgcagtggggcgaacggttgcaggagatctgggaggatttctccatgagcttcacgcccgctgtgcgggaggtggtagagtttgccaaacacatcccgggcttccgtgacctttctcagcatgaccaagtcaccctgcttaaagggggtgcccttttggagggcggaaggccccctttggtttgttgttcaacgtgaaggaccagacagtgatgttcctaagccgcaccacctacagcctgcaggagcttggtgccatgggcatgggagacctgctcagtgccatgtttcgacttcagcgagaagctcaactccctggcgcttaccgaggaggagctgggcctctttcaccgccggtgttgcttgtctcggcagaccgcttcgggcatggaagaattccgcttcggtggagcagctccaggaggacgctgctgcgggcttcttcgggctctggtgctgaagaaccggcccttggagacttcccgcttcaccttgctgctgctcaagctgccggacctgcggaccctgaacaacatgcattccgagaagctgctggtcctttccgggtggacggccccagtgaccccgccccgggccggcctttctgccggctgccccctttgtacagaatcggaactctgcacttctctctccttttacgagacggaaaaggaaaagcaaaccagaatcttatttatattgttataaaatattccaagatgagcctctggtcccctgagccttcttgtaaatacctggctccctcccccatcaccgaacttcccctcctcccctatttaaaccactctgtctcccccacaaccctcccctgggcctctgatttgttctgttcctgtctcaaatccaatagttcacagctgaaaaaaaagaaaaaaaaaa

SEQ ID NO: 4039 - DNA, 2493 bp, Homo sapiens
  SIMILAR (173)..(427): 881254mologous to Homo sapiens triiodothyronine receptor,accession number M24900,Smith-Waterman Score=350.
  misc_feature (1)...(2493): n = a,t,c or g
ggatcccaaagccatccttccacctgggctccctcattggccattcagaaacaacccccactctactgagaaatcgaaggcagcaccgctaaaccctctggcaaactacaggggcgatttggtcagtgctcctcccaccacacccaggatgactgttccccttccctcctaggtgctgatggtgcgctttgcttcgttgttcaacgtgaaggaccagacagtgatgttcctaagccgcaccacctacagcctgcaggagcttggtgccatgggcatgggagacctgctcagtgccatgttcgacttcagcgagaagctcaactccctggcgcttaccgaggaggagctgggcctcttcaccgcggtggtgcttgtctctgcaggtaggtcaggctctcgcctgacccgggggaggaggcagacgcagttcaattcaacacaccttttatggagtacctactctatgccaggccctgcaccgggcactggggtatacagacatgattcagacacagtctagcttgggaaacagactcatgcccgattaattataaaacagtgagataagtgtcacagtagaagcatgaaccaaggaagcacagacaactatttctgcctgggggagctggggaagggaggtgacactttgagttggggcctcaaaggacaagtaaagatgttgccaggcagagaaaggggggaagggcatcccagggcagagggaactacacagcaaaaagcaagggagtctgggccatttgtttggcctagctttaggaaagggaaaggtggtcttacgggatgggaggtgaccagccctgctgaagtcccacgtttcccagtttttcaggcacctcctgctcttggggtcagaggcctgggagaaggtatggcactccttctccttccccatcggccttctggggcggcttcagggagaggctgcattgcctgccaggtcctcgcatgacctccggttcctcctcagaggagnctcggggagtccgcctcactgctgtcgtcttccccacagaccgctcgggcatggagaattccgcttcggtggagcagctccaggagacgctgctgcgggctttttcgggctctggtgctgaagaaccggcccttggagacttcccgcttcaccaagctgctgctcaagctgccggacctgccgaaccctgaacaacatgcattccgagaagctgctgtccttccgggtggacgcccagtgacccgcccggccggccttctgccgctgcccccttgtacagaatcgaactctgcacttctctctcctttacgagacgaaaaggaaaagcaaaccagaatcttatttatattgttataaaatattccaagatgagcctctggccccctgagccttcttgtaaatacctgcctccctcccccatcaccgaacttcccctcctcccctatttaaaccactctgtctcccccacaaccctcccctggccctctgatttgttctgttcctgtctcaaatccaatagttcacagctgagctggcttctgtggtgtgtagcgacccggggggtggggtggaaatactgccaaggctggggggggccacctctccatctggtcagtttgtggggtgggtactctgccagcagatgggaggatatagggaaacagcacacaagtctaaggggggtgcccaagggggttattttcatcatatatttattacataaatatatagtaaaatagacgagcaacaattaccataaaaatatctttctttaaaatcctgacccaaaacacaacggggtgaaaaatcgcacataacagacatactgattgtcaacgtggggcaggagtaggagcccctcaagtcacccctgccggtcccacccctccctggggaagagacctacctccttccctgtttctggccacaacccccctccccccagcccagcaccagcttctcatacattcagtagcgcctctgggcagtgtccccctcccccccgcccaggagttcccagggcaggagttactgtcctccttatggacggtctctctctcacaacgccctgccctctcccagccctgcagacccgccaccaggagaaggggtaggggctcctcccccaccctccccaagtctgagcagggaggaggctggatgaggtatgtgtgttatgagtgatgggaggggcaatactgagatggagaggcgggtggtgagggcggggtagtggtcatggctctggcaaccccttgtcctggcctggccccctcgtcctattcccagcaacccgtcctcccaccgatactgcacctgctgctccaccctgcctgccctagtgccccgggccaatactgggggaggcatgctgagcacccacatcaaggccatccccctcattagcaccaatggcccccaggagagggccctgtcccccacttccacagcagggactgggacagctgccgctctagagcaggtgcgtggcactcctg

SEQ ID NO: 4040 - DNA, 398 bp, Homo sapiens
  misc_feature (1)...(398): n = a,t,c or g
nggggtttccccctaaaaagggcccttattaaaaggcccttgaagggttttttgcccccgtttaaaaaattttccccttcccccgggaaaaaaaaggtttttggaaaaaggaaaaaaaggggatttttggccccgggaaaaagggaaacccccgccttttttgattagccccccccaaagtttaaacccagttttgttttggggttttttttaaaagcccatttcgggaaaaggtggccttttaaaaaaaaagtttcccgaaaaaaaaaggggatatttttccctttttttttgggttggggcaaattcccccgttgtttttggggaaccccgtttccaannnnnnnnnnnnnnaaaaaaagcccnnnnnnnnnnngggcggccgctcgcgatctaaa

SEQ ID NO: 4041 - DNA, 1908 bp, Homo sapiens
  misc_feature (1)...(1908): n = a,t,c or g
catttttgcaacaggcttttattactttttttttaaaaccccatataagcaaagcacatttaaaaagaaaatatcctggcaaacaaacacttaacacactggagcaacacaaccaaagaaggcactaccagccagttactcccaccttctgggagggaacgggtactcgatactatacttttttcagaggtttaggacctcagcataggccttgggtctaactgtgctttatgtaaagtctgaattgtccaataattttctcatttcataaacacccttatctctttatatataggctatatgcctttatgtgtaaaataatacatgaactttttttttcccttcctcaaaaaaataaaataggcccatccccccatagagggaaggttcctccagccagcatttcacagcggttgccagcaggacccatgcccttcctattaatgttagagacatgcaggacgaaggaaaatgactctcccacctgctccctttaatatacagcagggagagagtttctaaagggagggaagtgataaggctgagcatgagatggctaaccagggtcttttgtggtttaaaaaaatcttagagttgcggagcttgtgttgcctttgaagctcttggagactatgcacaagttcatacgacggaggggtcagcattccttctgggatcaaggggcagtatggactcagcctgggtcaggagagggaacttctgaagctacaccgaacaagcttgggcttgaaccgacccaagagggacttgggaaggcagaggatagcaaagaaatggtttctcagaggcctgggttggaaaaccagccctgcctttgaaaattacaagtccttctccctctgcactggagtgtcctctgcagcccctggcctacttgttggaattttttgactaaattaattttaggattcagccttaaacaaggaaacccattgcaaaatgtaagtcaggaaatttgatcctccctgtcaatgtggtgctggtatcacttgattggagtcaaaaactcaggcaccccagcatgggagggnaggtctgtgacccttcaaccccatactgaacgcgggctctcctggcccttgtctcccacaccgccgccattgttcacttcctggccaggagaagccaagcagcagagcttcaaggcaaactcgcccttacttccttatttctctctgacaccataaaggcatctgagatctacgggcaggccaggcccaccggctctcccgagcgcagtgccgggtctggccccatgccttcaaaaacagaaaggactcccaattggccgaaattggaggctcccctctctgtaatcaaggcaactccttgggcagcaccctggagatcccatagtcgcagtgggaggagggaggcagtgctggaggccgatggggaacccaagtagcccaggccctcctctgctctttagctggggaaggctgaagacagcttggacacctttctctagcattgcattgtggctttctcttaactgtcatgatttccatacttagcaggagactttttaaatggtcaatgactggcttcccttgggggaaccacatgacgatgatgacaacattaaattcaaatttgtaacttagcaacgaacattttagttgacaatatatgtggctaagtaccacacatacgcagatatatgcctttgggtttccatgtccaatgtgggccagggccagagccagggccagggcaggctgcagcttctctggagatctttgagccagcctcagctttggtgctccttaccctgagcatctggggccagtagctttataaacttcccttaagtgtgaaccacaggcaccttggggccgcgggaacagtccttttatgagcattaccctgctttcaggggcttag

SEQ ID NO: 4042 - DNA, 612 bp, Homo sapiens
  misc_feature (1)...(612): n = a,t,c or g
gcttcaagggtggcttaacccaggtttggtggggtggtttaaaaccccttactcaaaagggttaagggctnccttgcccaattgccttgcccactttcaaattcaacattgttttcaaacaaggattttcttttatcttcccccttacaaaatcaaacccaagggaaggggcaacagaaatggggaaaacaggaacaacaggaatcctaaaactccaaaggggaactgtcccaccgaatgaaacactcaagaagtggaacaacccatcttcccgtcccacgctgtgcccccagaacagctgtccccatcccatgaaacacagggtaaacactctggccgggctccgcaccagtgggctccctgggcccatgggacagcggcagggctcaccacggacagcaacgtggcccagcagcccggccaccctggcgtccctggggcctcctcccctcctctccctctagaccttgtaaacctccacggagctgcctgtctgggataatttggggattttttttgctgggggataattgcttttgcataacccctaaagagcaagccacaccaggtctgctagctaggtgtaccgcggtgtggtggtggcggccgctc

SEQ ID NO: 4043 - DNA, 586 bp, Homo sapiens
  SIMILAR (441)..(527): 651254mologous to Homo sapiens Human secreted protein, SEQ ID NO: 7870,accession number AAG03789,Smith-Waterman Score=94.
ctgaatttcagctaatggccaactgtggtcaaagaatggctttcagttaaagttttgacttcttattataaataatataaagaatgtctcagtaattagaaatcccttaataagtagaacacatgtggcaagtaggactcctatcggtatacaaattccatttctttttataagaaaaacacataagaccattatcatttattcatgagccaaagccattaagaagataaatccagttatcacgcttcctgtctctgaagtttggatcattttatagatccacgcaatagagagcttccttcctatgaaacaaaaaccttgagatctcttttttttttgagacagagtctcgctgttgtcagcccaggctgggagtgcaatggcgcaatctcggttcactgcaacctctgccttccaggttccagcaattctcctacctcagctcccaagtagctgagatgacaggcgtgtgccaccacgcccagctaatttttgtatttttagtagcgatggtgtttcacttacattgggccagggtggtctcgaactcctgacctcaggtggaccacccgcctcagcctcccaa

SEQ ID NO: 4044 - DNA, 693 bp, Homo sapiens
ctgcccagggatgccagcagagagggatgcagactatgggacattctaaatcagtgctgttcaagagacctttccatagacgtggaatgttctctgtgttgtcaaacagggcagccattagccacatgtgggtagtaagtacttgaagtgtgacttaatgtgaccaagggaactgaattttaaattttatttactttaaattaatttaaactgaaaatagcgacatgtggccagtggctaccacattggatacagccttagattcctcccagaccagacaaccttctgtggcctccaaagttgcaacagcaaactcacactgtgggcagccaggcctggagtggggcccagcaagccgcatcctggggtcaggtctggccaactaattatctactgtctatggtcacattagtgctacaatggcagcatcgagcagttgcaacagagatggtgtggcctgcaaaactgaaaatattcatatttactatctggccctttacagaaaaacatgctgacccctgcactacagcaattagttttggagagaacattcctgataaaagcttacatcttctctcaaaacatgacacgcaatagcagtggattctcgaggagtccttctagaatccaccccagaatcctatcctacagaatattctggggcccgtttacccctcgtgcaaagcgtggcga

SEQ ID NO: 4045 - DNA, 468 bp, Homo sapiens
  misc_feature (1)...(468): n = a,t,c or g
ggggtnaacgagngccggnnttaccgatnaccttttgactngnanaancanannnnaagnnnggcacgagggctctatcctggcacggagcagcctgatgtgccaggaccatgggaggaacgccatctggctggcactgctgcacacccgccgagccttcctgtagccccagactttgtggtacccattatcatcacgcctgtcatcattgacccatcttcttggtggggcaaggatgatgcatgatgaaggaaggtcctttccccctgcagcccccttacgcctggcagcagacaagcagagtggcctctttgagagcacagaggatggtagcaccctacctgcaaggaggccgggcagggaccctaaatgccacgaggcctgttttgctcaccaacttggtgggcatttcatgggtgcttatgttctaggactttaccgtaaataacacctcctccctgatttcan

SEQ ID NO: 4046 - DNA, 458 bp, Homo sapiens
  misc_feature (1)...(458): n = a,t,c or g
agccttggcgngncnnncctgatactgagttcctcgnncnccagnnnnggacgagggctctatcctggcacggagcagcctgatgtgccaggaccaggggaggaacgccatctggctggcactgctgcacacccgccgagccttcctgtagccccagactttgtggtacccattatcatcacgcctgtcatcattgacccatcttcttggtggggcaaggatgatgcatgatgaaggaaggtccttcccccctgcagcccccttacgcctggcagcagacaagcagagtggcctctttgagagcacagaggatggtagcaccctacctgcaaggaggccgggcagggaccctagatgccaggaggcctgttttgctcaccaacttggtgggcatttcatgggtgcttatgttctaggactttaccgtaaataacacctcctccctgatttcagacgga

SEQ ID NO: 4047 - DNA, 656 bp, Homo sapiens
  misc_feature (1)...(656): n = a,t,c or g
agaatgcctcacttcgctcagttcatcactgcaaaggtggcatgctcctccagcccttcctgcccaggttaacaagccccatgctgcttgtttcaaatggcaactaaaagcaagccagtgttgggctgttctgacacctctgtggtcctcctggaggggaactggctccttgtggggtaaaggganagccccagcccaacatccaaaagctctgcatccaatgcctatccccttgaaagcccaactgccttggtgaaggctgttccctagaagtcccagatgataaggcttcccaaactccttccctatatcctaaataagcgggtattaaaaacaacaaaggcagtggccagtagaaatgtatgggttcccagaaatgaggctgtatttctgggaagatgtaaaggagctgctttgcttttaggggaaagtagatatcaatactttgaagccacaaggacactatgaagaaaaccattactctttcaggtcaagaggtgcaatgactatggattatttaaaaactgaaaagctaagcttgagtggcccaatatcagcacggaagtggttttttttttttgtttgtttgttttcctgagactggagttttgctcttgttgcccaggctggagaaaacaatatataggattttaccc

SEQ ID NO: 4048 - DNA, 441 bp, Homo sapiens
cggtaggcccccgaacccaatgacagcatggaggaccaggctccaggtgtgaggcatcccccattgtccaatgtgaaaattcagggatcagaatagatgcattacctgttcccctgtttggctaagctcctgtaggatgtgacctgcccaagagtcaagaaagtcccagcacaccattacagccccaggttcggcccagcaccatgcacagagcaccagtggcttttcacagcttgggttcaacttcctgtttttaaagatacagtagccctttttcagtatcagcatagactttgggggcattttttaaaaaactgccattaagacaaattccttcagctcagcatgcattggcttggcaacatggtgggcacggcccctaagaacctcgcaatccaaatccagcgtgaggttgtgcttactgtcccatgacattgtgcc

SEQ ID NO: 4049 - DNA, 6995 bp, Homo sapiens
  SIMILAR (144)..(1301): 231254mologous to Homo sapiens mucin,accession number M74027,Smith-Waterman Score=150.
atgaaatcgcggagccgacttgctcggggtccccgcgccgccctcctccctccgccgccctccccccgagtccccaaggtccattatatcacttttatgcctttctgtcctcatagcttagctcccacttataagccagcaccatttgttcaaaagattgtcctttccccagtgagtattcttggcatctttgccaacaatcagttgtctcggcaacgcggtggtggagagctactcggtgctgggcaactgccggccctccgacccttacagcatgaacagcgtgtactcctaccactcctactatgcacagcccagcctgacctccgtcaatggcttccactccaagtacgctctcccgtcttttagctactatggctttccatccagcaaccccgtcttcccctctcagttcctgggtcctggtgcctgggggcacagtggcagcagtggcagttttgagaagaagccagacctccacgctctgcacaacagcctgagcccggcctacggtggtgctgagtttgccgagctgcccagccaggctgttcccacagacgcccaccaccccactcctcaccaccagcagcctgcgtacccaggccccaaggagtatctgcttcccaaggcccccctactccactcagtgtccagggacccctccccctttgcccagagctccaactgctacaacagatccatcaagcaagagccagtagacccgctgacccaggctgagcctgtgcccagagacgctggcaagatgggcaagacacctctgtccgaggtgtctcagaatggaggacccagtcacctttggggacagtactcaggaggcccaagcatgtcccccaagaggactaacggtgtgggtggcagctggggtgtgttctcgtctggggagagtcctgccatcgtccctgacaagctcagttcctttggggccagctgcctggccccttcccacttcacagatggccagtgggggctgttccccggtgaggggcagcaggcagcttcccactctggaggacggctgcgaggcaaaccgtggagcccctgcaagtttgggaacagcacctcggccttggctgggcccagcctgactgagaagccgtgggcgctgggggcaggggatttcaactcggccctgaaaggtagtcctgggttccaagacaagctgtggaaccccatgaaaggagaggagggcaggattccagccgcaggggccagccagctggtcttctaccagcacaagaacctcaaccagcccaaccacgggctggccctctgggaagccaagatgaagcagctggcggagagggcacgggcacggcaggaggaggctgcccggctgggcctgggccagcaggaggccaagctctacgggaagaagcgcaagtgggggggcactgtggttgctgagccccagcagaaagagaagaagggggtcgtccccacccggcaggcactggctgtgcccacagactcggcggtcaccgtgtcctcctatgcctacacgaaggtcactggcccctacagccgctggatctaggtgccagggagccagcgtacctcagcgtcgggcctggcccgagctgtctctgtggtgcttttgccctcatacctgggggcgggttgggggtgcagaagtctttttatctctatatacatatatagatgcgcatatcatatatatgtatttatggtccaaacctcagaactgacccgcccctcccttacccccacttccccagcactttgaagaagaaactacggctgtcgggtgatttttccgtgatcttaatatttatatctccaagttgtccccccccttgtctggggggtttttatttttattttctctttgtttttaaaactctatccttgtatatcacaataatggaaagaaagtttatagtatcctttcacaaaggagtagttttaaattccatttaaaatgtgtatttattggattttttaaaagcgacaatagtaatggtaaaggatgggcaggaaaggccagtagtgctcccccgcccagtctcgctgggtctggcgagccaagcccctcgggcgctggcgaggtcctcagccatctgcccctcgagagccaagcgcggacggtagccacccagttcatccctcccgacatacaccccttccctttggggaagggagcctcaggacagcttctgtcctctctgataggatgggagagtctgcagaaaaccatctggggtcccttttccagtccccggcttggagtcgaagggcagatgcaccccaggccagccccacgagatgctggcatagctttccccagaaaccaggttggaagtagatggcttcaagcttgctagtctccacactgaatcctctgtccgttatttatggagtcacacgatgtcatggttcactaggcagcacctcacgctggagctggagtgcgagggttcttaggggccgtgcccaccatgttgccaagccaatgcatgctgagctgaaggaatttgtcttagtggcagttttttaaaaaatgcccccaaagtctatgctgatactgaaaaagggctactgtatctttaaaaacagggaagttgaacccaagctgtgaaaagccagtgggtgctctgtggcatgggtgctgtgcggaccctggtgctgtagtgatgtgctgggactttcttgactcttgggcagggcacatcctacaggagctcagcagaccagtgtaacaacagttaatgcatctatcctgatccctgaatttccacattggacaatggtggcatgcctcacacctgagcctgctttctccatgctgtcattgggttcgggggcctacacttaacaattttaaagtgcaagagtcaaacattttcaacaggttgctataattttcctccctaattggtgccatttctccatttgatcattttctttttttcctttctcccctcttcatccactttaatatagctgttctgaaattctggtgcattcattcggttctttgaaatgagaatgtggtgcttaatttttgtgacgttgtcgagagaggttgggcctgatgggagcaacactcatcatcaccaagtcaaactttgttggagtgttggtttttcttgtgatattagcagaaatgatctcatgctagccatgtggatgtgtgtgtggtgaatggggggcttcatcaggacacacagaggggaatgtggccacacggtggatgaccaccaagccctgagatgaacaggtatttactgagcagttgtattcagatatgggtcttcatgaatcatgtttaacaatcagatgacccgcctataggcaagttccctgagcttcccgggtgcccttgagtaagagctgagaaccggcctgctgggtgtttactgtatctgtttggaagcactggcggagggtcgttgtaagatgtcctgagcatttatgtggtctggttttaactgtaaatagtgaaagatttttttaagcacttttgcctagatttaaacagcaacttgaaaaaaaaagtatgttttaacatgtaattgtgggagaaattgtaaatagtagctgaatatttaatgtgctttgtctatcctccacttttaccatattctgtaaagttgcatttattttacaggacaaaaaaatgaaatattattgcttttgaaataaatacccaagagcttatcaggacttagaattattcagaactcagatttataggaaaacctctgaccttcagtttgacaagctaaaggaagcagagtctttaatgagcatgctaattttctagttttgaggaaaaattgggtcctttaaatgctattttgcttatcgcatcagtacttttatgcaggtctcatttgactccgtgcttagggtaggatgcgggggtgccttgaaaacttcattttaaatgatcttaaggcaaggaaatacaatattttacggaaacatttggagaatgtgaccgtctgtatgacccgtggaagccccaggttggctgttggtttggaaggtcccgagtgtaacccaggtgattctgatacttggcatgtgtgaatcttcctgatttatgttaaataaactcttcccctcatcaccctttggtaggaaagccattagatgaaaggagaaaccaatacaagctaaaaagcatgcgacgtctgtcccccccagccccaaacagccttggttcatcagtttcctgcagtaggagataggctgctgagaggtgagtcaagaggcagtctccattggatgtcccccactccccgcagaatggcgtttccagagttaggcggtgtggttgccgtgctcaagcccatgctgatttgtacactacatgtctaacctacctcaaatctcagtcattaaaattagcatgctttagacatatatttaaaaagtaactatgcacagctctttatcccccccttgctgctgaagctttcttaaagagaaaaatcaaatttttattttttactggcactatcattttttaagtcctaaagatgattaacagacatttttatcatggagaagaaaaataaagccattgcaactaaagaacctaacagcatgaccaagttcgaagagtcatattatagcaacggaaatcgatggcgtcttagtcatctccccagtgtgccctgtccacggacaccatccacgtgcagggcaaacatttggttccttttctgctctgttttgatttccctgcctgttgcgtgcaagggaagtgctcgtaaagttctgtgctacgagatttttaaaataaaaatcgcttcgcagcaggttctcacaaaataactggtgctagctcaagaaatcatcatctgaccatcagaaatcttgactaaaggtgttgcatggatttgggggtctttcggtttttggttttgggtctggcttttagcagggccaatgtttcccacaccccggcttcatgggtactgctttgccttctcaccaaggtgacgatggtgtgcgtggaaagagatgataccccaccgccccctcttggtccttccaccagcctcttttgggaacagtagtttgcagagcaagggatttttaaagcgctaaaggaaagaagtagcagagcttaactgctttgtaccacacagcagtagatgtgcaaggacggttgacaatgagtcgatgataacctaatttcattgagagaaacccagccagacttgcttctagaggtttaatcaccatgagatctcaaaccaaggcaaagctggtggaaaactatatgatatccctgacgtgcctcaaccagtatctctttccttttgttactgaagtgtgttttatggactaggaagcatttttatgaattgaaatagtctaaataaaatggtgctatggtgttttaatgtgactgtccctgatcctgtcttgctgaggtgctatcaacgttctgaaaccacaaccaaccaaaaacaaggtgggctccagtctcttggctttttttttttttccctcccctcttttggtgctgtcttagacccgtttaccgtgctataatctgctctgagcagtgttgtgttgtgttgtattgttcttcccttggtggccaaacaaagcaagtcgagaaggcagctatctccctttctgtgatcgggagtgggcctgcctggcttggcaggtgctttttggttccacacctgtcttctcaggcttgatgtgaaagaaagggcgaagggttttttgagtttttgtttttgaggaaggggagttgggtacttctgcctctcctagcatgataggcattctcatagccagggacagattttctcctgcagcccagggtgctaagcagacatctctgggagtcccaagggcacaccaagggagaccagatggatctccttcctcccctggcactggctgggaccatggtgggcaggggcttcattctctgacccagcgttgcttctgcctctcattggtaaccccttatgttcggactaaaggaaggagctttctttgctcactcgatgccactgaggctgctttttagttggtgctaacctaaatttcttcttgggtccacagaagttgatgttttaaaaactcaccaggaagctccattttgtgtcatccactgtcacaataatttttttaaatacctcaaaaacaggacatcatgacaacttcagtaaagtagattccatgagggtctgatacctgcaggttgtccgtctgatgacatacttgaccttgaaaaatctggggtcattttgtttttcattcttcagcagttaagatagcggaacgccgaaaggaaggagcgtagttggctgtatttcatgtttaagttttgcttttgaataaaatgtgaatttcctatgcccatctcattgagctttctcagtcattgttgctgtcatttgaaatgactccctcaaaacctagttttattagccagctgcctctgctgtagtacatggccaacttcaacataccctggaccaaaacatttttgaggtgcatacccccaacataagttacacagtcccacatccaggtgcacagagtgcgagtgcactccgcgagtgcggggggaggggcggccccctctggtgctcccagcccttcctcctgcagagctgcaggcaagagcagagcaataggcttctcccctgagcagagaccgcagcacagaaatgcaaggtctaaagttgctttttgcctaagaatcagcgagcgatttggcctacttcctcattggcttctattctgatatcagggatgctttttgtagtggtattgtttgctccctcttcgcgttttgactacccgtcattcaggggtaactcatcactcttcacacggggatttaaattaagaaactaattggctcatgtgaacattccaaattttcttggtttcaataccctttttttttcttttgaggggaaaagaggggagaaaaacaggagtgatgtcatttctttttcatgtattcc

SEQ ID NO: 4050 - DNA, 1866 bp, Homo sapiens
  SIMILAR (277)..(1863): 1001254mologous to Homo sapiens put. HBK2 protein (AA 1- 529),accession number X17622,Smith-Waterman Score=2767.
ggcggaggccgagccccgccaggagtctttgccgagccggagggaggcgcatctggcgcttcggtaccagcggcagccgggggtccggagcggctggaggagcgcagtgggaactgggaagagctagcccggctggagggcggacctctgcgtccgggagccgggtctcaggcaccgctgggggcgaagccacgcgtcttttcgggcagccaatttcacacgcgcctgtgtgcggttccgggcatcccatggcggggagcgcacctccgagggggcatgagatcggagaaatcccttacgctggcggcgccgggggaggtccgtgggccggagggagagcaacaggatgcgggagacttcccggaggccggcgggggcgggggctgctgtagtagcgagcggctggtgatcaatatctccgggctgcgctttgagacacaattgcgcaccctgtcgctgtttccggacacgctgctcggagaccctggccggcgagtccgcttcttcgaccccctgaggaacgagtacttcttcgaccgcaaccggcccagcttcgacgccatcctctactactaccagtctgggggccgcctgcggaggccggtcaacgtgcccctggacattttcctggaggagatccgcttctaccagctgggggacgaggccctggcggccttccgggaggacgagggctgcctgcccgaaggtggcgaggacgagaagccgctgccctcccagcccttccagcgccaggtgtggctgctctttgagtacccagagagctctgggccggccaggggcatcgccatcgtctccgtgttggtcattctcatctccatagtcatcttttgcctggagaccttaccccagttccgtgtagatggtcgaggtggaaacaatggtggtgtgagtcgagtctccccagtttccagggggagtcaggaggaagaggaggatgaagacgattcctacacatttcatcatggcatcacccctggggaaatggggaccgggggctcctcctcactcagtactcttgggggctccttctttacagaccccttctttctggtggagacgctgtgcattgtctggttcacttttgagctcctggtgcgcttctccgcctgccctagcaagccggccttcttccggaacatcatgaacatcattgacttggtggctatcttcccctacttcatcaccctgggcactgagctggtgcagcagcaggagcagcaaccagccagtggaggaggcggccagaatgggcagcaggccatgtccctggccatcctccgagtcatccgcctggtccgggtgttccgcatcttcaagctctcccgccactccaaggggctgcagatcctgggcaagaccttgcaggcctccatgagggagctggggctgctcatcttcttcctcttcatcggggtcatcctcttctccagtgccgtctacttcgcagaggctgacgatgacgattcgctttttcccagcatcccggatgccttctggtgggcagtggttacaatgaccacggtaggttacggggacatgtaccccatgactgtggggggaaagatcgtgggctcgctgtgtgccatcgctggggtcctcaccattgccctgcctgtgcccgtcatcgtctccaacttcaactacttctaccaccgggagacggagcaggaggagcaaggccagtatacccacgtcacttgtgggcagcctgcgccggacctgagggcaactgacaacggacttggcaagcctgacttccccgaggctaaccgggaacggagacccagctaccttcctacaccacatcgggcctatgcagagaaaagaatgctcacggaggtctga

SEQ ID NO: 4051 - DNA, 4878 bp, Homo sapiens
  SIMILAR (1198)..(2784): 1001254mologous to Homo sapiens put. HBK2 protein (AA 1- 529),accession number X17622,Smith-Waterman Score=2767.
atggctgaagctgaggaggggagagaagtgtcagtcaatgaggactcagagggaggggaagcccaggaggagggaaatggccacagtgcatccagagacgaaatgaatagaagggaacttcaggtcaaagcgttgtgctatcaagtgttggcagggaacatcaatgagtttgtggaaccagattcaatgctgtcttctctctccagcagaaaaagtaggagaaggttaagagaaggagtaaacatgacccagaccctggggaaaggggtgaatgaggggaccagagaagggagttgggccaggcagaacgctgtgtttggacagaggagcttccacttggaacacgctgaagaaccaaagctcgagggcagagccttgcccagagtgagatgcccctggctgggcgaggggtgtgatgtgggagtggggtgggagggggcagcaggcggggcctgccacgtcacttggagagtgtgtgttgggaaggaagggcagagcggagagccgagccgctgcagctgcggcggcggcagcgaagccttgagccgtggggaggtgggtccccggctcgggcgccggggcagccccgggcctctgcgaggcctgcggcgcggctcctagggaggaggtggcggctgtggcggccggaaccgcgaccttggccggacccagccccgcggtggacgcagggcggaggccgagccccgcaggagtctttgccgagccggaggaggcgcatctggcgcttcggtaccagcggcagccgggggtccggagcggctggaggagcgcagtggagaactgggaagagctagcccggctggagggcggacctctgcgtccgggagccggggtctcaaggcaccgctgggggcgaagcacggcgtcttttcgggcagccagtttcacacgcgcctgtgtgccggttccgggcatcccagtaagctctagcacccgggcgcgggtaacgggaagcgcagaaccaaatccccagcgcccaggtcacctccccagacccagccttgcagggaccagggctttagggctcacggacccaacggccaggtcagaccgcgaaccgggagagcgcggccccaccctaaagagggcgcacgggagctggggagcgggtgccgcgctccagagattgtgtcgtgggcgccgtcctagtggcggggagcgcacctccgagggggcatgagatcggagaaatcccttacgctggcggcgccgggggaggtccgtgggccggagggggagcaacaggatgcgggagacttcccggaggccggcgggggcgggggctgctgtagtagcgagcggctggtgatcaatatctccgggctgcgctttgagacacaattgcgcaccctgtcgctgtttccggacacgctgctcggagaccctggccggcgagtccgcttcttcgaccccctgaggaacgagtacttcttcgaccgcaaccggcccagcttcgacgccatcctctactactaccagtctgggggccgcctgcggaggccggtcaacgtgcccctggacattttcctggaggagatccgcttctaccagctgggggacgaggccctggcggccttccgggaggacgagggctgcctgcccgaaggtggcgaggacgagaagccgctgccctcccagcccttccagcgccaggtgtggctgctctttgagtacccagagagctctgggccggccaggggcatcgccatcgtctccgtgttggtcattctcatctccatagtcatcttttgcctggagaccttaccccagttccgtgtagatggtcgaggtggaaacaatggtggtgtgagtcgagtctccccagtttccagggggagtcaggaggaagaggaggatgaagacgattcctacacatttcatcatggcatcacccctggggaaatggggaccgggggctcctcctcactcagtactcttgggggctccttctttacagaccccttctttctggtggagacgctgtgcattgtctggttcacttttgagctcctggtgcgcttctccgcctgccctagcaagccggccttcttccggaacatcatgaacatcattgacttggtggctatcttcccctacttcatcaccctgggcactgagctggtgcagcagcaggagcagcaaccagccagtggaggaggcggccagaatgggcagcaggccatgtccctggccatcctccgagtcatccgcctggtccgggtgttccgcatcttcaagctctcccgccactccaaggggctgcagatcctgggcaagaccttgcaggcctccatgagggagctggggctgctcatcttcttcctcttcatcggggtcatcctcttctccagtgccgtctacttcgcagaggctgacgatgacgattcgctttttcccagcatcccggatgccttctggtgggcagtggttacaatgaccacggtaggttacggggacatgtaccccatgactgtggggggaaagatcgtgggctcgctgtgtgccatcgctggggtcctcaccattgccctgcctgtgcccgtcatcgtctccaacttcaactacttctaccaccgggagacggagcaggaggagcaaggccagtatacccacgtcacttgtgggcagcctgcgccggacctgagggcaactgacaacggacttggcaagcctgacttccccgaggctaaccgggaacggagacccagctaccttcctacaccacatcgggcctatgcagagaaaagaatgctcacggaggtctgacccatgcaggcagggcctgcaggaggggagcactgagctaacagtctcttaggcttccttctcatttccactactcactctagcttcagttgacttcttgactctctcccctacacccactacctggcatccaggaccaaatacctggactatcaaccttgttgcttaatccctgcagcattcaaggttaatccatctaagtgacatttttgaaattccagcggtgccacccaatcatgcccagcttctgtcatatgaatgagatatacatttatatgacagaagctgggcatgattgggtggcaccgctggaatttcaaaaatgtcaaggaacagcaaatgtcaacaggatggaaaccagccctatctgagtcttcgctccctccttagtgttctttgctttgggtcatgtgcgtttcctagcttcaggccacttggtaactggaagaagctggaggacagaagcagtactcaacttgctgttattccagtgccctgtaacaaccactggtcctcctgcagatgacccttggtagagtctttatttgcatagcctcaaaataggttattcgttctaaacttggatggaattagagaatacaatcaaactttaccacttggaggacacggggttagtccaggaccaaagaggccaatggatttttcaaagtgtgccccagcacacagaggcactggtgttcggtctacatttagttctccccactctgatcccctgactctccagcttccaggaaggttccttctcagagccaaatactctttgtgcaagtgccttcctgagcagaagaactggagaaagggaaccacagagccaggaggaatgtctgagcagagtcaagcaactggcttgaccacagtctgaagcaaggtgccacttaaacagatactgttttctcaaaggggcagaggaatcgtgttgcagatggcagccttttctccttcattttccccacattttctctggccctctaccttgcttcctgggagtttgatttaggattgctgttgaaggcttcctcaggcaaactccagcttaaagccctagacaggtaaaagcacacattggatggcagcatgggtttcttcccattttatgggcatgaaatatgtggtttagaataaggaacaagcattattcctttgccaacagcctcactctaagaggctttttttgctgagacaagcaaacacttgcctgctctgccccttggagctgcatttgacctgctctcactggtaaggtgacttggtggcgttcccacttgatttagccattttcttccattgtgagaccactgccatctatccacctgcccacctccccttttgtttctcagtaacattgccatttgttttttgcctttgataaactgtgatgtactgttctgagatcttttgggtgcagttctgaaactgaaaggactgttaacatgtttttaattttatatctatgctttcagactctttgatgataatttttttttttaaaaattatctctcgaagagcaacttacgagaggacagccttatgagggtttgcttgagaggcagtgtggcttctgtgactgccagctctaaatctcgatcttgccataactttacagggtaacttgggtccacagtcactctttgtgcctcagtttacccacccattaaatgggaacattactgtcttcccctccctacctcatggggaatgtctgggaagctggggacattgctatgcaaatgtgtgaatcttagtcatggatttgatttttagttatccccatacccccataggcaaggccttcccccagagttcctgctttggatccaaagcctgagaataggccattatggaccattggctccctaaatccctccttggcctcttggactgagcccctcagcctttcttcttacccttcagaaaggagagttctctttagatatgttcagggggatccttccatggctgggaggtcaccttgactgggggcttggcttctccaaacctggaaacacagtaggaagataggagatgttttatggatggcaaaaacctgctctgaggtcagaaagtgctag

SEQ ID NO: 4052 - DNA, 1309 bp, Homo sapiens
  misc_feature (1)...(1309): n = a,t,c or g
caataatctggtgggccataaacactccaggcgtttgagagttttgtcagttatggtccctgtctaatgaccatatataaaacatactcaccaaatcaggtcattttggctcagtaacacagggagcagaatgttatattttaattcaatcaaaccttgttatactgaccgttgaaatgctttgagaatacccaggggtgggctccttgcattttattctgttctttccattaagatctcgatacctatctttttcacaaacaaaagaggtttcttcaatcctaaggaaggtctccaggcagggaagagaggtaggcaatggtgggttaagtccccagtcccaagtagaacttgtcaccaacaccaccacctccctaggaagacccccagtcctgcctgtggcccactgccccttcccccagggtatcctccctttatagcatttgactttaagataaatatttaagaaaattaagggattcagaaaacagctcccaaaatattggtgaagatgatattagcaggtgactggccccaggtgacgaaatgtggtagagatctttgttcttgacagagagaaggcttgcgggccccttccccattatatgataagggcatcaggttaaggggtgggaggcagtagctgacattcctgcagttgaagaatatgacctgttttggcctctaggccttggacaggtaataagggacatgactgggtcagcgccgacaccttttgggggcagatgggacatgcagtccacaggagtggtcatctcctcttaagtaagcaggtgaagcagaacttccagaggctgagacagcagcctcgacatagctctgtgctttctactctagggccaacataataagactcactcctgccttcatccagctatgacaagagctatggcagtgagtgacccaccaggaaggaccccccccatcagtccnccctaatggaagaaccctaagtcccgtgctgtccctatacagcaaccagtagtccaggtgtggcctattgaacactggaaatagggctgggcccagactgagatgttttcctaaagggggaaaatccaccattggattttgaaagacctccatttgggaaaaaagaatgtaaaatatcccagtaatttttatattgattcccatgctgaagtgatactatttttgacatgttaggttaaaatgtagtctaaaaattaatttcactgattttagctgtttctttggactttaaaaaatgtggctactagaatattttaaattgcatatgtggcttggatcatggttccattggatg

SEQ ID NO: 4053 - DNA, 608 bp, Homo sapiens; identical to SEQ ID NO: 292
  SIMILAR (24)..(449): 1001254mologous to Homo sapiens alpha globin,accession number V00488,Smith-Waterman Score=733.

SEQ ID NO: 4054 - DNA, 394 bp, Homo sapiens
  SIMILAR (127)..(240): 711254mologous to Homo sapiens Human secreted protein, SEQ ID NO: 7871,accession number AAG03790,Smith-Waterman Score=128.
agctagcaccatgagcttcaataccctatacgtttctgtccgataaaatcttgctgtaagggacgcaactctcttcaaaacaaaatatatgatctgtcattacagaatttcccccctgccaccctgagacaaaatcttgctctgtcacccaggctggagtgtagtggcacgatctctgctccctgcaacctccacctcccgggttcaagtgattctcctgcctcggcctcccgagttagctgggaatgcaggcatgcactgccataaacagactaatttttgtatttttagtagagacggggtttcaccatgttgcccaggctggtctccgaactccctgaccttgtggatctggcccgcctcggggccccaaaagtgctggggatttacaggg

SEQ ID NO: 4055 - DNA, 5197 bp, Homo sapiens
  SIMILAR (250)..(492): 1001254mologous to Homo sapiens Human secreted protein, SEQ ID NO: 5390,accession number AAG01309,Smith-Waterman Score=432.
atgacgaatttggccatggtcgagagagactcagaggcagggaccgcggcttcgcggtttcctggcaaccacgcagccaagggcaaggcgcaggcgcactacaaagtctggcgcccagcagaggttaggtgtttaaagttaggacctgaatgggttacgttgcgatacacgatcaaacatcgcccttataagctctgtggaaaacgacagcacgtgttctttttcactagtagaagtgacgttggtttcatgttgacaactttgaagccatttggaagtgtttcagtggagagcaaaatgaataacaaagcgggctcctttttctggaaccttagacaattcagtacattagtttcaacaagcagaactatgaggctatgttgtttgggactttgcaaaccaaaaatagttcattcaaactggaacattttaaataactttcataacagaatgcaatcaactgatatcattagatatctctttcaggatgcattcatttttaaatcagatgttggctttcaaacaaagggcataagcactctaacagcccttagaattgaaagactactttatgctaaaagactgttttttgactcaaagcagtctcttgtccctgttgataaatctgatgatgaattgaagaaagtaaaccttaatcatgaagtctccaatgaagatgttcttaccaaggaaacaaaaccaaaccgtatcagcagtagaaaactgtctgaggaatgtaattccctgagtgatgtgttagatgcattttcaaaagcgcccacatttcctagtagcaactatttcacagcaatgtggacaattgccaaaagactgtctgatgaccagaagcgctttgaaaaacgactgatgtttagccaccctgcatttaatcagctctgtgaacatatgatgagagaagccaagatcatgcagtataagtacctactgttcagtcttcacgccatagtgaagcttggaatccctcagaacactattttggtgcagactttgctgagggtgacccaggaacgtatcaatgagtgtgatgagatatgcctttcagttttgtcaactgttttagaggcaatggaaccatgcaagaatgttcatgttctacgaacgggattcagaatactagttgatcagcaagtttggaaaatagaagatgtcttcacattacaagttgtgatgaagtgtattggaaaagatgcaccgattgctcttaagaggaaactggagatgaaagccttgagggaattagacagattttctgttttgaatagccaacacatgtttgaagtactagctgccatgaatcaccgatctcttatactcctggatgaatgcagtaaggtggtcctagataatatccatgggtgtcctttaagaataatgatcaacatattgcagtcctgcaaagacctccagtaccataatttggatctcttcaagggacttgcagattatgtggctgcaactttcgacatctggaagttcagaaaagttctttttatcctcattttatttgaaaaccttggctttcgacctgttggtttaatggacctgtttatgaagagaatagtagaggatcctgaatccctaaacatgaaaaacattctatctattcttcatacttactcttctctcaatcatgtctacaaatgccagaacaaagaacagttcgtggaagttatggctagtgctctgactggttatcttcacactatttcttcttgaaaacttattggatgcagtatattcattttgcttgatgaattactttcccctggctccttttaatcagcttctgcaaaaagacatcatcagtgagctgctgacatcagatgacatgaagaatgcttacaagctgcatactttggatacttgtctaaaacttgatgatactgtctatctgagggacatagccttgtcactcccacagctgccgcgggagctgccatcgtcacatacaaatgcaaaggtggcagaggtgctgagcagccttctgggaggtgaaggacacttctcaaaggatgtgcacttgccacacaattatcatattggattttgaaatcagaatgggacactaacagggaatcaagtgctaccactttcctggatgtgggtacaacttctgctaccggatattcaaaggttgcttacatatatttcatttgctgggctttctgaattaaaatcctaattctaaaagacttcatattaaatagcagtagtaaatctaagacttgatgtttgtatggagcctgcagcacaccaagagacttgtcatccatcaatgtactccttagaaagtgtaaatgtggacgttatggttgaatacaatggactacagtattggtcatttaatgagacagacatttttttaaaattaggttttgaagctatagttcaataaaacaatattaatataattgaaactatcaatgcagtgtagactttggacaagataatataatagtgatcataaagaataaagactcgaggcttctacaaaaatcaaatacccaataaatattttgctctaccaccaagacttttccagaggtagagaaaccgtagttttttaattaaactgtatttgtatgggttagagcacattgaagctaatcctaagttgtttctttggctcacacattacaaatagagtgtctctggggagaaatatgatgctataccatgagagaacatcctgcctcttcagtagatgcataagatcatgccatcattgcacacacccgtgggtcagttaccctttatgtaaaagctctgctacatggatcctgaccccaaggaacttgtatcttctgttaactccactggacacacacacacacataaatatgatagaaacatacaaaaaaatctgtagggatccaagctcttatctgcccatccctcttcattcacacacagttctgtgactttcacctctttctgaatgcatctagcttatttcttggccatcttttcaaccgctgtctttcctattagtgctacccatctcccctcagaagaggctttctctctgacctcattccaagatcagttttctttttcgggtactccgctattctggcataataaaataacagttgttctcagcataaagtcatgagaagtgaagaatgtgagcattcctttaaaaacataaaatttgtcttataacagccagagtataggtgaaggcagtaaggatataaatgtcttttttttttctttctttctcccagtaaacttagtatttccaaagtgccaggaacaatgaaaaaacaaattacaccttccacattttcgttatatttacagattttattttaacagtcttgcctttctcttggtgttttctttcttgtatttaaactcctatttctgttttttaaatgctgctttctctgggagatgatatgtgtaagaagagcatttactatttggtattatttacaccgttactactactggtagaataaataattatactcagatcagaaatcagcactacacagaaaacccttaaaattggtgctttcatgtctgaaaattttcctcttcaaaaatgtagccatccttaaagggaactgagaggtaactgtgtataatgttgtatatttttgatttataaagtagccttgtatagtggaatatctgcagaggccaagtaaaagaagtgaaggactaagacaggaatatcaaggattgtggtcggtggagagctcaacttggaaatctccagagaacaagaatgcagcaagactaaatagtaatatcaataactgttcttgttttgtttatttttgttttcagagtagctgtgctatgtgtttccagatctgcttattgtttgggttcaagccaccccagaggattccttgctatgaaaatgcggcatttgaatgcaatgggttttcatgtgatcttggtgagaaaaaaatgcaaatgaaatattctttaattactgatgtacattctaacagctgccaggaatcttgtggttgagactggttactaggactagaggaattgtcagcattattggaatgagtgctttagttactgttttctttgaaaaagaacattgctagtacacgatttgggttctgctcagctgattactgtcattactagagcttttacaaatgttgttctggtcagctttaatccttttttgctaagaagaagaatgcaaataatatattttcatatttaagatacacaaaaccatatttaatttccaggttatcttgaacaagggaaggaaagatgttaaagctttgttttcatggcctgtgtgaagctgttacaggatgtttgttgccagaaaaggctggatggttttaagaagatgggtctttctcttccctcttatgcttcaattttattttgtaccccacagcttctcttgaacagcctcttctgatgtttctaggtagtaggaaccttacaaatacatttatatatatgttgctgttggaatctatctaaatgccactcatttggtcctgcgcataatgtaagatgtaaacattccaagtcttctattattatactttagtattggaaatggattacgtgtggactattgagattaagatgactcctttctcttagtgggctactatttaagactttgttttttatattgctgattatatatattctaaggaagattttctcaagaaagcagtttttgcaccatttagaggacctttaaaatttgtataattttcacagttaaagctttcttaaaccctagcatgtagtcttattatgcctttaaaatatgagtagttataaggtcacatttgctttcaaaaagctattgtcctcatgttactttactatgtttggatctctaaactagctcttttgttagtatcgtctcacaaactgattattttcctctttctttggtaaggtcaataactgggagatggacaaactagagatggaagatgcagtcacatttttgaagactaaaatctattcagtagaagctcttcctgttgctgctgtaaatgtgcaaagcacacaataaagtgaaaatcaaccttttcatattaggagacatgcatttgtaaaaattaataaagatgacaagtcagttgtcaatggaattgagctatctgctaagacaaaaaatgttacctcagttcactattaaaattaattttaggagtgg

SEQ ID NO: 4056 - DNA, 1317 bp, Homo sapiens
  SIMILAR (433)..(546): 521254mologous to Homo sapiens unnamed protein product,accession number AK001315,Smith-Waterman Score=59.
agctgcatactttggatacttgtctaaaacttgatgatactgtctatctgagggacatagccttgtcactcccacagctgccgcgggagctgccatcgtcacatacaaatgccaaaggtggccagaggtcctgagcagcccttctgggaggtgaagggacacctccctcaaaggatgtggcaccttgccccacacaattatccatattgattttgaaatccagaatgggacacctaacaggaatccaagtgcctacccactttcctgatgtggatacaacttcctgcctacagatattcaaagagtagctgtgctatgtgtttcccagatctgcttattgtttgggttcaagccaccccagaggattccttgctatgaaaatgcggcatttgaatgcaatgggttttcatgtgatcttggtcaataactgggaagatggacaaactagagatggaagatgccagtcaccatttttgaagacctaaaatcctattcagtagaagcctccttccctgttgcctgcctgtaaaatggcaaagcacacaataaagtgaaaatcaaccttttcatattatgagacatgcatttgtaaaaattaatagagatgacgaagtcagttgtcaatggaattgagctatctgctaagacaaaaaatgttacctcagttcactattaaaattaattttaggagtggaagaaatgttgttactgccatttaaaaatatgctgagaaaattccagaagggttatttttccaaccacacctattccctctagtgcccagatatttgatttgtgagctgtacgtttcaccttttcatctttgatctactaaaaactggtttcttagttgtgaggtgtcacaggcaggttgatgtgggtagtagtccttgtctttggaatctgaatatttatactcctgctctaagctgttctaagacttggggttatgccctttaaatcattttcaagcattggcccaaataataattggacaaagttcctaaagttgtcaagtgtgtaagaattagtgaggtagctgttgaaaatgagtgaggatggtatttgtatttgtaataagcactgcaggtagagatatttcatgggttataataagagaaacacagatgagatgtagatggtaaggagtcttactgttgttggggtccttcctttctccttcttttttcccccttacccctcccacaatttcatgaagtcttttaaattaaatatatagctgaattgtgttgtgaatcagacctgaggactattttttcgattatgtgtgttcattctttgttcaaatatttgtcc

SEQ ID NO: 4057 - DNA, 356 bp, Homo sapiens
cgtcgaccaaggaacgaatatatgtgattatcactgtaagccacaaaggcattcgaagagaatgaagtgtacaaaacaactcttgtagtttactgtttttttaagtgtgtaattctaaaagccagtttatgatttaggattttgttaactgaatggttctatatgagatggctgaaaaaataccacatcgtctgttttcactaggtgatgccaaaatattttgctttatgtatattacagttctttttaaaacactggaagactcatgttaaactctaattgtgaaggcagaatctctgctaatttttcaggtctaaaattctctttgaaaaaaaaaaaaaagtcgacgcggccgc

SEQ ID NO: 4058 - DNA, 3216 bp, Homo sapiens
  SIMILAR (123)..(1652): 971254mologous to Homo sapiens lanosterol 14- demethylase,accession number D55653,Smith-Waterman Score=2583.
  misc_feature (1)...(3216): n = a,t,c or g
gctgggtttagtaggagacctggggcaaggccccctgtggacgaccatctgccagcttctctcgttccgtcgattgggaggagcggtggcgacctcggccttcagtgtttccgacggagtgaatggcggcggcggctgggatgctgctgctgggcttgctgcaggcgggtgggtcggtgctgggccaggcgatggagaaggtgacaggcggcaacctcttgtccatgctgctgatcgcctgcgccttcaccctcagcctggtctacctgatccgtctggccgccggccacctggtccagctgcccgcaggggtgaaaagtcctccatacattttctccccaattccattccttgggcatgccatagcatttgggaaaagtccaattgaatttctagaaaatgcatatgagaagtatggacctgtatttagttttaccatggtaggcaagacatttacttaccttctggggagtgatgctgctgcactgctttttaatagtaaaaatgaagacctgaatgcagaagatgtctacagtcgcctgacaacacctgtgtttgggaagggagttgcatacgatgtgcctaatccagttttcttggagcagaagaaaatgttaaaaagtggccttaacatagcccactttaaacagcatgtttctataattgaaaaagaaacaaaggaatactttgagagttggggagaaagtggagaaaaaaatgtgtttgaagctctttctgagctcataattttaacagctagccattgtttgcatggaaaggaaatcagaagtcaactcaatgaaaaggtagcacagctgtatgcagatttggatggaggtttcagccatgcagcctggctcttaccaggttggctgcctttgcctagtttcagacgcagggacagagctcatcgggaaatcaaggatattttctataaggcaatccagaaacgcagacagtctcaagaaaaaattgatgacattctccaaactttactagatgctacatacaaggatgggcgtcctttgactgatgatgaagtagcagggatgcttattgcattactctgggcagggcagcatacatctcaaactactagtgcttggaatgggcttctttttgggccagagacaaaacacttcaaaaaaaaatgttatttagaacagaaaacagtctgtggagagaatctgcctcctttaacttatgaccagctcaaggatctaaatttacttgatcgctgtataaaagaaacattaagacttagacctcctataatgatcatgatgagaatggccagaactcctcagactgtggcagggtataccattcctccaggacatcaggtgtgtgtttctcccactgtcaatcaaagacttaaagactcatgggtagaacgcctggactttaatcctgatcgctacttacaggataacccagcatcaggggaaaagtttgcctatgtgccatttggagctgggcgtcatcgttgtattggggaaaattttgcctatgttcaaattaagacaatttggtccactatgcttcgtttatatgaatttgatctcattgatggatactttcccactgtgaattatacaactatgattcacacccctgagaacccagttatccgttacaaacgaagatcaaaatgaaaaaggttgcaaggaacgaatatatgtgattatcactgtaagccacaaaggcattcgaagagaatgaagtgtacaaaacaactcttgtagtttactgtttttttaagtgtgtaattctaaaagccagtttatgatttaggattttgttaactgaatggttctatcaaatataatagcatttgacacattttctaatagttatgatacttatacatgtgctttcaggaagttccttggtgaaacaattgttgaggggggatctaggtaattggcagattctaaataatataatttccagatagtaattttaagagtactcatcgctcttgccaaataagttcagggtattcaaatcttggactagtcctgcaaggtataaagaataaaaatcccagtgagatacttggaaaccacagtttattattatttatctgggcaattattgtgtgtgtgaggatggaagggtagggaataatcgaacatctaaagccttgaataagagaatactaattgttttggtatgatgatactcagaaatggaggatattataggaaaaagaaatcctttggaattttaactaaaatcactgcatatgggaaattaagagatccaggaccatatttgataagagttcctaaaaataatgtaattattaatgctaaagactgctcatgtatcttgatctaattactaaataaattacatatttatttacctgataaatatgtatctagttctacaaggtcacatttatgtggaagtccaaagtcaagtccttaggggataattttgttttgggctcagttgttccctgcttccttttttttttttttttttttttgagatggagtctcgctctgttgcccaggctggagtgcagtggtgcgatctcagctcactgcatcctctgcctcccgggttcaagcaattctctgcctcagcctcccaagtagttgggattacaggcacctgccaccatgcctggctaatttttttgtatttttagtagagacgggggtttcactatgttggctaggctggtcttgaactcctgagcctcgtgagtccacccgccttggcctccccaaagtgctggggattaccngccatgngcccacccgcacctgggccttccctgcttccctctctagaatcccaattaggggatgtttgttaactaattcatattggattaaaacagttaacaaactttttttctttttaaaatgtgaggatccagtgaacctctggttttaggattaatcctgaaaccagggtccctggggagtaataaaattgggtcacattctgtaaagcacattctgtttaggaatcaacttatctcaaattgtaactcggggcctaacctatatgagatggctgaaaaaaataccacatcgtctgttttcactaaggtgatgccaaaatattttgctttatgtataattacagttctttttaaaacactggaagacctcatgttaaactctaaattgtgaaggcagaatctctgctaatttttcagattaaaattctctttgaaaaaaaaaaaaaaaaaaa

SEQ ID NO: 4059 - DNA, 372 bp, Homo sapiens
  misc_feature (1)...(372): n = a,t,c or g
tttagccttatcaaaatatcaatgatgttacttatgaaaatggaaaaataaaatctacaattcatatggaacccaggagactccaaatagccaaagcacgtttgaacannnnnnnnnnnnnnnnnnnnnnnnnnnnnnnnnnnnnnnnnnnnnnnnnnnnnnnngtagtatggtactggcataaaaagagacacatagatcactggaacagattagagaactcaaatataaatcgacacatttgtagccaactcattttgacaaaggtgccaggagcaaacactaaggatcatcccnnnnnnnnnnnnnnnnnnnnnnnnnntatgcacaaaaatgaaaccagaccccatctctcctcatacacaaaaaata

SEQ ID NO: 4060 - DNA, 416 bp, Homo sapiens
ggtctacgagccatctcagcccactagctgggagcagggccctgtccagctccagccccagggtcgccaggagtgacatggctgtagcacaggtgctgggcactgatggcaacaggagaggctgcaccagcagctggcacgaggctctggaggatgctcaggtgggcgaagacaggcaccaaggcgaaagtggaagacctacacgcgtgagacaagagtgggtgtggtcaggacagcgtcatccaccggccaaaatcaaggggaagccaagccacacccccaggcacgtccatgaggctcctccctcccccttccaaccaccgtttagaacactaagcctcagcctctccgaattctaaatttgccctttctttacccaaatctctgagccccacccactcccaagggaatttctt

SEQ ID NO: 4061 - DNA, 386 bp, Homo sapiens
  SIMILAR (384)..(148): 981254mologous to Homo sapiens emilin precursor,accession number AF088916,Smith-Waterman Score=385.
  misc_feature (1)...(386): n = a,t,c or g
ggcggcctccttattannnnnnnnnnnnnnnnnnnnnnggggtaggcactcaatatttattgaatacatggatgagttcttcctcccccatcttcccctgccctccactccccagctccaccttccacctgcccttacctgccaggggctctcccccgctgcttccaccgtgtgcaggccggagcccaccagccgcagctgcccctcactgtccagcaccctgcgctccaaggcactgaggatctcgctgacttgagagtcctgctccccaggggccccagagcagagctgcccgcatgcctgcatggcccctgccacctgctcctccaacagatccaaccgcccccccagctccccgctcacattggccagcagcccccccaact

SEQ ID NO: 4062 - DNA, 698 bp, Homo sapiens
  misc_feature (1)...(698): n = a,t,c or g
cccagcgcctaaatcagggcgtggcccattgtaggctctcaattatttattgaatacatggatgagttcttcctcccccatcttcccctgccctccactccccagctccaccttccacctgcccttacctgccaggggctctccccccactggaagcccgccctccaggcgtcccccaaggaccttcatagggaacccaggggggcaggggccgggggaagtttcccccatagtcttacgaagcccatcccagccccactaacctgggaaccagggcccctgtcccagctcccagcccccagggtcgcccaggagtgaacatggctgttagcacaggtgctgggcactgtatgggcaacaggagaagcctgcacccagcanttgggcacgaggctctggagggatgctcaggtgggcgaagacaagggcaccaaggcgaaantgggaagactcccatgggctgcagcaaggagaggcggcggcggctctcggctgaagaaagaaggtgggagcggagagcgcaggcgtggtgagcgcggagacgggccgggggcacaaaggggtcgaggctacagagccatggccggggctacgcaggcagaggcggcgacactcttccctctgagccggggatccagccctctccttgtggctccggggtctggtttcctcctcctgactctaagctctggtttctt

SEQ ID NO: 4063 - DNA, 485 bp, Homo sapiens
  misc_feature (1)...(485): n = a,t,c or g
gaactgcgnatggaagcttgcggaaanaaagcttgatggggcccaccatcccggaccnaagtctnttcttctggcggaagcccatcacctggatgcctacgtgggaagggacctcgaatgtgggaccccagcccctctccagctcgaaatccctccacagccnacggggacaccctgcacctattcccacgggacaggctggacccagagactctggacccggggcctccccttgagtagagacccgccctctgactgatggacgccgctgacctggggtcagacccgtgggctggacccctgcccaccccgcaggaaccctgaggcctaggggagctgttgagccttcagtgtctgcatgtgggaagtgggctccttcacctacctcacagggctgttgtgaggggcgctgtgatgcggttccaaagcacnagggcttggcgcaccccactgtgctctcaataaatgtgtttcctgtcttaaca

SEQ ID NO: 4064 - DNA, 1883 bp, Homo sapiens
  SIMILAR (274)..(1224): 301254mologous to Homo sapiens alpha-2 type VIII collagen,accession number M60832,Smith-Waterman Score=165.
ttttcatgacttttaatgctttattgggattgcaagcgttacaaggttaaagacaaaacccaagcatgggattttgccggaaatattagcgttaaaggagctgagttgagtcaaacacgggccgcaagtggaccgaggcggcaggcacaggtgacattcagtgtttggcgtgggggtcttcaggtgatggcagaggaggggacccaagaggccgagtccctgccgcagccctaggcgccgcggtggtggctgctatggcatcaccagacccgtgggctccggggcccaagcaacctggtcgatgggcagacctggcagctctcctgctctgtgggctcagacccgcctgacctccctactccccggcctcaccccaccttgcccccaagaggtcccacagagcttcggacctcctggagacaaggcagggtgctgaggggcgggcaaaatgtcacctagggagaggggagggttcctcaagtgtgcggaaggcggccaccctgccccagcctgatggaaccctttgtttacacacctgctagccccttcccctccggccagcctcaggggacaccggggaggagacaagatggagagccacgactaggcaccggaggtcagacaggcagcccgggcccaggattggttagtgggcccagggggagagctgcaaaacctggggggacgcaagggggcttggtccggcaagtgccccccggggaacaccccactcccggcgaggccagaatataacacttgggttgggtgggttgtccttgacgaatggggcagggtaattttggggttgcctcgaagccgtttttggatcttcaggcccaatgttgggttccacaaattgtgacaatttgggctcttttgggctttctgtccaatgtttccgaaatggcccacttcaacagggcgcttgccgaagggaccctctgcgaactgaggcggactggcatggaacgacccccgggggtcatgcccagctccgtcaccaggacccagaagcctcagggcctctagacttgctagtccgggctgcgttgcaagggggctgagccttggggcacaaagtggggggcgagttaaacctcccaaraggccgagtccctgccccaacccctaggcccccccggtggtggctgctatggcatcacccagaacccgttggcttcggggcccaagcaaacctggtcgatgggcagacctggcagctttcctgctctgtgggctcagaaccgcctgaccttcctaactccccggccttaccccaccttgcccccaagaggtcccacagagcttcggacctcctggacacaagccagggtgctgagcgtcgggcaagattgtcaccgagggagaggggagggttcctcaaagtgtgcggaaggcggccaccctgccccagcatgatggaaccctcttgtttacacacctgctagcccctttcccttccggccagcctcaggcaagccaaggagcccccttcctgtggcctccgagcaccctcctgacacctgaggagaccttgcttaacaccccccttccgccctcaaggacttctggggaccagccactgtccccaaaagccagcgccggacagtggccttctccactcccctttgaattctccaagggggttcagtggccagtgcaaccccaggaggctccaccctcaactcaacccaagcaacagggacagatgaaaaacaaaatccaatcagggcgataaatggcggggggcaggacgtggtggtctccaggctggcttcgtgcgttcttgcttttgtcactgcccccctgttacatggggggggggtttaatttggtttctgagcgcataaagctaaggaggggtaaaaaaaaaaccaaaaaaa

SEQ ID NO: 4065 - DNA, 547 bp, Homo sapiens
agggattcctccccgacccccccagaaggttctcccacgggctccattctcccatgtgccaaactcgtgctctcggggaatgcagagcccactaggcagaccctgcagctccagtgccgtggtttggaccgtcacagcctggagcgcgggctcagtggcctggtcttttgggccccgccgcacctcccccagccctgtgctcacctccctaaacagactctggagttcaagatccagtgtccaatgcaccatgggtgaattcacagcagtggtggaggcagcagcagcaacagaaaaacccccagccacaaaagcaccggggttattagtgcaagagaagtacaaggtctccaggtgacagaaagggtggcatcgactaaaaaggctaagggctattttccctgaaactgcccccctcttcagttcctcctgcccccactcctctccctgcctccaggggatatctcagggcaatgtcctcacctccccaaacctctcatcccgcccccttcttatcctgctccctgtccagggttttgcccccgta

SEQ ID NO: 4066 - DNA, 699 bp, Homo sapiens
  SIMILAR (67)..(366): 471254mologous to Bubalus bubalis I alpha2 haemoglobin chain,accession number AJ242732,Smith-Waterman Score=153.
  misc_feature (1)...(699): n = a,t,c or g
aggcctagaattcggcacgagccacagactcagagagaacccacccatggttgctgtctcctgcccgacaaagaccaacgtcaagggcccgcctgggggtaaggtcggcgcgcacgctggcgcagtatggcttcggaggccctggagaggatgttcctgtccttccccaccaaccaagacctacttcccgcacttcgaccttgagccacgggttttgcccaggttaaaggggccacggcaaagaaggtggccgaacgcgctgaccaaagccgtggccaacgtgggacgacatgcccaaacggcgctgtccgccctgaagcgaccttgcacgcgcacaaacttcgggtggaaccggtcaacttcaaagctcctaaagccactggcctgcttggttgaccctggcccggcccacctccccggccgagtttcacccctggcggttgcacgccttccctggaacaaagtttcctgggctttctgtgggcaaatttaaaatttgaactccaaataaccgtttaagcttggaagccttcgggttggccatgcttctttgcccctttgggcctttcccccagcccctcctcccctttcctgcacccgtacccccgtggtcttttgaataaaattttgaattgggggggcaaaaaaaaaaaaaaaaaaaagatctttnaatttaagggggcggaaagtttatttcaa

SEQ ID NO: 4067 - DNA, 557 bp, Homo sapiens
  misc_feature (1)...(557): n = a,t,c or g
ccccctttttaaaaccccggcccgggccaaattaaaattacccccccttaaaaggaataagcttccgcccccttnnnnnnnnnnnnnnnnnnnnnnnnnnnnngttaagacaggaaacacatttattgagagcacagtggggtgcgccaagccctgtgctttggaaccgcatcacagcgcccctcacaacagccagcacccagcggtccgggcccaccaggagagccgggatgagagcgcctgtgtgccagtcacaaagcgtttatttcacacaaacaatctcattgaagcccacaataaccgtgccaggcaggtgtgacgctttccaggttacaaacaacaaactcgcccaggccacacagtcagaaggggttgcgggggcctcgaacccagaccttgagtctcacgagccagcccacggcatgcagcgagaattctcaggggtcacagccgtctcccaagcggacactgtcatgaattaccctgtttctaacgggtgggaaaatcgaggctcagggtgattcaagtaacctacctggtacccatgtaccattctt

SEQ ID NO: 4068 - DNA, 1624 bp, Homo sapiens
  SIMILAR (73)..(279): 331254mologous to Chlamydomonas reinhardtii vegetative cell wall protein gp1,accession number AF309494,Smith-Waterman Score=73.
aatagatttacgattactattccagagaggaggaattcatcctaactgagcacgcccacggccctggtctggcctgggcaccggccaccgtagcccatcccttgatggcctctgtgtccccaggagggcgggccgggggggttgcccaggggctggagcagtggaactgtggctccatagagttaggccggagggtgtgaaggcaagattcaaagctatccccagggctctgcttcttggtcggagccagccccttctccctctctgccttccccgccccattcctgatgctgaactgttctggacccctggccctgagtctctcaggaccaaagtgggcacgggaacagctgtagtgtgtgcccccccgggctttggccacaggtctccctctcgaggtgtggttgtgactgcgacccttcccttggccgtgatgccttcctcccccggggcttgggtccagctccttcactctcttagcagctgctggggcccacctcccatgccgaggactattaggggtatacctccagggagcatctgcaggctctgcttctgcccggctgctggcttgctctccctggtggctctccagcggccagcttcctcacccacccggcactccgctttgctctgtctcctgaggtgggcctgaccaacctccccttctctgcctcagtccctgggctccagggctcagctccacagccctctgccatagcaggctggttctccctgccacgcccatacctgtggtcacctggccctcctgtggtctgagtaccactcccctgccccaggagccactcccactccagctgcctgtttccagcaggttcccagtgcccctgacaagcccctgctggtgtctccatctcctgccaagcatcctccagtgcctcctcctgtgggcctgggcctcagggctatggacagactcctggtcccatcccagagacccctcgtgatcgttccctgtcaccccactccaccgaaaagtaaactgcaggcacgtggaccgtggcccggctgggtcgactgaacaactagcggatggaagctgcggaaagaagccttgatggggcccaccatcccggacccaaaatcttcttcctgggcggggcctctcgtctcccttcccctggttttgggcggaaacccatcaccctggaatgccctacgtgggaaaagggaccctcgaaaatgtgggaacccccagcccccttctcccaagcttcgaaaatcccctccaacagcccacggggaaaacccctgcaccctattccccacgggaaaaggctgggccccaaaaaactctgggaccccggggccctcccccttgaagtagagacccgcccctctgactgatggacgcccgctgaccctggggtcagaacccgtggggctggaccccctgccccaccccgcaggaacccctgaggcctaggggagctgttgagcctttcagtgtctgcatgtgggaagtgggctccttcaccctacctcacagggctgttgtgaggggcgctgtgatgcggttccaaagcacgagggcttggcgcaccccactgtgctgctcaataaatgtgtttcctgttcttaaccaaaaaaaaaaaaaaaaaaa

SEQ ID NO: 4069 - DNA, 2076 bp, Homo sapiens
  SIMILAR (1692)..(1249): 1001254mologous to Homo sapiens Human secreted protein (clone ya1-1),accession number AAY17227,Smith-Waterman Score=747.
ttagatgatgcgcttgagagttgtgacgagcacggatacagaaccgcttccagttcgtgtctccgtaagggagtcatggtcaaaagttcgagcaatagagaattggtatagtcgagatacacagatatcacaatataggtagtacatcagaattcccagactgggcggccgggcagaggggctcctcacatcccagacgatgggcagccaggcagagacgctcctcacttcatttgttttattcagagccagacactgatgcaaagcatcaggacgatgctctgacggaggaggaaacgtagggctgagatcagcttcgtgtgcacattggctttgatcaaactgctgcacagcgaccggcagctccaccctgctgccgctcacctctaggctgtagttgcctcggatggcagtaaagtcgtccagggcttcggccgcgctcccctcgtccaggttcagctcctggcacagggcctgtagcgcctccccggctgcggcgaccaccgccgccccctcagcgtggggcttgtcctcgaacatcccttcaggccccgcgggctgcgcgccacggcccccgacttctttctccctcccaggcgcgctacccacaaccacccggcggcgccattcctccgagcaggtcccgccggagtccgagccgcgggctgacttccgctcgggaaagtggctccaagagcccgccacaggggacgccagggactcgcggcaggctctgagatcagcgatggtgacaaagacctcctggcgcatggaactggacagagaatgcgggcgttcctcttgtaccagtaccttttgtgtttcagctgcttctagaggatttctcttacagacatctttcagatgggaatagtaggataaggcctgtgctttagatgcttggaggctgctgggaggactgtccttccaccagttgaagagcaggctccctgccttcccaaggcttctcctcaggttaaacccctggattccctcgcccttccccatgtgatttggttcccagatcttggtgtgcatcatcattgggactgtgtatagcacggtatttatgatttgttggcggactctaggctggctgattatggataactgggcacagataactcccataatttctggcaccttcaagttgagatgtttggataggcacttcagaacttgagccatgctggccgtggcccgttcccgctcatggtctttgactgactgtaaccaggggaccaagtgaaagaatctgcagattgttcctgcttcagtaggtttgatgtgccagggatctttggagtacacttcttggggcagcttccacttcaggaactgggcacatatagttaggacttgcctgctctcctcagctactgcatcattttcatcctgagaatacagaagtagtgggaccaagctgtccaggacttggttctctatactcttcttatctgggttttttacagactttatggcggctccaaagagagtcacggagaaacgatgaacatcagatctcacatcaccaaataaggagaacagggtcctcatcatggcagccagggtagtgaaatccattgttctaacaagttgcaggagtatctggatggctgacagaacgatcttctcatcggtttcacgcaagctgtctacaatgtatggcaacaggctcttgatgtcttctctctccacaaaaaagcctgcagatgtgagtttatgtttatcattccctcggttaagaagagggactaataagtacatgaccttctgtgcaaggagctgatttctttccagcaatgcgcacaaaggggtgacctctgaaggcacttcctgttctgtgtacaggccacttgggatgtcgacatcagacatggtgaggccgatgctgtgatgaatctggataagcagtgtcatgagaagctgaggaaagagtcggaacgtagctgctcgaagcctgtttcccaaaaacacctcataaagggcatctgttgcctgacccaacaggacccgctcagtgaggccattgttgagaaactgatccagtccatccagaaggttttcaatggtgag

SEQ ID NO: 4070 - DNA, 2490 bp, Homo sapiens
  SIMILAR (1897)..(2487): 971254mologous to Homo sapiens vascular cadherin-2,accession number AB026893,Smith-Waterman Score=943.
atgctgcgctctctccgcctgcagcaggagtggctggaatgggaggaccggcggcgggcggctgcccagcagtgccggagccgcaggtgcccgtcaagtccccgggcccgactcactaggcctcaccgttcctgccgagacccagctgtccaccaagccctcttctccggcaacctgcagcaggtccaagccctgttccaagatgaagaggccgccaacatgattgtggagactgtgagcaaccagctggcctggtcggctgaacaggggttctgggtgctgacccccaagaccaagcagacggcacccctcgccatcgctacagcccgaggctacacagactgtgctcgacacctgatccggcagggagctgagctggatgcccgtgtcgggggtcgcgctgccttgcatgaggcctgtgcccgagcccagtttgactgtgtgcggctgctgctgaccttcggagccaaggctaatgtgctgactgaggagggcacgactcctttgcacctctgcacgatccccgagtccttgcagtgcgccaagttgctgctggaagcaggagcgacggtgaacctggcagcaggcgagagccaggagacgcccctgcacgtggcggcggcgcgcggcctggagcaacatgtggctctgtacctggagcatggcgccgacgtgggcctgcgcaccagccagggcgagactgcgctgaacacggcgtgcgctggggccgagggcccaggtagctgcaggcgacaccaggctgcggcgcgccggctcctggaggctggagctgatgcccgggcggccgggcgcaagcgccacacgccgctgcacaacgcttgtgccaacggctgcgggggcctggccgagctgctgctgcgttacggggcccgcgctgaggtccccaatggggcgggccacacgcccatggactgtgcgctgcaggccgtccaggactcccccaactgggagcctgaagtccttttcgccgcactgctggactacggggcgcagccagtgcgccctgagatgctgaaacactgcgccaacttccctcgggccctggaagtcctgcttaatgcctatccttgtgtcccatcctgtgagacctgggtggaggcggtgctcccagagctgtggaaggagcacgaagccttctacagctcggccctgtgcatggtgaaccagccaaggcagctgcagcacctggcccgactagctgtgcgcgctcggttgggaagccgctgccggcagggtgccacccggctgccactgcccccgctcctcagggactacctgctgctgcatatgaagcggagccgctgccgcgaccgaccgcagccgccgccgcccgaccgccgggaggatggagttcagcgggcagcggagctgtctcagtctttgccgccgcgccggcgagcgccgcccgggaggcagcggctggaggagcggacgggccccgcggggcccgagggcaaggagcagccgcctgccttggcctcccaaagtgccgagattgcagcctctgcccggctgccaccccgtctgggaagtgaggagcgtctctgcctggccgcccatcgtctgggatgtgagccgcccctctgcctggctgcccagtctggaaacctaggggacaatggacttcctgcaggaaggcaagagttgaagcaggggacccatgaggaaaccactgcgctggcccaggtgagagctgaagggctgcctgtgctggtatggatggagacagaggatttgcaggtgatgagcttccgaatcagcctgagtagacatgggccgaagccctcccaccccaagtcagacagtttcagtttggcgggatccaaatccctcctgccctttaaggatctcaagcacacagtgaatgatgaggagggtcggtggagtgcaatcccagacacagatggcccaagtgcaagggctggaggccagacagacccagaacaggaggaagggcctttggatcctgaagaggacctctctgtgaagcaactgctagaagaagagctgtcaagtctgctggaccccagcacaggtctggccctggaccggctgagcgcccctgacccggcctggatggcgagactctctttgcccctcaccaccaactaccgtgacaatgtgatctccccggatgctgcagccacggaggagccgaggaccttccagacgttcggcaaggcagaggcaccagagctgagcccaacaggcacgaggctggccagcacctttgtctcggagatgagctcactgctggagatgctgctggaacagcgctccagcatgcccgtggaggccgcctccgaggcgctgcggcggctctcggtctgcgggaggaccctcagtttagacttggccaccagtgcagcctcaggcatgaaagtgcaaggggacccaggtggaaagacggggactgagggcaagagcagaggcagcagcagcagcagcagcagcagcaggtgcctgtga

SEQ ID NO: 4071 - DNA, 2893 bp, Homo sapiens
  SIMILAR (223)..(1842): 841254mologous to Homo sapiens Human PRO1342 (UNQ697) amino acid sequence SEQ ID NO:243,accession number AAY99408,Smith- Waterman Score=2141.
atcatcagtccagtgcggtggaattcttcatacatgccgacacagcctgagtgcaacattattaccaggaacacctacgcacgagacccacgcttctggaagcaccagcctttatctcttctccttcaagtcccctttctcaagaatcctctgttctttgccctctaaagacttggtacatctacgacccaggcatcttgctttccagccacaaagagacagatgaagatgcagaaaggaaatgttctccttatgttgggcctactattgcatctagaagctgcaacaaattccaatgagactagcacctctgccaacactggatccagtgtgatctccagtggagccagcacagccaccaactctgggtccagtgtgacctccagtggggtcagcacagccaccatctcagggtccagcgtgacctccaatggggtcagcatagtcaccaactctgagttccatacaacctccagtgggatcagcacagccaccaactctgagttcagcacagcgtccagtgggatcagcatagccaccaactctgagtccagcacaacctccagtggggccagcacagccaccaactctgagtccagcacaccctccagtggggccagcacagccaccaactctgactccagcacaacctccagtggggctagcacagccaccaactctgactccagcacaacctccagtgaggccagcacagccaccaactctgagtccagcacaacctccagtggggccagcacagccaccaactctgagtccagcacagtgtccagtagggccagcactgccaccaactctgagtccagcacaacctccagtggggccagcacagccaccaactctgagtccagaacgacctccaatggggctggcacagccaccaactctgagtccagcacgacctccagtggggccagcacagccaccaactctgagtccagcacaccctccagtggggccggcacagccaccaactctgagtccagcacgacctccagtggggccggcacagccaccaactctgagtccagcacagtgtccagtgggatcagcacagtcaccaattctgagtccagcacaccctccagtggggccaacacagccaccaactctgagtccagtacaacctccagtggggccaacacagccaccaactctgactccagcacaacctccagtggggccagcacagccaccaactctgagtccagcacgacctccagtggggccagcacagccaccaactctgagtccagcacaacctccagtggggccagcacagccaccaactctgggtccagcacgacctccagtgggaccagcacagccaccaactctgagtccagcacagtgtccagtggggccagcacagccaccacctctgagtccagcacgacctccagtggggccagcacagccaccaactctgagtccagcacagtgtccagtggggccagcactgccaccaattctgagtccagcacaacctccagtggggccaacacagccaccaactctgggtccagtgtgacctctgcaggctctggaacagcagctctgactggaatgcacacaacttcccatagtgcatctactgcagtgagtgaggcgaagcctggtgggtccctggtgccgtgggaaatcttcctcatcaccctggtctcggttgtggcggccgtggggctctttgctgggctcttcttctgtgtggtgagtgcctgtgtacctctgtgtgagtgcagggatgccttgaaaatgccaggtggcctagagcagttattaactgaaagccgcatagtgcactggggtacggaaggtcggccaatagccactgcagagggttgggtgcttcttttggcaatgaagatccggctagcagcagaagccaaaattaaatgtttcctagatgggatggcggccgggctgagacgctcctcactttccagactgggcagccaggcagaggcgctccccacatcccagacgatgggcggccaggcagagacactcctcagttcccagacggggtcgcggccgaacaggggccttttttcacatctcagacgatgggcggccgggcagagacgctccctcacttcctagatgggatggcggccgggaagaggcgctcctcacttcctagatgggatgggcggccgggcagagacacttccttcactttccagactgggcagccagggcagaggggctcctcacatcccagacgatgggcggccaggcagagacgcttcctcactttcccagacggggtaagcggccgggcagaggctgcaatctcggcactttggggggccaagacaggcggctggggaagtgggaggttgtagctagccgagatcacgccactgcactccagcctgggcaccatttgagcacttgagttaacaagactccgtcttgcaatcccggcacctcgggaaggccgaaggcttggcggattcactcacgggttaggagctggagaccagcccggccaacacagcgaaaccccgtctccaccaaaaaaatacgaaaaccagtcaggtgtggcggcgcgcgcctgtaatcgcaggcactcggcaggctgaggcaggagaatcaggcagggaggttgcagtgagccagagatggcgggagtacagtccagcttcggcttggcatcagagggagactagggaaaggggagaggggagaggttagtattttcaaaaatcatcatatagtacgtggttacacaactctgaatatactaaaacacattgaattgtatactttaaaggagtgaactatatctcaatatataaggggtgagttatagctcaataaagctgttaacaacaaaacaaaaatgccataccaaaaaaaaaaaaaaaaa

SEQ ID NO: 4072 - DNA, 983 bp, Homo sapiens
  SIMILAR (124)..(285): 681254mologous to Mus musculus transmembrane protein,accession number M23568,Smith-Waterman Score=183.
cataaatgtagtttttttggagcatatttcatagaatttaaacacttagaaaagtcaagtgatttgtgtgctattttgatttgcttcctgtgcttactttcatttgtttattatttattttagtttcaacgaaccaaacttttaaatggaccgggagatgttgaaacgggtacaagcataacagtacctcagaaaaagtggttgcatgttatttcacccatttttgttcaaagttctaacattaccattcttagcaaaatggggtgatcgtctccaactactacaaattgaattggcagctagagaggtgagtgatatttgagaggagactgtttaaaatgaaacgtatttattattactttgttccagaaaaacactggacacactgaagtgggcccacagcattccttcatatgcaagactgttttacatctgataattcagctgctctctaaaattggccttctcccagttcctgctacctgcaggacccctatggtgtagccgtgggtggaactgtggggcactgcctgtgcacgggattggcagtaattggaggaagaatgatagcacagaaaatctctgtcagaactgtgacaatcataggaggcatcgtttttttggcgtttgcattttctgcactatttataagccctgattctggtttttaacaagctgtttgttcatctatatttagtttaaaataggtagtattatctttctgtacatagtgtacattacaactaaaagtgatgggaaaaatactgtattttgtaggcactggattttgtgagtttgaccccttattatgtctggaggatataatcattggattcctatttgtaacaagggagtttttaaaaggaaaccctgacttctaagtgtgggtttttttctctcccaaccataattatgttaatatggtcccccattttcttttgggtgcagaaccgttgtgcagtggggtctaccatgcaattttc

SEQ ID NO: 4073 - DNA, 534 bp, Homo sapiens
  SIMILAR (3)..(212): 841254mologous to Homo sapiens Human secreted protein SEQ ID NO: 60,accession number AAB23630,Smith-Waterman Score=317.
cggccgcggctccggggaacggccgcgcatcggcgccccggctgcttctgctctttctggttccgctgctgtgggccccggctgcggtccgggccggcccagatgaagaccttagccaccggaacaaagaaccgccggcgccggcccagcagctgcagccgcagcctgtgggctgtgcagggccccgagccggcccgggtcgaggtgagcgggccgggatggggcgagcgaggctgcagggccggctgcgccgagtaccaggctccaggcctttgaaagcgccgcactccgccggcctcggctgggggaggggagcccggcccctgctcccggggtggagggcggtcggctgcgctgttttccggtgaggcctggtcttgcgcgctccttttagggaaagggagagggagagtccaagaggagcccgctagtaacgttgatctccggagggccaagatgctgctccgggatgggcgttttattgatcagatgtgtcttagagtagctagaaagactcatccctaccaaaaagtt

SEQ ID NO: 4074 - DNA, 1035 bp, Homo sapiens
  SIMILAR (2)..(781): 471254mologous to Homo sapiens transmembrane protein PT27,accession number AF183409,Smith-Waterman Score=432.
agcggccgcggctccggggaacggccgcgcatcggcgccccggctgcttctgctctttctggttccgctgctgtgggccccggctgcggtccgggccggcccaagatgaagaccttagccaccggaacaaagaaccgccggcgccggcccagcagctgcagccgcagcctgtgggctgtgcagggccccgagccggcccgggtcgagaaaatatttacaccagcaggctccagttcataccaatacagaagatcctgctacccaaaactaatttggggatttatccatgcatttgtcgctgccatatcaagttattattggtatctgaattgggtgagtagaacatttgttatagcagccatcatggccatgcgctataaccggcctggaccgtgctgggctggtgcaatgctttgccttggggactaatgacatgcttgttcagcttttgtttggctatgccaccacagtcatccccaggggtctatacatacttatgtttcaacctgtattatttgccatttttggcattagaatgcttcgggaaggccttaaagatgagccctgatgagggtcaagaggaactggaagaagttcaagcctgaattaaagaagaaagatgaagaatttcaacgaaccaaatcttttaaatgggaccgggagatgttgaaacgggtacaagcataacagtacctccagaaaaagtgggttgcattttatttcacccatttttggtcaagctcttacattaacattcttagcagaatggggtgatcgctcttaacgtaactacaattgtattggcagctagagaggacccctatggtgtagccgtgggtggaactgtggggcactgcctgtgcacgggattggcagtaattggaggaagaatgatagcacagaaaatctctgtcagaactgtgacaatcataggaggcatcgtttttttggcgtttgcattttctgcactatttataagcccctgattcctggttttttaacgctgtttggtcatctatatttagtttaaaatag

SEQ ID NO: 4075 - DNA, 546 bp, Homo sapiens
  SIMILAR (2)..(298): 891254mologous to Homo sapiens proteasome subunit C8,accession number D00762,Smith-Waterman Score=445.
tggggtagaaaaattagtcctttctaaactttatgaagaaggttccaacaaaagactttttaatgttgatcggcatgttggaatggcagtagcaggtttgttggcagatgctcgttctttagcagacatagcaagagaagaagcttccaacttcagatctaactttggctacaacattccactaaaacatcttgcagacagagtggccatgtatgtgcatgcatatacactctacagtgctgttagaccttttggctgcagaatttacatagtacatgacgcagttaaggataaagcttttgaactagaactcagctgggttggtgaattaactaatggaagacatgaaattgttccaaaagatataagagaagaagcagagaaatatgctaaggaatctctgaaggaagaagatgaatcagatgatgataatatgtaacatttactccagcatctattgtattttaaatttctactccagtccaatgtaactatttagccctggattatacatactgtccaattttcattaaatttttgtcttat

SEQ ID NO: 4076 - DNA, 440 bp, Homo sapiens
  SIMILAR (3)..(125): 971254mologous to Homo sapiens uncharacterized hypothalamus protein HARP11,accession number AF220190,Smith-Waterman Score=196.
tcagagattcagttgtggaaattctttttgaacaagataataaagagcaatcagttgccactttaatattggattcccttatacagtgtccgatagacaccaggaagcaactagcagagaatttggaaatgatgtttgatgtcgggaaaactcaaccacctctgttgaagagagcattttccactgagaaatagaagtttgattaaaaatcaaccttgcttcatatcaaatatttaaccaattataagcaaattgtacaaagtatgtaggatgttttgttatagaggactatagtggaagtgaaagcattctgtgtttactctttgcattaatatataattcttttgactttgtttctcttgtgtagtggtaaaatggtagctggtgcttattgagatttgctgtatttatatcaataaagtatagtaaagcaaaaaaaa

SEQ ID NO: 4077 - DNA, 637 bp, Homo sapiens; identical to SEQ ID NO: 490
  SIMILAR (47)..(412): 991254mologous to Homo sapiens gamma-G globin,accession number X55656,Smith-Waterman Score=637.
  misc_feature (1)...(637): n = a,t,c or g

SEQ ID NO: 4078 - DNA, 516 bp, Homo sapiens
  SIMILAR (210)..(383): 1001254mologous to Homo sapiens proteasome subunit C8,accession number D00762,Smith-Waterman Score=302.
atttgtcgggagagtagatgtttcattttatttcagtccctgtgtaatttgtcttctctaatgttaaatactatgtagaatgtgtctgtgtaattttatagatacttttattatggatggacattctaatttgtactgactttgggtctgtgaactacttcaatgtttggaggttaccaaaatcttacctttcccttttctattctagaatttacatagtacatgacgaagttaaggataaagcttttgaactagaactcagctgggttggtgaattaactaatggaagacatgaaattgttcctaaagatataagagaagaagcagagaaatatgctaaggaatctctgaaggaagaagatgaatcagatgatgataatatgtaacatttactccagcatctattgtattttaaatttctactccagtccaatgtaactatttagccctggattatacatactgtccaattttcattaaatttttgtcttataactaaaaaaaaaaaaaaaaaaa

SEQ ID NO: 4079 - DNA, 1172 bp, Homo sapiens
  SIMILAR (326)..(841): 451254mologous to Homo sapiens uncharacterized hypothalamus protein HARP11,accession number AF220190,Smith-Waterman Score=226.
ggaattaattctgccatggtcctagattgtggatatagggaaagcctggtgttacccatatatgaaggaatcccagttctaaattgttggggagcactacccctaggaggaaaagctcttcacaaagagttggaaactcaactattggaacaatgtactgttgacacaagtgttgctaaagaacagagccttccctcagtgatgggttcagttccggaaggtgtcttagaggacattaaagcgcgtacttgctttgtaagtgatctgaagcgaggactaaaaatccaagcagcaaaatttaatattgatgggaataatgagcgtccctccccacccccaaaatgttgactatccattagatggagagaagattttacatatccttggattcaatccagagattcagttgtgggaaattctttttgaacaagataatggaagagccatcagttggccacttttaatattggggttaccttatacagtggtccgataggacaccagggaaggcaactaggcaggaggaatttgggtaggtcatagggtgggcacttctatgttgccagggatttctccacaggattgcttgcaggaaataagggtatttgggtaggaaaaacccaaaatataaaaaagcactttggcactaaagacatttccgaattccatactcccaccttggcaaaaagcctaattgtggtggcctgggtttggggagggggctatttttgggggcctttccaggatatacttggggagccgttctggtttccaaagggatattataatccagacggggccgtatacctggattggtggtcctctcaataacccacctttgggaaatgatggttgaatggccgggggaaaacccaaccacctctggatggaagagagcattttcccactggagaaattagaagttttggatttaaaaatccaaccttggctttcatatcaaatattttaacccaatttataagcaaattgtacaaagtatgtaggatgttttgttatagaggactatagtggaagtgaaagcattctgtgtttactctttgcattaatatataattcttttgactttgtttctcttgtgtagtggtaaaatggtagctggtgcttattcccctctctgctgtatttatatcaataaagaaaaataaagcaaa

SEQ ID NO: 4080 - DNA, 2344 bp, Homo sapiens
  SIMILAR (448)..(642): 751254mologous to Homo sapiens Similar to proteasome (prosome, macropain) subunit, alpha type, 3,accession number BC005265,Smith-Waterman Score=225.
atggggtgtcgccctgttgggcaggctggtctcgaactcctgacctcagcgcgtacttgctttgtaagtgatctgaagcgaggactaaaaatccaagcagcaaaatttaatattgatgggaataatgagtgtccgatagacaccaggaagcaactagcagagaatttggtagtcataggtggcacttctatgttgccaggatttctccacagattgcttgcagaaataaggtatttggtagaaaaaccaaaatataaaaaagcacttggcactaagacatttcgaattcatactccacctgcaaaagctaattgtgtggcctggttgggagcaaggtctttgttgggatataacaggttcctgatgtttcagccatttagaggggaagaaactgtatggtcattactgccaaagatacaagcttactgttgcccttttctccttaagtatgacctgtcagcctctacattctctcctgacggaagagtttttcaagttgaatatgctatgaaggctgtggaaaatagtagtacagctattggaatcagatgcaaagatggggttgttcttggggtaagaaaaataagtcctttctaaactttatgaaagaagggttccaaacaaaaagacttttttaatgtttgatcggcaatgttggaatggccagtagcaggttttgttggcagatgctcgttctttagcagacatagcaagagaagaagcttccaacttcagatctaactttgggctacaccattccactaaaacatcttgcagacagagtggcccatgtatggtgccatgccatataccactctaccagtggctgttagacccttttggctgccagtttccatgttagggtccttacagtgtgaatgcacggtgcgacaactctaccatgattgaccccatccaggtgtttccataccggttaattggggctgtgccatcgggcaaaggccaggggcaagctggcaaagacgggaaataggaggaagctttcagatggaaaggaattgacctgccgtggtatcgtttaaagaagtttgccaaaataattgacatagtacatgacgaagttaaggataaggccttttgaactagaacccagctggggttggtgaattaactaaatggaagacatgaaattgttccaaaaagatataagagaagaagcagagaaatatgctaaggaatctctgaaggaagaagatgaatcagatgatgataatatgtaacatttactccagcatctattgtatcctaaacttctactccacgtccaatgtaactatttagccctggattatacatactgtccaattttcattaaatttttgtcttataactattgaagtttggttaatatctgctttacaaaattggtgggggtaaatgaggacatttactcagtattaaaatatagatttatgactactgaaaaattccctggttaaaatgctgcagaattaattccaagactgtagattaattcaaagccccatcttcatcactcaactagaatttacagatcatattctcctgggcttttgtacaaaaagcacctaccaacttagtggacaaataactgatacggtttcccactttcatatgaagtaactggtggtcatcagtcactgttaatctttagatgtgatacagatgacagatgtttcagttttggataatttttcaaaaactgacccttctcaaaaaagacccttcaatacatgagtcaaggatgtttttgcttttttcctttattgtggtgaggggcggatttaaggatcaataaagtccctattctgtcactaaaaaaatttcttgatctctaaagattaaaataaaaataccaacatcagacagctttcatgttaaaaatcagaatttatgttaaagtgctctgtaaacagaactgttactaagtggaataaacagtactgtggccgataagaataacttgaagctgaaaagcagtactcacagcaggaacaatttgaactcaggccatgtatacacaccctctagtggactcatgccagtgtcactccattgaagtgttgtgctttcctaagaaggtaatctagccactgaatttgggtgcagggtatcgctggactttgagcatttgtgtagtttaaatagcaaatcattatacctgagtattaatagctaactactacacaaacaactcaaaaccagtaatgtcatgtcattaccatggcttcttttatgtaacattatctgctacattttaccactcaaaatatatttaaaatatgtattttaaaatatattagagcatatggctcaagcaatcctcccacctcagcttggtaac

SEQ ID NO: 4081 - DNA, 1099 bp, Homo sapiens
  SIMILAR (31)..(234): 571254mologous to Homo sapiens Sequence encoded by clone 34,accession number AAR05882,Smith-Waterman Score=160.
  misc_feature (1)...(1099): n = a,t,c or g
agtacatcgaggatgacatgaatccattccaagggaaccttgaaagaacagagaccaagaaagagtaaaacctttttatgacagggcgctgcagaacaaatcaagcacatcttggctaatttcaaaaactaccaggttctttattggtgaaaacatgatttcagaatggcatgggtgcttctattggactacgtgaagggatgggtgtgccccccatatatgattttctttaagggatggtttagacatggacaaaatgcttaacaaatgtggcaaattattttggatctatcaccctgtcatccataactgggcttctgccttgtcatcccacacaaccacccgggacttaagacaaaattggactgattgtcatcctggagctcttccatttattttggactggggattttatttgggagtgggagggcattgtttttacgaaaaaccatgtccatggtaggttgtctaaaaaataaaaatgccatttaaacctcatttgaggagaatgcccttttaggtttaatgccatatttaaacgtaaattgatcctgtagtgtcccctggagaaagctagagcctgattgtaggctactacttcatcaattaaacttctacaagtggagaactacttctgggactgggaatataaaaaagaatcaaaggttctggattttgagttgcaataaaggggaaagaccatgctcatagcagtgccaacatctgaagtgtggagccttacccatttcatcacctacaacggaagtagttaactggaagagattaccaagagaataaaaagagactcattcagtggaagcnnnnnnnnnnnnnngggggggcccgttttaaaggaacccttgggggggccaaagtttaccgggggctggcaaggtaaaagttttttccttatagggggccgtataaaaacctacttgggaatttttggaaaagaacctttttttttgggggggaaaattttggcccaactcccctccaaaattttaaccctttggggaaaataaaaatttttaaggggaatagggggaaaaaataccttatattctttgtgtttaaaaatttttcttattagaaaaag

SEQ ID NO: 4082 - DNA, 539 bp, Homo sapiens
  SIMILAR (15)..(263): 601254mologous to Homo sapiens Human secreted protein, SEQ ID NO: 7878,accession number AAG03797,Smith-Waterman Score=263.
tgagacgagtctcatctgtcacccaggctggagtgcaatggcatggtctcggctcactgcaacctccgcctcctgggttcaagctattctgcctcagcctcccaaggagccaggactacaggtgcatgccaccacgcccggctaatttttgtattttttagtagagacagggtttcacccagcacattgagacaagctggtttcaaactcctgaccttgtggtccgcccgccccggcctcccagagtgctgggattacaggcgtgacgaccgcgcccatctcccctgcaatgtctttagttagaccttttccaccatcatgtctaactgggctacggtttggggaaagtgtccaaattagtccgtgttatcctaaaaggggtgtgcccgttattagcagggccagggctagggtgagacacatgaggcacctggggcatacatttaagttggtgcttgcttgcaggtgccaagagagtgcttccttgggtttacccccgtggtgcctcctttacctcattctggccccagccctggggt

SEQ ID NO: 4083 - DNA, 4452 bp, Homo sapiens
  SIMILAR (2731)..(3558): 851254mologous to Homo sapiens similar to D.melanogaster peroxidasin(U11052),accession number D86983,Smith-Waterman Score= 1178.
atgggagactttaacaccccactgtcaacattagacagatcaacgcgacagaaagttaacaaggatatccagaaatggaactcagctctgcaccaagtggacctaatagacatctacagaactctccaccccaaatcaacagaatatacattcttctcaacactacatcacacttattccaaaattgaccacatagttggaaaaatacaaattcccatcagggaatactataaacacctctacgcaagtaaactagaaaatctagaagaaacggataaattcctggacacatacaccctcccaagactaaaccaggaagaagttgaatccctgaatagaccaatagcaggttctgaaattgaggcaataattaatagcctaccaaccaaaaaaagtccaggaccagatggattcacagccgaattctaccagagtgttggaagttctggccagggcaatcaggcaggagaaagaaataaagggtattcaattaggaaaaaggaagtcaaattgtccatgtttgcagatgacattactgcatatttagaaaaccccatcgtctcagccccaaatctccttaagctgataagcaacttcagcaaatctcaggatacaaaatcaatgtgcaaaaatcacaagcattcctctacaccaataagagacaaacagagccaaatcatgagtgaactcccattcacagttgcttcaaagagaataaaatacctaggaatcaaacttagaagggatgtgaaggacctcttcaaggagaactacaaaccactgctcaatgaaataaaagaggacacaaacaaatggaagaacattccatgctcatggataggaagaatcaatattgtgaaaatgaccatactgcccaaggtaatttatagattcaatgccatccccatcaagctaccaatgactttctttgcagaattggaaaaaactactttaaagttcatatggaatcaaaaaagagcccacattgccaagacaatcctaagccaaaagaacaaagctggaggcatcatgctacctgacttcaaactatactacaaggctacagtcaccaaaacagcatggtactggtaccaaaacagagatatagaccaatggaacagaatagagccctcagaaataataccacacatctgtaagcatctaatctttgacaaacctgacaaaaacaagaaatggggaaaggattccctatttaataaatggtgctgggaaaactggctagccatatgtagaaagctgcatctggaccccttccttacaccttatacgaagattaattcaagatggattaaagacttaaatgttagacataaaaccataaaaaccctagaagaaaacctaggcaataccattcaggacataggcatgggcaaggacttcatgactaaaacaccaaaagcaatggcaacaaaagccaaaattgacaaatgggatctaattaaactaaagagcttctgcacagcaaaagaaactatcatcagactgtcccccagaaacgctgagcccccagcggcctgggtctgggtgtttgtagatccatgtgctacggtcagacttgagcaagttcctgaccttcaggcttgggcaacacctgtatttatagacgtggcccacacctaccaaacagtcaccggcatgctgctaggggaaggatatctgcagatcgtcgctttcggcaccttggtcacagggagctgcaccctgcaccctgcgtcccaggtcgtggggagccgcaccctgcaccctgcgttccaggtcatggggagctgcatcctgcactctgcgtcccaggtcgtgggcagctgcactctgtaccctgcatcccaggtcgtggggagccgcaccctgcaccctgtgtcccaggtcgtgggcagctgcaccctgcatcccagagatcttcgctttaacagaatcagagagatccaacctggggcattcaggcggctgaggaacttgaacacattgcttctcaataataatcagatcaagaggatacctagtggagcatttgaagacttggaaaatttaaaatatctctatctgtacaagaatgagatccagtcaattgacaggcaagcatttaagggacttgcctctctagagcaactgcgactggactcaaacacacttcactgcgactgtgaaatcctgtggttggcggatttgctgaaaacctacgcggagtcggggaacgcgcaggcagcggccatctgtgaatatcccagacgcatccagggacgctcagtggcaaccatcaccccggaagagctgaactgtgaaaggccccggatcacctccgagccccaggacgcagatgtgacctcggggaacaccgtgtacttcacctgcagagccgaaggcaaccccaagcctgagatcatctggctgcgaaacaagagcctggagcgccatgcagctgctgacacaggttcgctcagctcccgtgtggatctaacttgtctcccaaacaaaggaagtcttctcttgtgtccacaaacatgctgtggacctgttaaggctaagacggccctggctgcggctgtcagggtgacggagggaagtcctaccgctgaccattacatgcgtcctggcagcgagccccacctctcgagtctcacctgccggctggccttacctaacatccagagtcacctgcaggccaccctcacctgctggctcgccgtgtttctgactgggatctcagtggcatccaatgtcacctctctcctcttcacctgcttctgcataaagggaactaaagtgaagttacaggtgggtaatgagctgagcatgaagacagattcccgcctaaacttgctggacgatgggaccctgatgatccagaacacacaggagacagaccagggtatctaccagtgcatggcaaagaacgtggccggagaggtgaagacgcaagaggtgaccctcaggtacttcgggtctccagggtcatttctgggcaatagagtgtgcacatcttcagtgtcagtatgcacggccacgtccctgcagccacagaatacagaggtgctggttggggagagcgtcacgctggagtgcagcgccacaggccaccccccgccgcggatctcctggacgagaggtgaccgcacacccttgccagttgacccgcgggtgaacatcacgccttctggcgggctttacatacagaacgtcgtacagggggacagcggagagtatgcgtgctctgcgaccaacaacattgacagcgtccatgccaccgctttcatcatcgtccaggctcttcctcagttcactgtgacgcctcaggacagagtcgttattgagggccagaccgtggatttccagtgtgaagccaagggcaacccgccgcccgtcatcgcctggaccaagggagggagccagctctccgtggaccggcggcacctggtcctgtcatcgggaacacttagaatctctggtgttgccctccacgaccagggccagtacgaatgccaggctgtcaacatcatcggctcccagaaggtcgtggcccacctgactgtgcagcccagagaggaggaagctcccctctgtttccttctccgagagtcgggctctccccagagcttgttatcctctgtgggccctgcggcacagcatatgcctgagactgccccaccatcgttttttgatgtaattgactcgttctcctggattctctacatctgccttccagtcaccccagtgtttgccagcattcccagcgacacaacagtggaggtgggcgccaatgtgcagctcccgtgcagctcccagggcgagcccgagccagccatcacctggaacaaggatggggttcaggtgacagaaagtggaaaatttcacatcagccctgaaggattcttgaccatcaatgacgttggccctgcagacgcaggtcgctatgagtgtgtggcccggaacaccattgggtcggcctcgtccggtgtgagcacatgttgtaagaagatggttcagaagggccctcgggttggcccagttatcaccaatagtcgccgccacttggtcgttcgttcagcaaatgccttcgtgggctggactctgtcctcagtgctgagccagacataccgggacgccatgaggaagttcccagcagaggagcaccttcctgacgtcagtcgaaatggagatccgtttgtagctacctccatcgtggaagcgattgcgactgttgacagagctataaactcaacccgaacacatttgtttgacaggtatcgtggggctgtaaacacgctgaccctcaaatcactgagctttagggtgaagggcacaccctctatgccagtcattgtcctgggccagggcctacagtcacaaacggaagaaataaaaacctctgccctcaaagatcagaccttccagagaaatgcagatggaaaaccagagagaggcccctgcacataa

SEQ ID NO: 4084 - DNA, 3177 bp, Homo sapiens
  SIMILAR (2351)..(2509): 331254mologous to Homo sapiens similar to D.melanogaster peroxidasin(U11052),accession number D86983,Smith-Waterman Score= 43.
ggaccttgcgtggctgtcagcgtgtcctgggtgtgcccctcacatgccatctgcgaggtatggtcttcggggctgggcttcctccacggccataagaacccctctttgggctggagttgtggcaagttgctggtggcaggtggccctccttttattcagcctagtggttcggcaggtgctggtggagagtgggtgctggtggagtgggtgctggtggagcgggtgctggtggagagtgggtgctggtggagagtgggtgctggtggagtgggtgctggtggagagtggatgctggtggagagtgggtgctggtggagtggatgctggtggagtgggtgctggtggagagtgggtgctggtggagcgggtgctggtggagcgggtgctggtggagagtgggtgctggtggagtgggtgctagtggagagtgggtgctggtggagagtgggtgcttgtggagcgggtgctggtagagtggatgctggtggagcgggtgctggtggagagtgggtgctggtggagcgggtgctggtggagcgggtgctggtggagagtgggtgctggtggagagtgggtgctggtggagcgggtgctggtagagtggatgctggtggagtgggtgctggtggagagtgggtgctggtggagcgggtgctggtggagcgggtgctggtggagagttaccactacaacgacctggtgtctccacagtacctgaacctcatcgcaaacctgtcgggctgtaccgcccaccggcgcgtgaacaactgctcggacatgtgcttccaccagaagtaccggacgcacgacggcacctgtaacaacctgcagcaccccatgtggggcgcctcgctgaccgccttcgagcgcctgctgaaatccgtgtacgagaatggcttcaacacccctcggggcatcaacccccaccgactgtacaacgggcacgcccttcccatgccgcgcctggtgtccaccaccctgatcgggacggagaccgtcacacccgacgagcagttcacccacatgctgatgcagtggggccagttcctggaccacgacctcgactccacggtggtggccctgagccaggcacgcttctccgacggacagcactgcagcaacgtgtgcagcaacgaccccccctgcttctctgtcatgatcccccccaatgactcccgggccaggagcggggcccgctgcatgttcttcgtgcgctccagccctgtgtgcggcagcggcatgacttcgctgctcatgaactccgtgtacccgcgggagcagatcaaccagctcacctcctacatagacgcatccaacgtgtacgggagcacggagcatgaggcccgcagcatccgcgacctggccagccaccgcggcctgctgcggcagggcatcgtgcagcggtccgggaagccgctgctccccttcgccaccgggccgcccacggagtgcatgcgggacgagaacgagagccccatcccctgcttcctggccggggaccaccgcgccaacgagcagctgggcctgaccagcatgcacacgctgtggttccgcgagcacaaccgcattgccacggagctgctcaagctgaacccgcactgggacggcgacaccatctactatgagaccaggaagatcgtgggtgcggagatccagcacatcacctaccagcactggctcccgaagatcctgggggaggtgggcatgaggacgctgggagagtaccacggctacgaccccggcatcaatgctggcatcttcaacgccttcgccaccgcggccttcaggtttggccacacgcttgtcaacccactgctttaccggctggacgagaacttccagcccattgcacaagatcacctcccccttcacaaagctttcttctctcccttccggattgtgaatgagggcggcatcgatccgcttctcagggggctgttcggggtggcggggaaaatgcgtgtgccctcgcagctgctgaacacggagctcacggagcggctgttctccatggcacacacggtggctctggacctggcggccatcaacatccagcggggccgggaccacgggatcccaccctaccacgactacagggtctactgcaatctatcggcggcacacacgttcgaggacctgaaaaatgagattaaaaaccctgagatccgggagaaactgaaaaggttgtatggctcgacactcaacatcgacctgtttccggcgctcgtggtggaggacctggtgcctggcagccggctgggccccaccctgatgtgtcttctcagcacacagttcaagcgcctgcgagatggggacaggttgtggtatgagaaccctggggtgttctccccggcccagctgactcagatcaagcagacgtcgctggccaggatcctatgcgacaacgcggacaacatcacccgggtgcagagcgacgtgttcagggtggcggagttccctcacggctacggcagctgtgacgagatccccagggtagacctccgggtgtggcaggactgctgtgaagactgtaggaccagggggcagttcaatgccttttcctatcatttccgaggcagacggtctcttgagttcagctaccaggaggacaagccgaccaagaaaacaagaccacggaaaatacccagtgttgggagacagggggaacatctcagcaacagcacctcagccttcagcacacgctcagatgcatctgggacaaatgacttcagagagtttgttctggaaatgcagaagaccatcacagacctcagaacacagcctagagaccaggtgtacatcccccaggcagctgtcagagtggacagcgtgtggcaggtcctcctccctccacagcctagagaccaggtgtacatcccccaggcagctgtcagagtggacagcgtgtggcaggtcctcctgcctccacaacctagagaccagataaagaaacttgaatcacggctcagtaccacagagtgcgtggatgccgggggcgaatctcacgccaacaacaccaagtggaaaaaagatgcatgcaccatttgtgaatgcaaagacgggcaggtcacctgcttcgtggaagcttgcccccctgccacctgtgctgtccccgtgaacatcccaggggcctgctgtccagtctgcttacagaagagggcggaggaaaagccctag

SEQ ID NO: 4085 - DNA, 5627 bp, Homo sapiens
  SIMILAR (3610)..(4506): 861254mologous to Homo sapiens similar to D.melanogaster peroxidasin(U11052),accession number D86983,Smith-Waterman Score= 1327.
  misc_feature (1)...(5627): n = a,t,c or g
agccggccgtggtggctccgtgcgtccgagcgtccgtccgcgccgtcggccatgtgcctatcgctccaggggccccgggcgccgctgcctgttggcgctcgtgctgttctgcgcctgggggacgctggccgtggtggcccagaagccgggcgcagggtgtccgagccgctgcctgtgcttccgcaccaccgtgcgctgcatgcatctgctgctggaggccgtgcccgccgtggcgccgcagacctccatcctagatcttcgctttaacagaatcagagagatccaacctggggcattcaggcggctgaggaacttgaacacattgcttctcaataataatcagatcaagaggatacctagtggagcatttgaagacttggaaaatttaaaatatctctatctgtacaagaatgagatccagtcaattgacaggcaagcatttaagggacttgcctctctagagcaactatacctgcactttaatcagatagaaactttggacccagattcgttccagcatctcccgaagctcgagaggctatttttgcataacaaccggattacacatttagttccagggacatttaatcacttggaatctatgaagagattgcgactggactcaaacacacttcactgcgactgtgaaatcctgtggttggcggatttgctgaaaacctacgcggagtcggggaacgcgcaggcagcggccatctgtgaatatcccagacgcatccagggacgctcagtggcaaccatcaccccggaagagctgaactgtgaaaggccccggatcacctccgagccccaggacgcagatgtgacctcggggaacaccgtgtacttcacctgcagagccgaaggcaaccccaagcctgagatcatctggctgcgaaacaataatgagctgagcatgaagacagattcccgcctaaacttgctggacgatgggaccctgatgatccagaacacacaggagacagaccagggtatctaccagtgcatggcaaagaacgtggccggagaggtgaagacgcaagaggtgaccctcaggtacttcgggtctccagctcgacccacttttgtaatccagccacagaatacagaggtgctggttggggagagcgtcacgctggagtgcagcgccacaggccaccccccgccgcggatctcctggacgagaggtgaccgcacacccttgccagttgacccgcgggtgaacatcacgccttctggcgggctttacatacagaacgtcgtacagggggacagcggagagtatgcgtgctctgcgaccaacaacattgacagcgtccatgccaccgctttcatcatcgtccaggctcttcctcagttcactgtgacgcctcaggacagagtcgttattgagggccagaccgtggatttccagtgtgaagccaagggcaacccgccgcccgtcatcgcctggaccaagggagggagccagctctccgtggaccggcggcacctggtcctgtcatcgggaacacttagaatctctggtgttgccctccacgaccagggccagtacgaatgccaggctgtcaacatcatcggctcccagaaggtcgtggcccacctgactgtgcagcccagagtcaccccagtgtttgccagcattcccagcgacacaacagtggaggtgggcgccaatgtgcagctcccgtgcagctcccagggcgagcccgagccagccatcacctggaacaaggatggggttcaggtgacagaaagtggaaaatttcacatcagccctgaaggattcttgaccatcaatgacgttggccctgcagacgcaggtcgctatgagtgtgtggcccggaacaccattgggtcggcctcggtgagcatggtgctcagtgtgaacgttcctgacgtcagtcgaaatggagatccgtttgtagctacctccatcgtggaagcgattgcgactgttgacagagctataaactcaacccgaacacatttgtttgacagccgtcctcgttctccaaatgatttgctggccttgttccggtatccgagggatccttacacagttgaacaggcacgggcgggagaaatctttgaacggacattgcagctcattcaggagcatgtacagcatggcttgatggtcgacctcaacggaacaagttaccactacaacgacctggtgtctccacagtacctgaacctcatcgcaaacctgtcgggctgtaccgcccaccggcgcgtgaacaactgctcggacatgtgcttccaccagaagtaccggacgcacgacggcacctgtaacaacctgcagcaccccatgtggggcgcctcgctgaccgccttcgagcgcctgctgaaatccgtgtacgagaatggcttcaacacccctcggggcatcaacccccaccgactgtacaacgggcacgcccttcccatgccgcgcctggtgtccaccaccctgatcgggacggagaccgtcacacccgacgagcagttcacccacatgctgatgcagtggggccagttcctggaccacgacctcgactccacggtggtggccctgagccaggcacgcttctccgacggacagcactgcagcaacgtgtgcagcaacgaccccccctgcttctctgtcatgatcccccccaatgactcccgggccaggagcggggcccgctgcatgttcttcgtgcgctccagccctgtgtgcggcagcggcatgacttcgctgctcatgaactccgtgtacccgcgggagcagatcaaccagctcacctcctacatcgacgcatccaacgtgtacgggagcacggagcatgaggcccgcagcatccgcgacctggccagccaccgcggcctgctgcggcagggcatcgtgcagcggtccgggaagccgctgcttccccttcgccaccgggccgcccacggagtgcatgcgggacgagaacgagagccccatcccctgcttcctggccggggaccaccgcgccaacgagcagctgggcctgaccagcatgcacacgctgtggttccgcggagcacaaccgcattgccacggagctgctcaagctgaacccgcactgggacggcgacaccatcgtacgtatgagaccaggaagatcgtgggtgcggagatccagcacatcacctaccagcactggctcccgaagatcctgggggaggtgggcatgaggacgctgggagagtaccacggcctacgaccccggcatcaatgcttggcatcttcaacgccttcgccaccggcggccttcaggtttggccacacgcttgtcaacccactgcttttacccggcttggacgagaactttccagccccattgcacaagatcacctcccccttcacaaagctttcttctctccgttcgggattgtgaatgagggcggcatcgatccgcttctcagggggctgttcggggtggcggggaaaatgcgtgtgccctcgcagctgctgaacacggagctcacggagcgccttgttctccatggcacacacggcggctctggacctggcgggcatcaacatccagcggggccgggaccacgggatcccaccctaccacgactacagggtctactgcaatctatcggccggcacacacgttcgaggacctgaaaaatgagattaaaaaccctgagatccgggagaaactgaaaaggttgtatggctcgacactcaacatcgacctgtttccggcgctcgtggtggaggacctggtgcctggcagccggctgggccccaccctgatgtgtcttctcagcacacagttcaagcgcctgcgagatggggacaggttgtggtatgagaaccctggggtgttctccccggcccagctgactcagatcaagcaagcgtagctggcaaggatcatatacgacaacgcggacaacatcaccagggtgcagagcaacgtgttcagggtgctggagttccctcacggctacgacagctgtgacgagatcctcagggtggacctccgggtgtggcaggactgctgtgaagactgtaggaccaggggccagttcaatgccttttccaatcatttccgagacagacggtctcttgagttcagctaccaggaggacaagccgaccaagaatacaagacctcggaaaatacccagtgttgggagacagggggaacatctcagcaacagcacctcagctttcagcacacgctcagatgcatctgggacaaatgacttcagagagtttgttctggaaatgcagaagaccatcacagacctcagaacacagataaagaaacttgaatcacggctcagtaccacagagtgccgtggatgcgggggccgaatctcacgccaacaaccaccaagtgaaaaaaaagatgcatgcaccatttgtgaatgcaaagacgggcaggtcacctgcttccgtggaagcttgccccccttgccaccctgtgctgtccccgtgaacatcccaggggcctgcttgtccagtctgcttacagaagaagggcggaggaaaaagcccctaggctccctggggaagctccttcagagttttgtcttgcttgtgccatcgtgagatcgggtggccgatggcagggagctgcggacttgcagaccaggaaacacccagaacttcgtgacatttcattgacaacgtccaagcttggtgctgtttacagaaaggcagttcaggaaggctttccaaccagagcattctgcggagaaggaaggcacagcaggtgctggaagggaagcaggcaggagtcctagcttcacgtttagacttctcaggtttttatttaattcttttaaaatgaaaaattggtgctactattaaattgcacagttgaatcatttaggcgcttaaattggttttgcctcccaacgccattttctttttaaataaagcaggatacctctatatgtcagccttgccttgttcagatgccaggagccggcagacctgtcacccgcaggtggggtgaagtctcggagctgccaagaggggctcaccgaaatcgggggttccatcacaagcctatgttttaaaaagaaaattgggtgtttggcaaacggaacagaaaccttttgatgagagcgtttcacagggacactgtctgggggttgcagtgcaaagcccccggccttctttccctggggaacctctgaaactcctcccttccctctggggctcctctgtaaacatttcacccacacgtccagcatcttaatcccaaagacaaaacatttcaccgctgctcgaaagcagctgctatagcctgtgactctccgtgtgtcagctcctttccacacctgattagaacattcccataagccacattttagaaacagattttgctttcagctgtccacttggcacacatactgcctagttggtgacccaaatgtgaaaaaaacctcctttcatcccattgtgtatctgatacctggccgagggccaagggtgtgtgttgacaacggcggttcccagccggccctgggttgcgtccacgtcctggaacaagagccgcttccgggatgggntcttttccaaggggaggtaggagctcatagtgtcggggaactgtcaaacttcaaggttgtgtgagtgcgttaaaaaaaaaaaaaagtcgacgc

SEQ ID NO: 4086 - DNA, 307 bp, Homo sapiens
  SIMILAR (82)..(126): 661254mologous to Homo sapiens p40,accession number U93571,Smith-Waterman Score=54.
  misc_feature (1)...(307): n = a,t,c or g
agcagacttgtcagcagaagccttatagaccaggagagaatgggatgatatattcaaagtgctaaaagnnnnnnnnnnggccagccaaagatactatatccatccaagttatcactcataaatgagannnnnnnnnnnnnnnnnnnnnnnnnnnnnnnnnnnnggaattcaccaccagattggtcctataagaaatgcttaagggaatcctacacatggaagcacaaggacagtatttgccatcatgaaaacataccaaagtataaaacctactggtagagcaagcacacaaataagcaaaaaaaag

SEQ ID NO: 4087 - DNA, 474 bp, Homo sapiens
  SIMILAR (7)..(156): 701254mologous to Homo sapiens UHX1 protein,accession number U44839,Smith-Waterman Score=160.
acgagggtcaatgagaatcagattgagtccaaggcagcctatgcccttttctacaaacgccaggacgtggcgcgacgcctgctgtccccggccggctcattggcgccccagcctcccctgcctgcagctccccacccagctctgagttcatggatgttaattgagagccctgggtcctgccacagaaaaaaaaaaaaaaagccctctctgcaatctcgcttctcgtgttcgccccgcttctcgtgtctcctcctagcagtgcgcgccccgcctgtgtttgcccttccagcagtgaccctcccttctagtctttatttatggtcgtgcccttccctctcctcagcccagagtgttctgcgtgggtggtgatgggggttcacctgaacacagagtgtattttcttattgaggccctgtaccttctgctggtgtgtgtgtatttttaaagcaccagtttgctcccaaaaaaaaaaaa

SEQ ID NO: 4088 - DNA, 775 bp, Homo sapiens
  SIMILAR (188)..(409): 511254mologous to Geochelone carbonaria b-chain hemoglobin,accession number U63145,Smith-Waterman Score=116.
  misc_feature (1)...(775): n = a,t,c or g
gacactcgctttttggaacgtctgaggttatcaataagctcctagtccagacgcccatgggtcatttcacagaggaggacaaggctactatcacaagcctgtggggcaaggtgaatgtggaaagatgctggaggagaaaccctgggaaggctcctggttgtctacccatggacccagaggttctttgaccagctttggcaacctgtcctctgccttctgccatccatgggcaacccccaaagtcaaggcacatggcaagaaggtgctgacttcctttgggagatgccataaagcacctgggatgatctcaaggggcacctttgcccaagcctgaagtgaaactgcacttgtgacaaagctgcatgttggatcctgaagaactttcaagcttcctggggaaatgttgctgggtgacccgtttttgggcaatcccattttcggcaaaagaatttcacccctggaggttggcaggctttcctgggcagaaagatgggtgacttggagttggccagttgccctggtccttcccagattaccactgaagctcaattgcccatgaatgcagagcttttcaaggatatggctttattcttgcaagcaattacaaataataaatctatttctgctaagagatcaccaaannnnnatnntnnnnnnncccccggattttttatttagcgggccgcacctttttccccttttagggggggtaaatttatattgggccttgggccggggttttcaaaagcggggggannnnnnnnnnaaagagccc

SEQ ID NO: 4089 - DNA, 773 bp, Homo sapiens
  SIMILAR (1)..(87): 1001254mologous to Homo sapiens UHX1 protein,accession number U44839,Smith-Waterman Score=145.
  misc_feature (1)...(773): n = a,t,c or g
gagattctcatcatccacctgaaacgcttttcctacaccaagttctcccgagagaagctggacaccctcgtggagtttcctatccggtcaggggccagggagaggatggctgggggaaggcagggaaaggagggggtgtaccagtattaaccctctccccacccacagggacctggacttctctgagtttgtcatccagccacagaatgagtcgaatccggagctgtacaaatatgacctcatcgcggtttccaaccattatgggggcatgcgtgatggacactgtatgtgccaggctgtgggtggggcctgccctgggggttctgggcaggggggcgatcaggaccttcccagtgagtgactagggatgtgagccagtggtgaaggttnatccgtggtgggaaggaagtgaacaagaagtgaaatctggacactttctgaagaggccaggaagggtaggcgaggataactctccttccctttcagacacaacatttgcctgcaacaaggacagcggccagtggcactactttgatgacaacagcgtctcccctgtcaatgagaatcagatcgagtccaaggcagcctatgtcctcttctaccaacgccaggacgtggcgcgacgcctgctgtccccggccggctcatctggcgccccagcctcccctgcctgcagctccccacccagctctgagttcatggatgttaattgagagccctgggtcctgccagcagaaaaaaaaaaaaaaaagccctctctgcaatctcgaaaa

SEQ ID NO: 4090 - DNA, 3262 bp, Homo sapiens
  SIMILAR (684)..(2477): 851254mologous to Homo sapiens UHX1 protein,accession number U44839,Smith-Waterman Score=2591.
gaattccgcttctacagctgctgctgcggcggctatggcggcggcacgggcggtggactgaggatagagagccacagcacgaggagctgccaggcctggacagccagtggcgccagatagaaaacggcgagagtgggcgagaacgtccactgcgggccggcgaaagctggttccttgtggagaagcactggtataagcagtgggaggcatacgtgcagggaggggaccaggactccagcaccttccctggctgcatcaacaatgccacactctttcaagatgagataaactggcgcctcaaggagggactggtggaaggcgaggattatgtgctgctcccagcacgtgcttggcattacctggtcagctggtatggtctagagcatggccagccacccattgaacgcaaggtcatagagctgcccaacatccagaaggtcgaagtgtacccagtagaactgctgcttgtccggcacaatgatttgggcaaatctcacactgttcagttcagccataccgattctattggcctagtattgcgcacagctcgggagcggtttctggtggagccccaggaagacactcggctttgggccaagaactcagaaggctctttggataggttgtatgacacacacatcacggttctcgatgcggcccttgagactgggcagttgatcatcatggagacccgcaagaaagatggcacttggcccagcgcacagctgcatgtcatgaacaacaacatgtcggaagaggatgaggacttcaagggtcagccaggcatctgtggcctcaccaatctgggcaacacgtgcttcatgaactcggccctgcagtgcctcagcaatgtgccacagctcaccgagtacttcctcaacaactgctacctggaggagctcaacttccgcaacccactgggcatgaagggtgagatcgcagaggcctatgcagacctggtgaagcaggcgtggtctggccaccaccgctccattgtgccacatgtgttcaagaacaaggttggccattttgcatcccaatttctgggctaccagcagcatgactctcaggagctgctgtcattcctcctggacgggctgcatgaggaccttaatcgggtgaagaagaaggagtatgtggagctgtgcgatgctgctgggcgaccggatcaggaggtggcacaggaggcatggcaaaaccacaaacggcggaacgattctgtgatcgtggacactttccacggcctcttcaagtccacgctggtgtgccccgattgtggcaatgtatctgtgaccttcgaccccttctgctacctcagtgttccactgcctatcagccacaagagggtcttggaggtcttctttatccccatggatccgcgccgcaagccagagcagcaccggctcgtggtccccaagaaaggcaagatctcggatctatgtgtggctctgtccaaacacacgggcatctcgccagagaggatgatggtggctgatgtcttcagtcaccgcttctataagctctatcagctagaggagcctctgagcagcatcttggaccgtgatgatatcttcgtctatgaggtgtcaggtcgcattgaggccattgagggctcaagagaggacatcgtggttcctgtctacctgcgggagcgcacccctgcccgtgactacaacaactcctactacggcctgatgctttttggacaccccctcctggtatcagtgccccgggaccgcttcacctgggagggcctgtataacgtcctgatgtaccggctctcacgctacgtgaccaaacccaactcagatgatgaggacgatggggatgagaaagaagatgacgaggaggataaagatgacgtccctgggccctcaactgggggcagcctccgagaccctgagccagagcaggctgggcccagctctggagtcacgaacaggtgcccgttcctcctggacaattgccttggcacatctcagtggcccccaaggcgacgacgcaagcagctggttcaactgcaagacggtgaactccaatgggcacaaccgactgcaccactccccttgcacgaagtccaatgccaagccggtacattgctattcgacttggaagccaagagatgaagaagccgttactatgacgagtaagagggtgaagggctacgtgaaggcaatgccttccgtcgggggtacgtatgaaggaaggctcccgtgcggctgcaggagtgcattgagctcttcaccactgtggagccccccccctttggggggaaaagaaagggaaaaaccctgggtactgccccttcctgcaagcagcaccagctggcaacccaagaagcttggacctgtggatgcctgccggagattctcatcatccacctgaaaacgttttttccttacacccaagttctccccgaaaagaagctggaacacccctcgtggaagtttccctatcccgggaccctggacttctcctgaagtttgtcatccaggcccaccagaatgaagtcgaaatccgggagctgtacaaaatatgacctcatccgcggtttcccaaccattaatgggggcatgcgtgatgggacacttacacaacatttggcctgcaacaaggacagcggccagtggcacttacttttgattgacaacagcgtgttccccttgttcaattgaggaattcagattcgagttccaagggcagcctatgtccttcttctaccaacgccaggaacgttggcgcgacgcctgctgtccccgtgccgtgctcatctggcgccctcagtcctcccctgcctgcacgctccctcacctcagctcgtgagttcatgtgatgttatattgagagccctgggtcctgccccagaaaaaaaaaaaaaaaaagccctctctgcaatctcgcttctcgtgtccgccccgcttctcttattcgtgttaggtgcccccgccaggcattgcaggcttagtcgtggctactgttctcctgtgccgctgaatcgctctctcccgggaaagaacaggtcgtgtctcctcctagcagtgcgcgccccgccttgtgtttgcccttccagcagtgaccctcccttctagtctttaatttatggtcgtgcccttccctctcctcagcccagagtgttctgcgtgggtggtgatgggggttcacctgaacacagagtgtattttcttattgaggccctgtaccttctgctgtgtgtgtgtatatataaagcaccagtctgctccccaaaaaaaaaacggaattc

SEQ ID NO: 4091 - DNA, 1587 bp, Homo sapiens
  SIMILAR (526)..(1536): 971254mologous to Homo sapiens fibronectin,accession number M10905,Smith-Waterman Score=1800.
atgacaatctcgacagctattcctgcaccaactgacctgaagttcactcaggtcacacccacaagcctgagcgcccagtggacaccacccaatgttcagctcactggatatcgagtgcgggtgacccccaaggagaagaccggaccaatgaaagaaatcaaccttgctcctgacagctcatccgtggttgtatcaggacttatggtggccaccaaatatgaagtgagtgtctatgctcttaaggacactttgacaagcagaccagctcagggagttgtcaccactctggagaatgtcagcccaccaagaagggctcgtgtgacagatgctactgagaccaccatcaccattagctggagaaccaagactgagacgatcactggcttccaagttgatgccgttccagccaatggccagactccaatccagagaaccatcaagccagatgtcagaagctacaccatcacaggtttacaaccaggcactgactacaagatctacctgtacaccttgaatgacaatgctcggagctcccctgtggtcatcgacgcctccactggcctggaaccgggaaccgaatatacaatttatgtcattgccctgaagaataatcagaagagcgagcccctgattggaaggaaaaagacagacgagcttccccaactggtaacccttccacaccccaatcttcatggaccagagatcttggatgttccttccacagttcaaaagacccctttcgtcacccaccctgggtatgacactggaaatggtattcagcttcctggcacttctggtcagcaacccagtgttgggcaacaaatgatctttgaggaacatggttttaggcggaccacaccgcccacaacggccacccccataaggcataggccaagaccatacccgccgaatgtaggtgaggaaatccaaattggtcacatccccagggaagatgtagactatcacctgtacccacacggtccgggactcaatccaaatgcctctacaggacaagaagctctctctcagacaaccatctcatgggccccattccaggacacttctgagtacatcatttcatgtcatcctgttggcactgatgaagaacccttacagttcagggttcctggaacttctaccagtgccactctgacaggcctcaccagaggtgccacctacaacgtcatagtggaggcactgaaagaccagcagaggcataaggttcgggaagaggttgttaccgtgggcaactctgtcaacgaaggcttgaaccaacctacggatgactcgtgctttgacccctacacagtttcccattatgccgttggagatgagtgggaacgaatgtctgaatcaggctttaaactgttgtgccagtgcttaggctttggaagtggtcatttcagatgtgattcatctagatggtgccatgacaatggtgtgaactacaagattggagagaagtgggaccgtcagggagaaaatggccagatgatgagctgcacatgtcttgggaacggaaaaggagaattcgaattcacaagaaactctgggctagggagttccatttgggagtcactcatttga

SEQ ID NO: 4092 - DNA, 3522 bp, Homo sapiens
  SIMILAR (139)..(3114): 901254mologous to Homo sapiens Human fibronectin,accession number AAB50377,Smith-Waterman Score=4902.
atgcttaggggtccggggcccgggctgctgctgctggccgtccagtgcctggggacagcggtgccctccacgggagcctcgaagagcaagaggcaggctcagcaaatggttcagccccagtccccggtggctgtcagtcaaagcaagcccggttgttatgacaatggaaaacactatcagataaatcaacagtgggagcggacctacctaggcaatgcgttggtttgtacttgttatggaggaagccgaggttttaactgcgagagtaaacctgaagctgaagagacttgctttgacaagtacactgggaacacttaccgagtgggtgacacttatgagcgtcctaaagactccatgatctgggactgtacctgcatcggggctgggcgagggagaataagctgtaccatcgcaaaccgctgccatgaagggggtcagtcctacaagattggtgacacctggaggagaccacatgagactggtggttacatgttagagtgtgtgtgtcttggtaatggaaaaggagaatggacctgcaagcccatagatagatgcaacgatcaggacacaaggacatcctatagaattggagacacctggagcaagaaggataatcgaggaaacctgctccagtgcatctgcacaggcaacggccgaggagagtggaagtgtgagaggcacacctctgtgcagaccacatcgagcggatctggccccttcaccgatgttcgtgcagctgtttaccaaccgcagcctcacccccagcctcctccctatggccactgtgtcacagacagtggtgtggtctactctgtggggatgcagtggctgaagacacaaggaaataagcaaatgctttgcacgtgcctgggcaacggagtcagctgccaagagacagctgtaacccagacttacggtggcaactcaaatggagagccatgtgtcttaccattcacctacaatggcaggacgttctactcctgcaccacagaagggcgacaggacggacatctttggtgcagcacaacttcgaattatgagcaggaccagaaatactctttctgcacagaccacactgttttggttcagactcgaggaggaaattccaatggtgccttgtgccacttccccttcctatacaacaaccacaattacactgattgcacttctgagggcagaagagacaacatgaagtggtgtgggaccacacagaactatgatgccgaccagaagtttgggttctgccccatggctgcccacgaggaaatctgcacaaccaatgaaggggtcatgtaccgcattggagatcagtgggataagcagcatgacatgggtcacatgatgaggtgcacgtgtgttgggaatggtcgtggggaatggacatgcattgcctactcgcagcttcgagatcagtgcattgttgatgacatcacttacaatgtgaacgacacattccacaagcgtcatgaagaggggcacatgctgaactgtacatgcttcggtcagggtcggggcaggtggaagtgtgatcccgtcgaccaatgccaggattcagagactgggacgttttatcaaattggagattcatgggagaagtatgtgcatggtgtcagataccagtgctactgctatggccgtggcattggggagtggcattgccaacctttacagacctatccaagctcaagtggtcctgtcgaagtatttatcactgagactccgagtcagcccaactcccaccccatccagtggaatgcaccacagccatctcacatttccaagtacattctcaggtggagacctaaaaattctgtaggccgttggaaggaagctaccataccaggccacttaaactcctacaccatcaaaggcctgaagcctggtgtggtatacgagggccagctcatcagcatccagcagtacggccaccaagaagtgactcgctttgacttcaccaccaccagcaccagcacacctgtgaccagcaacaccgtgacaggagagacgactcccttttctcctcttgtggccacttctgaatctgtgaccgaaatcacagccagtagctttgtggtctcctgggtctcagcttccgacaccgtgtcgggattccgggtggaatatgagctgagtgaggagggagatgagccacagtacctggatcttccaagcacagccacttctgtgaacatccctgacctgcttcctggccgaaaatacattgtaaatgtctatcagatatctgaggatggggagcagagtttgatcctgtctacttcacaaacaacagcgcctgatgcccctcctgacacgactgtggaccaagttgatgacacctcaattgttgttcgctggagcagaccccaggctcccatcacagggtacagaatagtctattcgccatcagtagaaggtagcagcacagaactcaaccttcctgaaactgcaaactccgtcaccctcagtgacttgcaacctggtgttcagtataacatcactatctatgctgtggaagaaaatcaagaaagtacacctgttgtcattcaacaagaaaccactggcaccccacgctcagatacagtgccctctcccagggacctgcagtttgtggaagtgacagacgtgaaggtcaccatcatgtggacaccgcctgagagtgcagtgaccggctaccgtgtggatgtgatccccgtcaacctgcctggcgagcacgggcagaggctgcccatcagcaggaacacctttgcagaagtcaccgggctgtcccctggggtcacctattacttcaaagtctttgcagtgagccatgggagggagagcaagcctctgactgctcaacagacaaccaaactggatgctcccactaacctccagtttgtcaatgaaactgattctactgtcctggtgagatggactccacctcgggcccagataacaggataccgactgaccgtgggccttacccgaagaggacagcccaggcagtacaatgtgggtccctctgtctccaagtacccactgaggaatctgcagcctgcatctgagtacaccgtatccctcgtggccataaagggcaaccaagagagccccaaagccactggagtctttaccacacgccatcattccccaagaaaaatgtcaggcatgaacaccccatggaggactctccacatgcacaggtgctccttatcccatccagggttcattacccacagtgagcggctgtgtgtgcccaaaatccactgtgagtggctgtacgtgctcatcacccactatgagtgtacttgtccattacccactatgagtggctgtgcgtgtccgtcacctgccgtgggtggctgcgcgtctgtcacctgccgtgggtggctgtgcatgtatgtcacccgccgtgggtggctgtgcgtgtccgtcacctgccgtgggtggctgtgcgtgtctgtcgcctgccatgggtggctgtgcatgttttgtcctcatcatcatcttgggcttcagcactttgctctgggccacggtggctga

SEQ ID NO: 4093 - DNA, 674 bp, Homo sapiens
  SIMILAR (3)..(266): 1001254mologous to Homo sapiens Tissue-binding hybrid protein,accession number AAR60019,Smith-Waterman Score=455.
aactggatgctcccactaacctccagtttgtcaatgaaactgattctactgtcctggtgagatggactccacctcgggcccagataacaggataccgactgaccgtgggccttacccgaagaggacagcccaggcagtacaatgtgggtccctctgtctccaagtacccactgaggaatctgcagcctgcatctgagtacaccgtatccctcgtggccataaagggcaaccaagagagccccaaagccactggagtctttaccacacgccatcattccccaagaaaaatgtcaggcatgaacaccccatggaggactctccacatgcacaggtgctccttatcccatccagggttcattacccacagtgagcggctgtgtgtgcccaaaatccactgtgagtggctgtacgtgctcatcacccactatgagtgtacttgtccattacccactatgagtggctgtgcgtgtccgtcacctgccgtgggtggctgcgcgtctgtcacctgccgtgggtggctgtgcatgtatgtcacccgccgtgggtggctgtgcgtgtccgtcacctgccgtgggtggctgtgcgtgtctgtcgcctgccatgggtggctgtgcatgttttgtcctcatcatcatcttgggcttcagcactttgctctgggccacggtggctga

SEQ ID NO: 4094 - DNA, 2384 bp, Homo sapiens
  SIMILAR (3)..(2381): 1001254mologous to Homo sapiens fibronectin,accession number M10905,Smith-Waterman Score=4266.
atcaaacagaaatgactattgaaggcttgcagcccacagtggagtatgtggttagtgtctatgctcagaatccaagcggagagagtcagcctctggttcagactgcagtaaccaacattgatcgccctaaaggactggcattcactgatgtggatgtcgattccatcaaaattgcttgggaaagcccacaggggcaagtttccaggtacagggtgacctactcgagccctgaggatggaatccatgagctattccctgcacctgatggtgaagaagacactgcagagctgcaaggcctcagaccgggttctgagtacacagtcagtgtggttgccttgcacgatgatatggagagccagcccctgattggaacccagtccacagctattcctgcaccaactgacctgaagttcactcaggtcacacccacaagcctgagcgcccagtggacaccacccaatgttcagctcactggatatcgagtgcgggtgacccccaaggagaagaccggaccaatgaaagaaatcaaccttgctcctgacagctcatccgtggttgtatcaggacttatggtggccaccaaatatgaagtgagtgtctatgctcttaaggacactttgacaagcagaccagctcagggtgttgtcaccactctggagaatgtcagcccaccaagaagggctcgtgtgacagatgctactgagaccaccatcaccattagctggagaaccaagactgagacgatcactggcttccaagttgatgccgttccagccaatggccagactccaatccagagaaccatcaagccagatgtcagaagctacaccatcacaggtttacaaccaggcactgactacaagatctacctgtacaccttgaatgacaatgctcggagctcccctgtggtcatcgacgcctccactgccattgatgcaccatccaacctgcgtttcctggccaccacacccaattccttgctggtatcatggcagccgccacgtgccaggattaccggctacatcatcaagtatgagaagcctgggtctcctcccagagaagtggtccctcggccccgccctggtgtcacagaggctactattactggcctggaaccgggaaccgaatatacaatttatgtcattgccctgaagaataatcagaagagcgagcccctgattggaaggaaaaagacagacgagcttccccaactggtaacccttccacaccccaatcttcatggaccagagatcttggatgttccttccacagttcaaaagacccctttcgtcacccaccctgggtatgacactggaaatggtattcagcttcctggcacttctggtcagcaacccagtgttgggcaacaaatgatctttgaggaacatggttttaggcggaccacaccgcccacaacggccacccccataaggcataggccaagaccatacccgccgaatgtaggtgaggaaatccaaattggtcacattcccagggaagatgtagactatcacctgtacccacacggtccggggctcaatccaaatgcctctacaggacaagaagctctctctcagacaaccatctcatgggccccattccaggacacttctgagtacatcatttcatgtcatcctgttggcactgatgaagaacccttacagttcagggttcctggaacttctaccagtgcgactctgacaggcctcaccagaggtgccacctacaacatcatagtggaggcactgaaagaccagcagaggcataaggttcgggaagaggttgttaccgtgggcaactctgtcaacgaaggcttgaaccaacctacggatgactcgtgctttgacccctacacagtttcccattatgccgttggagatgagtgggaacgaatgtctgaatcaggctttaaactgttgtgccagtgcttaggctttggaagtggtcatttcagatgtgattcatctagatggtgccatgacaatggtgtgaactacaagattggagagaagtgggaccgtcagggagaaaatggccagatgatgagctgcacatgtcttgggaacggaaaaggagaattcaagtgtgaccctcatgaggcaacgtgttacgatgatgggaagacataccacgtaggagaacagtggcagaaggaatatctcggtgccatttgctcctgcacatgctttggaggccagcggggctggcgctgtgacaactgccgcagacctgggggtgaacccagtcccgaaggcactactggccagtcctacaaccagtattctcagagataccatcagagaacaaacactaatgttaattgcccaattgagtgcttcatgcctttagatgtacaggctgacagagaagattcccgagagtaa

SEQ ID NO: 4095 - DNA, 2348 bp, Homo sapiens
  SIMILAR (2)..(2347): 1001254mologous to Homo sapiens fibronectin,accession number U42594,Smith-Waterman Score=4070.
cacttttgataacctgagtcccggcctggagtacaatgtcagtgtttacactgtcaaggatgacaaggaaagtgtccctatctctgataccatcatcccagctgttcctcctcccactgacctgcgattcaccaacattggtccagacaccatgcgtgtcacctgggctccacccccatccattgatttaaccaacttcctggtgcgttactcacctgtgaaaaatgaggaagatgttgcagagttgtcaatttctccttcagacaatgcagtggtcttaacaaatctcctgcctggtacagaatatgtagtgagtgtctccagtgtctacgaacaacatgagagcacacctcttagaggaagacagaaaacaggtcttgattccccaactggcattgacttttctgatattactgccaactcttttactgtgcactggattgctcctcgagccaccatcactggctacaggatccgccatcatcccgagcacttcagtgggagacctcgagaagatcgggtgccccactctcggaattccatcaccctcaccaacctcactccaggcacagagtatgtggtcagcatcgttgctcttaatggcagagaggaaagtcccttattgattggccaacaatcaacagtttctgatgttccgagggacctggaagttgttgctgcgacccccaccagcctactgatcagctgggatgctcctgctgtcacagtgagatattacaggatcacttacggagaaacaggaggaaatagccctgtccaggagttcactgtgcctgggagcaagtctacagctaccatcagcggccttaaacctggagttgattataccatcactgtgtatgctgtcactggccgtggagacagccccgcaagcagcaagccaatttccattaattaccgaacagaaattgacaaaccatcccagatgcaagtgaccgatgttcaggacaacagcattagtgtcaagtggctgccttcaagttcccctgttactggttacagagtaaccaccactcccaaaaatggaccaggaccaacaaaaactaaaactgcaggtccagatcaaacagaaatgactattgaaggcttgcagcccacagtggagtatgtggttagtgtctatgctcagaatccaagcggagagagtcagcctctggttcagactgcagtaaccactattcctgcaccaactgacctgaagttcactcaggtcacacccacaagcctgagcgcccagtggacaccacccaatgttcagctcactggatatcgagtgcgggtgacccccaaggagaagaccggaccaatgaaagaaatcaaccttgctcctgacagctcatccgtggttgtatcaggacttatggtggccaccaaatatgaagtgagtgtctatgctcttaaggacactttgacaagcagaccagctcagggtgttgtcaccactctggagaatgtcagcccaccaagaagggctcgtgtgacagatgctactgagaccaccatcaccattagctggagaaccaagactgagacgatcactggcttccaagttgatgccgttccagccaatggccagactccaatccagagaaccatcaagccagatgtcagaagctacaccatcacaggtttacaaccaggcactgactacaagatctacctgtacaccttgaatgacaatgctcggagctcccctgtggtcatcgacgcctccactgccattgatgcaccatccaacctgcgtttcctggccaccacacccaattccttgctggtatcatggcagccgccacgtgccaggattaccggctacatcatcaagtatgagaagcctgggtctcctcccagagaagtggtccctcggccccgccctggtgtcacagaggctactattactggcctggaaccgggaaccgaatatacaatttatgtcattgccctgaagaataatcagaagagcgagcccctgattggaaggaaaaagacagttcaaaagacccctttcgtcacccaccctgggtatgacactggaaatggtattcagcttcctggcacttctggtcagcaacccagtgttgggcaacaaatgatctttgaggaacatggttttaggcggaccacaccgcccacaacggccacccccataaggcataggccaagaccatacccgccgaatgtaggacaagaagctctctctcagacaaccatctcatgggccccattccaggacacttctgagtacatcatttcatgtcatcctgttggcactgatgaagaacccttacagttcagggttcctggaacttctaccagtgccactctgacag

SEQ ID NO: 4096 - DNA, 7341 bp, Homo sapiens
  SIMILAR (1)..(7338): 1001254mologous to Homo sapiens Fibrinogen-alpha,accession number AAR60021,Smith-Waterman Score=13183.
atgcttaggggtccggggcccgggctgctgctgctggccgtcctgtgcctggggacagcggtgccctccacgggagcctcgaagagcaagaggcaggctcagcaaatggttcagccccagtccccggtggctgtcagtcaaagcaagcccggttgttatgacaatggaaaacactatcagataaatcaacagtgggagcggacctacctaggtaatgtgttggtttgtacttgttatggaggaagccgaggttttaactgcgaaagtaaacctgaagctgaagagacttgctttgacaagtacactgggaacacttaccgagtgggtgacacttatgagcgtcctaaagactccatgatctgggactgtacctgcatcggggctgggcgagggagaataagctgtaccatcgcaaaccgctgccatgaagggggtcagtcctacaagattggtgacacctggaggagaccacatgagactggtggttacatgttagagtgtgtgtgtcttggtaatggaaaaggagaatggacctgcaagcccatagctgagaagtgttttgatcatgctgctgggacttcctatgtggtcggagaaacgtgggagaagccctaccaaggctggatgatggtagattgtacttgcctgggagaaggcagcggacgcatcacttgcacttctagaaatagatgcaacgatcaggacacaaggacatcctatagaattggagacacctggagcaagaaggataatcgaggaaacctgctccagtgcatctgcacaggcaacggccgaggagagtggaagtgtgagaggcacacctctgtgcagaccacatcgagcggatctggccccttcaccgatgttcgtgcagctgtttaccaaccgcagcctcacccccagcctcctccctatggccactgtgtcacagacagtggtgtggtctactctgtggggatgcagtggttgaagacacaaggaaataagcaaatgctttgcacgtgcctgggcaacggagtcagctgccaagagacagctgtaacccagacttacggtggcaacttaaatggagagccatgtgtcttaccattcacctacaatggcaggacgttctactcctgcaccacggaagggcgacaggacggacatctttggtgcagcacaacttcgaattatgagcaggaccagaaatactctttctgcacagaccacactgttttggttcagactcaaggaggaaattccaatggtgccttgtgccacttccccttcctatacaacaaccacaattacactgattgcacttctgagggcagaagagacaacatgaagtggtgtgggaccacacagaactatgatgccgaccagaagtttgggttctgccccatggctgcccacgaggaaatctgcacaaccaatgaaggggtcatgtaccgcattggagatcagtgggataagcagcatgacatgggtcacatgatgaggtgcacgtgtgttgggaatggtcgtggggaatggacatgcattgcctactcgcaacttcgagatcagtgcattgttgatgacatcacttacaatgtgaacgacacattccacaagcgtcatgaagaggggcacatgctgaactgtacatgcttcggtcagggtcggggcaggtggaagtgtgatcccgtcgaccaatgccaggattcagagactgggacgttttatcaaattggagattcatgggagaagtatgtgcatggtgtcagataccagtgctactgctatggccgtggcattggggagtggcattgccaacctttacagacctatccaagctcaagtggtcctgtcgaagtatttatcactgagactccgagtcagcccaactcccaccccatccagtggaatgcaccacagccatctcacatttccaagtacattctcaggtggagacctaaaaattctgtaggccgttggaaggaagctaccataccaggccacttaaactcctacaccatcaaaggcctgaagcctggtgtggtatacgagggccagctcatcagcatccagcagtacggccaccaagaagtgactcgctttgacttcaccaccaccagcaccagcacacctgtgaccagcaacaccgtgacaggagagacgactcccttttctcctcttgtggccacttctgaatctgtgaccgaaatcacagccagtagctttgtggtctcctgggtctcagcttccgacaccgtgtcgggattccgggtggaatatgagctgagtgaggagggagatgagccacagtacctggatcttccaagcacagccacttctgtgaacatccctgacctgcttcctggccgaaaatacattgtaaatgtctatcagatatctgaggatggggagcagagtttgatcctgtctacttcacaaacaacagcgcctgatgcccctcctgacccgactgtggaccaagttgatgacacctcaattgttgttcgctggagcagaccccaggctcccatcacagggtacagaatagtctattcgccatcagtagaaggtagcagcacagaactcaaccttcctgaaactgcaaactccgtcaccctcagtgacttgcaacctggtgttcagtataacatcactatctatgctgtggaagaaaatcaagaaagtacacctgttgtcattcaacaagaaaccactggcaccccacgctcagatacagtgccctctcccagggacctgcagtttgtggaagtgacagacgtgaaggtcaccatcatgtggacaccgcctgagagtgcagtgaccggctaccgtgtggatgtgatccccgtcaacctgcctggcgagcacgggcagaggctgcccatcagcaggaacacctttgcagaagtcaccgggctgtcccctggggtcacctattacttcaaagtctttgcagtgagccatgggagggagagcaagcctctgactgctcaacagacaaccaaactggatgctcccactaacctccagtttgtcaatgaaactgattctactgtcctggtgagatggactccacctcgggcccagataacaggataccgactgaccgtgggccttacccgaagaggccagcccaggcagtacaatgtgggtccctctgtctccaagtaccccctgaggaatctgcagcctgcatctgagtacaccgtatccctcgtggccataaagggcaaccaagagagccccaaagccactggagtctttaccacactgcagcctgggagctctattccaccttacaacaccgaggtgactgagaccaccatcgtgatcacatggacgcctgctccaagaattggttttaagctgggtgtacgaccaagccagggaggagaggcaccacgagaagtgacttcagactcaggaagcatcgttgtgtccggcttgactccaggagtagaatacgtctacaccatccaagtcctgagagatggacaggaaagagatgcgccaattgtaaacaaagtggtgacaccattgtctccaccaacaaacttgcatctggaggcaaaccctgacactggagtgctcacagtctcctgggagaggagcaccaccccagacattactggttatagaattaccacaacccctacaaacggccagcagggaaattctttggaagaagtggtccatgctgatcagagctcctgcacttttgataacctgagtcccggcctggagtacaatgtcagtgtttacactgtcaaggatgacaaggaaagtgtccctatctctgataccatcatcccagaggtgccccaactcactgacctaagctttgttgatataaccgattcaagcatcggcctgaggtggaccccgctaaactcttccaccattattgggtaccgcatcacagtagttgcggcaggagaaggtatccctatttttgaagattttgtgtactcctcagtaggatactacacagtcacagggctggagccgggcattgactatgatatcagcgttatcactctcattaatggcggcgagagtgcccctactacactgacacaacaaacggctgttcctcctcccactgacctgcgattcaccaacattggtccagacaccatgcgtgtcacctgggctccacccccatccattgatttaaccaacttcctggtgcgttactcacctgtgaaaaatgaggaagatgttgcagagttgtcaatttctccttcagacaatgcagtggtcttaacaaatctcctgcctggtacagaatatgtagtgagtgtctccagtgtctacgaacaacatgagagcacacctcttagaggaagacagaaaacaggtcttgattccccaactggcattgacttttctgatattactgccaactcttttactgtgcactggattgctcctcgagccaccatcactggctacaggatccgccatcatcccgagcacttcagtgggagacctcgagaagatcgggtgccccactctcggaattccatcaccctcaccaacctcactccaggcacagagtatgtggtcagcatcgttgctcttaatggcagagaggaaagtcccttattgattggccaacaatcaacagtttctgatgttccgagggacctggaagttgttgctgcgacccccaccagcctactgatcagctgggatgctcctgctgtcacagtgagatattacaggatcacttacggagaaacaggaggaaatagccctgtccaggagttcactgtgcctgggagcaagtctacagctaccatcagcggccttaaacctggagttgattataccatcactgtgtatgctgtcactggccgtggagacagccccgcaagcagcaagccaatttccattaattaccgaacagaaattgacaaaccatcccagatgcaagtgaccgatgttcaggacaacagcattagtgtcaagtggctgccttcaagttcccctgttactggttacagagtaaccaccactcccaaaaatggaccaggaccaacaaaaactaaaactgcaggtccagatcaaacagaaatgactattgaaggcttgcagcccacagtggagtatgtggttagtgtctatgctcagaatccaagcggagagagtcagcctctggttcagactgcagtaaccaacattgatcgccctaaaggactggcattcactgatgtggatgtcgattccatcaaaattgcttgggaaagcccacaggggcaagtttccaggtacagggtgacctactcgagccctgaggatggaatccatgagctattccctgcacctgatggtgaagaagacactgcagagctgcaaggcctcagaccgggttctgagtacacagtcagtgtggttgccttgcacgatgatatggagagccagcccctgattggaacccagtccacagctattcctgcaccaactgacctgaagttcactcaggtcacacccacaagcctgagcgcccagtggacaccacccaatgttcagctcactggatatcgagtgcgggtgacccccaaggagaagaccggaccaatgaaagaaatcaaccttgctcctgacagctcatccgtggttgtatcaggacttatggtggccaccaaatatgaagtgagtgtctatgctcttaaggacactttgacaagcagaccagctcagggtgttgtcaccactctggagaatgtcagcccaccaagaagggctcgtgtgacagatgctactgagaccaccatcaccattagctggagaaccaagactgagacgatcactggcttccaagttgatgccgttccagccaatggccagactccaatccagagaaccatcaagccagatgtcagaagctacaccatcacaggtttacaaccaggcactgactacaagatctacctgtacaccttgaatgacaatgctcggagctcccctgtggtcatcgacgcctccactgccattgatgcaccatccaacctgcgtttcctggccaccacacccaattccttgctggtatcatggcagccgccacgtgccaggattaccggctacatcatcaagtatgagaagcctgggtctcctcccagagaagtggtccctcggccccgccctggtgtcacagaggctactattactggcctggaaccgggaaccgaatatacaatttatgtcattgccctgaagaataatcagaagagcgagcccctgattggaaggaaaaagacagacgagcttccccaactggtaacccttccacaccccaatcttcatggaccagagatcttggatgttccttccacagttcaaaagacccctttcgtcacccaccctgggtatgacactggaaatggtattcagcttcctggcacttctggtcagcaacccagtgttgggcaacaaatgatctttgaggaacatggttttaggcggaccacaccgcccacaacggccacccccataaggcataggccaagaccatacccgccgaatgtaggacaagaagctctctctcagacaaccatctcatgggccccattccaggacacttctgagtacatcatttcatgtcatcctgttggcactgatgaagaacccttacagttcagggttcctggaacttctaccagtgccactctgacaggcctcaccagaggtgccacctacaacatcatagtggaggcactgaaagaccagcagaggcataaggttcgggaagaggttgttaccgtgggcaactctgtcaacgaaggcttgaaccaacctacggatgactcgtgctttgacccctacacagtttcccattatgccgttggagatgagtgggaacgaatgtctgaatcaggctttaaactgttgtgccagtgcttaggctttggaagtggtcatttcagatgtgattcatctagatggtgccatgacaatggtgtgaactacaagattggagagaagtgggaccgtcagggagaaaatggccagatgatgagctgcacatgtcttgggaacggaaaaggagaattcaagtgtgaccctcatgaggcaacgtgttacgatgatgggaagacataccacgtaggagaacagtggcagaaggaatatctcggtgccatttgctcctgcacatgctttggaggccagcggggctggcgctgtgacaactgccgcagacctgggggtgaacccagtcccgaaggcactactggccagtcctacaaccagtattctcagagataccatcagagaacaaacactaatgttaattgcccaattgagtgcttcatgcctttagatgtacaggctgacagagaagattcccgagagtaa

SEQ ID NO: 4097 - DNA, 7827 bp, Homo sapiens
  SIMILAR (3656)..(4672): 941254mologous to Homo sapiens Human fibronectin,accession number AAW99595,Smith-Waterman Score=1664.
  misc_feature (1)...(7827): n = a,t,c or g
gaagagcaagaggcaggctcagcaaatggttcagccccagtccccggtggctgtcagtcaaagcaagcccggttgttatgacaatggaaaacactatcagataaatcaacagtgggagcggacctacctaggtaatgtgttggtttgtacttgttatggaggaagccgaggttttaactgcgaaagtaaacctgaagctgaagagacttgctttgacaagtacactgggaacacttaccgagtgggtgacacttatgagcgtcctaaagactccatgatctgggactgtacctgcatcggggctgggcgagggagaataagctgtaccatcgcaaaccgctgccatgaagggggtcagtcctacaagattggtgacacctggaggagaccacatgagactggtggttacatgttagagtgtgtgtgtcttggtaatggaaaaggagaatggacctgcaagcccatagctgagaagtgttttgatcatgctgctgggacttcctatgtggtcggagaaacgtgggagaagccctaccaaggctggatgatggtagattgtacttgcctgggagaaggcagcggacgcatcacttgcacttctagaaatagatgcaacgatcaggacccaagggcatcctatagaattggagacccctggagcaacaaggttcatcgaggaaacctgctccagtgccatctgcacaggcaacgcccgaggagagtggaagtgtgagaggcacacctctgtgcagaccacatcgagcggatctggccctttcaccgatgttcgtgcagctgtttaccaaccgcagcctcacccccagcctcctccctatggccactgtgtcacagacagtggtgtggtctactctgtggggatgcagtggctgaagacacaaggaaataagcaaatgctttgcacgtgcctgggcaacggagtcagctgccaagagacagctgtaaaccagaattaccgtcggcaactcaaatggagagccatgtgtcttaccattcacctacaatggcaggacgttctactcctgcaccacggaagggcgacaggacggacatctttggtgcagcacaacttcgaattatgagcaggaccagaaatactctttctgcacagaccacactgttttggttcagactcaaggaggaaattccaatggtgccttgtgccacttccccttcctatacaacaaccacaattacactgattgcacttctgagggcagaagagacaacatgaagtggtgtgggaccacacagaactatgatgccgaccagaagtttgggttctgccccatggctgcccacgaggaaatctgcacaaccaatgaaggggtcatgtaccgcattggagatcagtgggataagcagcatgacatgggtcacatgatgaggtgcacgtgtgttgggaatggtcgtggggaatggacatgcattgcctactcgcaacttcgagatcagtgcattgttgatgacatcacttacaatgtgaacgacacattccacaagcgtcatgaagaggggcacatgctgaactgtacatgcttcggtcagggtcggggcaggtggaagtgtgatcccgtcgaccaatgccaggattcagagactgggacgttttatcaaattggagattcatgggagaagtatgtgcatggtgtcagataccagtgctactgctatggccgtggcattggggagtggcattgccaacctttacagacctatccaagctcaagtggtcctgtcgaagtatttatcactgagactcccgagtcagcccaaacttcccccccatccagtggaatgcaccacagccatctcacatttccaagtacattctcaggtggagacctaaaaattctgtaggccgttggaaggaagctaccataccaggccacttaaactcctacaccatcaaaggcctgaagcctgggtgtgggtatacgagggccagctcatcagcatccagcagtacggccaccaagaattgactcgctttgacttcacaaccaccagcaccagcacacctgtgaccagcaacacccgtgacaggagagacgactcccttttctcctcttgtggccacttctgaatctgtgaccgaaatcacagccagtagctttgtggtctcctgggtctcagcttccgacaccgtgtcgggattccgggtggaatatgagctgagtgaggagggagatgagccacagtacctggatcttccaagcacagccacttctgtgaacatccctgacctgcttcctggccgaaaatacattgtaaatgtctatcagatatctgaggatggggagcagagtttgatcctgtctacttcacaaacaacagcgcctgatgcccctcctgacccgactgtggaccaagttgatgacacctcaattgttgttcgctggagcagaccccaggctcccatcacagggtacagaatagtctattcgccatcagtagaaggtagcagcacagaactcaaccttcctgaaactgcaaactccgtcaccctcagtgacttgcaacctggtgttcagtataacatcactatctatgctgtggaagaaaatcaagaaagtacacctgttgtcattcaacaagaaaccactggcaccccacgctcagatacagtgccctctcccagggacctgcagtttgtggaagtgacagacgtgaaggtcaccatcatgtggacaccgcctgagagtgcagtgaccggctaccgtgtggatgtgatccccgtcaacctgcctggcgagcacgggcagaggctgccactcagcaggaacacctttcgcagaagtcaccgggctgtcccctggggtcacctattacttcaaagtctttggccagtgagccactgggagggagagcaagcctctgactgctcaacagacaaccaaactgggatgctcccactaacctccagtttgtcaatggaactgattctactgtccttggttgagatggactccacttccgggcccagataacaggataccgactgaccgtgggccttacccgaagaggacagcccaggcagtacaatgtgggtccctctgtctccaagtacccactgaggaatctgcagcctgcatctgagtacaccgtatccctcgtggccataaagggcaaccaagagaaccccaaagccactggagtatttaccacactgcagccaggaagctctattccaccttacaacaccgaggtgactgagaccaccatcgtgatcacatggacgcatgctccaagaattggttttaagctgggtgtacgaccaagcaacccaggagaggcaccacgagaagtgacttcagactcaggaagcatcgttgtgtccggcttgactccaggagtagagtacgtctacaccatccaagtcctgagagatggacaggatagagatgcgcccaattgtaaacaaaagtggtgacaccattgtctccaccaacaaacttgcatctggaggcaaaccctgacactggagtgctcacagtctcctgggagaggagcaccaccccagacattactggttatagaattaccacaacccctacaaacggccagcagggaaattctttggaagaagtggtccatgctgatcagagctcctgcactttttgataaccttgaagtcccgggcctggagtacaatgtcagtgtttacactgtcaaggatgacaaggaaagtgtccctatctctgataccatcatcccagctgttcctcctcccactgacctgcgattcaccaacattggtccagacaccatgcgtgtcacctgggctccacccccatccattgatttaaccaacttcctggtgcgttactcacctgtgaaaaatgaggaagatgttgcagagttgtcaatttctccttcagacaatgcagtggtcttaacaaatctcctgcctggtacagaatatgtagtgagtgtctccagtgtctacgaacaacatgagagcacacctcttagaggaagacagaaaacaggtcttgattccccaactggcattgacttttctgatattactgccaactcttttactgtgcactggattgctcctcgagccaccatcactggctacaggatccgccatcatcccgagcacttcagtgggagacctcgagaagatcgggtgccccactctcggaattccatcaccctcaccaacctcactccaggcacagagtatgtggtcagcatcgttgctcttaatggcagagaggaaagtcccttattgattggccaacaatcaacagtttctgatgttccgagggacctggaagttgttgctgcgacccccaccagcctactgatcagctgggatgctcctgctgtcacagtgagatattacaggatcacttacggagaaacaggaggaaatagccctgtccaggagttcactgtgcctgggagcaagtctacagctaccatcagcggccttaaacctggagttgattataccatcactgtgtatgctgtcactggccgtggagacagccccgcaagcagcaagccaatttccattaattaccgaacagaaattgacaaaccatcccagatgcaagtgaccgatgttcaggacaacagcattagtgtcaagtggctgccttcaagttcgcctgttactggttacagagtaaccaccacttcccaaaaatggaccaggaccaacaaaaactaaaactgcaggtccagatcaaacagaaatgactattgaaggcttgcagcccacagtggagtatgtggttagtgtctatgctcagaatccaagcggagagacgtcagcctctggttcagactgcagtaaccaacattgatcgccctaaaggactggcattcactgatgtggatgtcgattccatcaaaattgcttgggaaagcccacatggggcaagtttccaggtacagggtgacctactcgagcccctgaggatggaatccatgagctattccctgcacctgatggtgaagaagacactgcagagctgccaaggcctcagaccgggttctgagtacacagtcagtgtggttgccttgcacgatgatatggagagccagcccctgattggaacccagtccacagctattcctgcaccaactgacctgaagttcactcaggtcacacccacaagcctgagcgcccagtggacaccacccaatgttcagctcactggatatcgagtgcgggtgacccccaaggagaagaccggaccaatgaaagaaatcaagccttgctcctgacagctcatccgtggttgtatcaggacttatggtggccaccaaatatgaagtgagtgtgctatgctcttaaggacactttgacaagcagaccagctcagaggtgttgtcaccactctggagaatgtcagcccaccaagaagggctcgtgtgacagatgctactgagaccaccatcaccattagctnggagaaccaagacttagacgatcacttgggcttccaagttgatgcccgttccagccaatggccagactccaatccagagaaccatcaagccagatgtcagaagctacaccatcacaggtttacaaccaggcactgactacaagatctacctgtacaccttgaatgacaatgctcggagctcccctgtggtcatcgacgcctccactgccattgatgcaccatccaacctgcgtttcctggccaccacacccaattccttgctggtatcatggcagccgccacgtgccaggattaccggctacatcatcaagtatgagaagcctgggtctcctcccagagaagtggtccctcggccccgccctggtgtcacagaggctactattactggcctggaaccgggaaccgaatatacaatttatgtcattgccctgaagaataatcagaagagcgagcccctgattggaaggaaaaagacagacgagcttccccaactggtaacccttccacaccccaatcttcatggaccagagatcttggatgttccttccacagttcaaaagacccctttcgtcacccaccctgggtatgacactggaaatggtattcagcttcctggcacttctggtcagcaacccagtgttgggcaacaaatgatctttgaggaacatggttttaggcggaccacaccgcccacaacggccacccccataaggcataggccaagaccatacccgccgaatgtaggacaagaagctctctctcagacaaccatgtcatgggccccagccctttacactgctgagtacatcatttcatgtcatcctgggggctctgatgaagaacccttacagttcatggatactggaactgctaccagcgccactctgacaggcctcaccagaggtgccacctacaacatgataatggaggcactgaaagaccagcactaggcataaggttcgggaagaggttgttaccgtgggcaactctgtcaacgaaggcttgaaccaacctacggatgactcgtgctttgacccctacacagtttcccattatgccgttggagatgagtgggaacgaatgtctgaatcaggctttaaactgttgtgccagtgcttaggctttggaagtggtcatttcagatgtgattcatctaggatgggtgccatggacaatggtgttgaactacaagattggagagaagtgggaccgtcagggagaaaatggccagatgatgagctgcacatgtcttgggaacggaaaaggagaattcaagtgtgaccctcatgaggcaacgtgttacgatgatgggaagacataccacgtaggagaacagtggcagaaggaatatctcgggtgccatttgctcctgcacatgctttggaggccagcggggctggcnctggtggacaactgccgcagacctgggggtgaaccccagtcccgaaggcacttactggccagtcctaacaaccagtattctcaagagataccatcagagaacaacccacaattttaaattgccccaattgaagtgctcatggccttttggatgtacaggctgacagaagaagattccccgagagtaaatcatctttcccaatccagaggaaccaagcatgtctctctgccaagatccatcttaaactggagtgatgttagcacgacccagcttagagttcttctttctttcttaagcccctttgctctggaggaagttctcccagcttcagctccaacttcacaggcttctcccaaggcatcacccctgggaagtttccctgaggggttttcttaataaatgagggctgcaccattggcccttgtttcttgctttcggaaagtatttcaatacccgctcaagtattttaaaatggaaggtgatcccctaagatttgggtttgggggatccaatagggaaaagccatatggccaggcccaacccaagatgcaaatggttttggaaaatggatatgacccaaaattttaaagtagggaaagtcacccccaaacacttcctgctttccaccttaaagtgtcctggccccgcaatacctgtaggaacaagccatgatccttgttacctgtgatattttaaatatcccacagtactcactttttccaaatgatccctagtaattgccctagaaatatctttctcttaccctgttatttatcaattttttcccagtatttttatacggaaaaaattgtattgaaaacacttagtatgcagttgcataagaggaatttggtataattatggtgggtgattattttttatactgtatgtgccaaagctttactactgtggaaagacaactgttttaataaaagatttacattccacaaaaaaaaaaaaaaaaaaaaaatggtt

SEQ ID NO: 4098 - DNA, 389 bp, Homo sapiens
  SIMILAR (178)..(387): 1001254mologous to Homo sapiens similar to 3- hydroxyisobutyrate dehydrogenase ; similar to P29266 (PID:g416873),accession number AC007130,Smith-Waterman Score=366.
agcatggcagcctccttacggctcctcggagctgcctccggtctccggtactggagccggcggctgcggccggcagccggcagctttgcagcggtgtgttctaggtcagtggcttcaaagactccagttggattcattggactgggcaacatggggaatccaatggcaaaaaatctcatgaatcttggaatcaggttagggcttgacccaaaactactggctaaaatcctaaatatgagctcaggacggtgttggtcaagtgacacttataatcctgtacctggagtgatggatggcgttccctcggctaataactatcagggtggatttggaacaacactcatggctaaggatctgggattggcacaagactctgctaccagcacaag

SEQ ID NO: 4099 - DNA, 493 bp, Homo sapiens
  misc_feature (1)...(493): n = a,t,c or g
gtttctnnnnnnnnnnnnnnntaaaccnnnnnnnnnnnntcccccctttattcccaacccttttggatttttagcaaagaaatttttaaggtcaaaaatttgggcccccccctcccccaaaggtaaaacccccttttttttaaaaaccaaaaaatttaccnnnnnnnnnnnncccccccttttattccagtttttcaaaaggaaaaaaaatccctttaccctggaaagcaaaagttccaataaaccaaattttgccccttcccccccacccgggggggggaaaaaaaaccccctttcctnnnnnnnnnnnnnnnnnngaaagaaagaaaaagaaaatggctactgttcaaaaaggaatgcccacaaatattaccatggcaaaactggaagttacaatgttatccagcatgctgttggcaatgctgtaacaaaccggacgcgtgggtcgncccgggtttccggnngcggttccgatagctactcaagtgcaatg

SEQ ID NO: 4100 - DNA, 554 bp, Homo sapiens
  SIMILAR (144)..(554): 821254mologous to Rattus norvegicus 3-hydroxyisobutyrate dehydrogenase,accession number J04628,Smith-Waterman Score=582.
tgcagatgccctgggtcgacccacgcgtccggccagccagtcccgctgcacacgctcgcagtctgtgggcccttcgggtttcggcggaggtcaccgcggggagaggggcgggcgtatgtttggcagcctccttacggctcctcggagctgcctccggtctccggtactggagccggcggctgcggccggcagccggcagctttgcagcggtgtgttctaggtcagtggcttcaaagactccagttggattcattggactgggcaacatggggaatccaatggcaaaaaatctcatgaaacatggctatccacttattatttatgatgtgttccctgatgcctgcaaagagtttcaagatgcaggtgaacaggtagtatcttccccagcagatgttgctgaaaaagctgacagaattattacaatgctgcccaccagtatcaatgcaatagaagcttattccggagcaaatgggattctaaaaaaagtgaagaagggctcattattaatagattccagcactattgatcctgccagtttcaaaagaattggccaa

SEQ ID NO: 4101 - DNA, 1133 bp, Homo sapiens
  SIMILAR (349)..(624): 961254mologous to Homo sapiens similar to 3- hydroxyisobutyrate dehydrogenase ; similar to P29266 (PID:g416873),accession number AC007130,Smith-Waterman Score=426.
atggggaatccaatggcaaaaaatctcatgaaacatggctatccacttattatttatgatgtgttccctgatgcctgcaaagagtttcaagatgcaggtgaacagctctgtcccaacctggatgtgaatcatccctttgtccagcgtctccatgctgcagacactccctggcccattagtcacttactagccgcctcagtgatcgggtgttgtgatatcgcgtgcttattttcaggacgggtgtccatttcctccctctgtgttactatatcaagtcaagctgatgaagtgagagccaaagaaaacaagcccatcccccaacaccccaccaagattgcagaaatgctggtagtatcttccccagcagatgttgctgaaaaagctgacagaattattacaatgctgcccaccagtatcaatgcaatagaagcttattccggagcaaatgggattctaaaaaaagtgaagaagggctcattattaatagattccagcactattgatcctgcagtttcaaaagaattggccaaagaagttgagaaaatgggagcagttttcatggatgcccctgtttctggtggggtaggagctgcacgatctgggaacctcacagtttatggtgggaggagttgaagatgaatttgctgctgcccaagagtctgctggggtgcatgggctccaacgtggtgtactgtggagctgttgggactgggcaggcggcaaagatctgcaacaacatgctgttagctattagtatgattggaactgctgaagctatgaatcttggaatcaaggttagggctttgacccaaaactactgggctaaaatcctaaatatggagctccaggacggtgttggtccaagtgacactttataaaccctgtacctgggagtgatggatggcgttccctcggctaattaactattcagggtggattttggaacaacacttcattggcttaaggatctgggattggcacaagactctgctaccagcacaaagagcccaatccttcttggcagtctggcccatcagatctacaggatgatgtgtgcaaagggctactcaaagaaagacttctcatccgtgttccagttcctacgagaggaggagaccttctgagtgtccctt

SEQ ID NO: 4102 - DNA, 491 bp, Homo sapiens
  SIMILAR (13)..(447): 931254mologous to Homo sapiens ribosomal protein L7,accession number L16558,Smith-Waterman Score=670.
  misc_feature (1)...(491): n = a,t,c or g
ccggctggaaccatggagggtgtagaagagaagaagaaggaggttcctgctgtgccagaaacccttaagaaaaagcgaaggaatttcgcagagctgaagatcaagcgcctgagaaagaagtttgcccaaaagatgcttcgaaaggcaaggaggaagcttatctatgaaaaagcaaagcactatcacaaggaatataggcagatgtacagaactgaaattcgaatggcgaggatggcaagaaaagctggcaacttctatgtacctgcagaacccaaattggcgtttgtcatcagantcagaggtatcaatggagtgagcccaaaggttcgaaaggtgttgcagcttcttcgccttcgtcaaatcttcaatggaacctttgtgaagctcaacaaggcttcgattaacatgctgagggattgtagagccatatattgcatgggggtaccccaatctaactaatctacaagcgtggntatngcaaaatcaattag

SEQ ID NO: 4103 - DNA, 1179 bp, Homo sapiens
  SIMILAR (75)..(713): 451254mologous to Homo sapiens ribosomal protein L7,accession number X57958,Smith-Waterman Score=289.
aggagggttcctgcctgtgccagaaacccttaagaaaaagcgaaggaatttcgcagagctgaagatcaagcgccttgagaaagaagtttgcccaacagatgctttcgaaaggcaaggcagcaagctaatctatgaaaaagcaaagcacgtatcacaaggaatataggcagatgtacagaacctgaaatttcgaatgggcgaggatgggcaagaaaaagctggccaacttcgtatgtacctgcagaaccccaaatttggcgttttgtcatcagaatcagaggtatccaatggagtgagccccaaaggttccgaaaggtttttccagcttcttcgccttcgtcaaattcttcaatgggaaccttttgtgaaagctcaaccaaggcttccgatttaacatggctgaggatttttagagcccatatattgccatggggggtacccccaatctgaaagtcagtaaaatgaactaatcttacaagcgtgggttatgggcaaaatccaataagaagcggaattgctttggacagataacgctttggattgctcgatctcttggtaaaatacggcatattcttgcatgggaggatttgattcatgagatctatactgtttggaaaacgcttcaaaagaggcaaataacttcctgtggccccttcaaattgtccttctccaccaaggtggaaatgaagaaaaagaccacccattttggtggaaggtggagatgctggcaacaggggaggaccagatcaacaggcttattagaagaatgaactaaggtgagagacctcatcctgagaaaggttgagttaatgttagagtataagtggtggtaatcttgaatacttttcccattaaatattgatgggggtttgaattttaatcagtgcttttgtggggagtgggggtcaactatcttaatgattacaggtgggtttgtttacgtgcttttgaggacctttctggaggaaaggaaaagcctgttttggggagtctttaaagatggaaattgggtggtcttaaaaatgtaaactcaatcattactttataactgcctagtttatgttaattgttagctgcctaaagtgttttctaatggttttcttttttcctttcaggtgtctaccatgattatttttctaagctggttggttaataaacagtacctgctctcaaattgaa

SEQ ID NO: 4104 - DNA, 384 bp, Homo sapiens
  SIMILAR (262)..(384): 1001254mologous to Homo sapiens S-protein,accession number X05006,Smith-Waterman Score=237.
agatccttttttttagttttttttgacattcagccaatctgcctattctttgtaagggcaagagatacatattcccaagctcaacacataattacgctcaagctcaacacataatctcactcaagacaacttctttttgaaaatgaagtaaaagacagtgggctcacctatggagccctacacactagttaggagcaagggtttgatggtcacttggcaagttggatatctttaaaagacactgcgaagtggaaaaatggggacgagctctgctcttactaccagagctgctgcacagactatacggctgagtgcaagccccaagtgactcgcggggatgtgttcactatgccggaggatgagtacacggtctatgacgatggc

SEQ ID NO: 4105 - DNA, 1741 bp, Homo sapiens
  SIMILAR (250)..(438): 951254mologous to Homo sapiens S-protein,accession number X05006,Smith-Waterman Score=318.
  misc_feature (1)...(1741): n = a,t,c or g
ccggtcgacccacgcgtgcgctgcctctccctcccttcctcaggcattagagttgagacttcagggagaccagagcccagcttgggaggcactgagctagaagccctgccatggcacccctgagaccccttctcatactggccctgctggcatgggttgctctggctgaccaagagtcatgcaagggccgctgcactgagggcttcaacgtggacaagaagtgccagcgtgacgagctctgctcttgactaccagagctgctgcacagactatacggctgagtgcaagccccaagtgactcgcggggatgtgttcactatgccggaggatgagtacacggtatatgaacgactgggcgaggagaaaaacaatgccactgtccatgaacaggtggggggcccctccctgacctctgacctccaggcccagtccaaagggaaatcctgagcagacacctgttctgaaacctgaggaagaggcccctgcgcctgaggtgggcgcctctaagcctgaggggatagactcaaggcctgagacccttcatccaggggagacctcagcccccagcagaggaggagctgtgcagtgggaagccattcgacgccttcaccgacctcaagaacggttccctctttgccttccgagggcagtactgctatgaactggacgaaaaggcagtgaggcctggggtaccccaagctcatcccgagatgtctggggcatcgagggccccattcgatgccgccttcaccccgcatcaacttgttcaggggaagaccttacctcttcaaagggtagtcagtactgggcgcttttgaggatggtgttcctgggaccctggatttacccccgaaatatctcttggacggctttcgatgggcattccncgggacaaacgtgggattgcagccttgggcctcccttgcccattagcttacagtggccgggagcgggtcttatttctttcaaagggggaaacagtactggggagttaccagtttccaggcaccagccccgttcaggaggagtgtgaaggcagctccctgttcggctgtgttttgaacactttgccatgatggcagcgggacagctggggaggacatctttcgagcttctctttctggggggcagaacgctctggctgggttaccagaacagccccagtttcatttagccggggaatgggcacggtgtgccagggccaagtggacggcagccatgggtnggccgcatcttacatcttcagggcatggcaacccggccccttctttggccaaagaaaaaaaaggtttaggcattcgcaaccggcaaaggctaccgttcactaacgggacgcacagccgtggccgctaaccagaaactccccgccggcccatcccgcgccaatgtggctgtcctttgttcttccaagtgaggagagcaacttgggagccaaacaactatggatgactacaggatggacctggctttgtgcctgcccacctgttgaacccattcaagagtgtttttttttttnttttggagacaagtactaccgagtcaatcttcgcacacggcgagtggacactgtggaccctccctacccgacgctccatcgctcagtactggctgggctgcccagctcctggccatctgtaggagtcagagcccacatggccgggccctctgtagctccctcctcccatctccttcccccagcccaataaaggtcccttagccccgaaaaaaaaaaaaaaaaaaa

SEQ ID NO: 4106 - DNA, 444 bp, Homo sapiens
  SIMILAR (176)..(310): 1001254mologous to Homo sapiens Amino acid sequence of a human secreted protein,accession number AAB19398,Smith-Waterman Score=246.
atgagatcttttggccagctgaccctgtgtcccaggaatgggacagtcacagggaagtggcgagggtctcacgtcgtgggcttgctgaccaccttgaacttcggagacggtccagacaggaacaagacccggacattccaggccacagtcctgggaagtcagatgggattgaaaggaggagctggctctgtgtggctccaggctgctggtcttgggctccttcctgcttctcttctgtggccttctctgctgtgtcactgctatgtgcttccacccgcgccgggagtcccactggtctagaacccggctctgagggcactggcctagttcccgacttgtttctcaggtgtgaatcaacttcttgggccttggctctgagttggaaaaggttttagaaaaagtgaagagctggaatgtgggggaaaataaaaagcttttttgccc

SEQ ID NO: 4107 - DNA, 1386 bp, Homo sapiens
tttttttttttttgggcaaaaaagctttttattttcccccacattccagctcttcactttttctaaaaccttttccaactcagagccaaggcccaagaagttgattcacacctggggagaaagaaaataaaacaacaaaacaggtcgaagagctgctagaggaagctctgagatgtgtgcagaaattgaggaaggagcagagggagtgacagctagagaccaatacgggcatttaatcccaactaaggtagcctcaggaccccagggtctgtcaggggccaggaagccctcctttcccagtccaaggttgagagggtcctgtcatttcctgtcccaaagtaggtggttggggcatttaggcccagccatcagcaaaataagcacagttgatcttgagcttccacttcctctggcctgatcagttccctgggcctcaactatttccacttttcccatagtaacttcctagggcactgcagccagctgaagctgagaccagttcaagagctggatgcataacacatggctctcaaatttcatgcacccccctctgacaagtgaagattttttgcagaaatattttttcctttagtgagctgatgtgtgaactggttaaccaacatgacccccacccactgctacgtttgtgaagctgattccctccaaagatcttgttaacggaatcagctttttctaaaggtaacgatgactaaatggaagacagaaggtgcatgtcaagttcttgggcacatactatgtccccagtaaatgagtatcatcagttagactcttctgagcggttcaagttgaattttacaaaatttccatcataaaactgggtattggaatttcaggacaaaagcaagacaaacatggttcatattcaggacaaatcatcaaatgtgaaccctcttaactcaccattgttacccaaatgcttggatgtgaactagttatgagtcttaaaatcacaatgttgcttgaaagaagtcagccacaaaagaatgtgtatgattctgtctacatagtttcaaaaataagtaaaaccaaactatattatttaggaatacatacatggcaatacattataaagcaggacagtaatttctagggagagagagggcattgtcaggaaggaagggaccatggggcgtttctggacagctggtaatattctactcagtggtatttataagtatccactttataataatttgccaagctgtccttttatgctattggacttttctacataagtgttaaatattttataataaaaaagttaaagtaattagaaaaatattgaatgctgacggtgtcaacctgcctcccagctccataagggagagctgtggttgaagaggttctcggggactcagaagcagc

SEQ ID NO: 4108 - DNA, 1110 bp, Homo sapiens
  SIMILAR (217)..(855): 481254mologous to Homo sapiens Amino acid sequence of a human secreted protein,accession number AAB19398,Smith-Waterman Score= 337.
cgtgcggtggaattccgcggccccgctcgtgacgtcgcggggggcgccggcctccgcccggccccgagggcaggctctccccggaggctcagccccctctgctccccatgggcaactgccaggcagggcacaacctgcacctgtgtctggcccaccacccacctctggtctgtgccactttgatcctgctgctccttggcctctctggcctgggccttggcatgcttcctcctcacccacaggactggcctgcgcagccatgacatcccccaggactgggtctcttttttgagatcttttcggccagctgaccctgtgtcccaggaatgggacacgtcacagggaagtggcgagggtctcacgtcgtgggcttgctgaccaccttgaaccttcggagacggtccagacaggaacaagacccggacaattccaggccacagtcctggggaagtcaggatgggattgaaaggatcttcttgcaggacaactggtccttatcacagccagggtgacccaccagaaaggactgcaggaacctgcctaatattttagtgctgttccaaggaatcctacccctcccagcccagcccacccatattcctgcttcagaggagggggctggaaatgccaccctgagccctagaaatgggtgaggaatgtgttagtgtctggagcccatgaaggcccttgtgcttgaccaagctgctcacctcggagggagctggctctgtgtggctcccaggctgctgggtcttgggctccttcctgcttctcttcttgtggccttctctgctgtgtcactgctatgtgcttcccacccgcgccgggacgtcccactggtctagaacccggctctgagggcactggcctagttcccgacttgtttctcagacagaatcatacacattcttttgtggctgacttctttcaagcaacattgtgattttaagactcataactagttcacatccaagcatttgggtaacaatggcgtgaatcaacttcttgggccttggctctgagttggaaaaggttttagaaaaagtgaagagctggaatgtgggggaaaataaaaagcttttttgcccaaaaaaacataaaaagctggtg

SEQ ID NO: 4109 - DNA, 418 bp, Homo sapiens
  SIMILAR (4)..(285): 451254mologous to Homo sapiens Human myelin oligodendrocyte glycoprotein gene,accession number AAZ29204,Smith-Waterman Score= 124.
  misc_feature (1)...(418): n = a,t,c or g
gacgggcgcttggctcacgcctgtatccccagcactttgggaggctgaggcgggcggatcacgaggtcaggagatcgagaccatcctggctgacacggtgaaaccccgtctctactgaaaatacaaaaaaattagccaggcgtggcggcgggcgcctgtagtcccagctactcgggaggctgaggcaggagaatggcgtgaacccgggaggcggacgttgcagtgagccgagatcgcgccactgcactccagcctgggcgacagagcgagactccgtctcaaaaaaaaaagaaagtgataatactgtaatcccagtactttgggacactgaggcgggtggatcacctgaggtcaggagttcgagaccagcctggtcagcttggcaaaaccccatctctactanaaaaaaaaaaaaagt

SEQ ID NO: 4110 - DNA, 467 bp, Homo sapiens
  SIMILAR (1)..(45): 731254mologous to Homo sapiens p40,accession number U93571,Smith-Waterman Score=62.
gatcacagctcctcaccagcaagggaacaaaactggatggagaattgagtttgatgaattgacagaagtaggcttcagaaggtgggtaataacaaactcctctgagctaaagaagcatgttctaacccaatgcaaggaagctaagaaccttgaaaaaaggttaggtgaattgctaactagaataactagcttagagaagaacataaatgacctgatggagctgaaaaacacagcacgagaacttcatgaagcatacacaagtatcaatagctggatcaatcaagcagaagaaaggctatcagagattgaagatcaacttaatgaaataaagcgtgaagacaagattacagaaaaaatgaagaattccaccacagtgcgggtcgctgcaagcatgcagagcaaactgctgcagggggtagctgaagagggacctctccggctcacccggagtgcttctttctctgcag

SEQ ID NO: 4111 - DNA, 267 bp, Homo sapiens
  misc_feature (1)...(267): n = a,t,c or g
gcacgagctgaaatgctgattgtacagtatattcttcccagattgactcactgtgcaatctttacaatactttttatcttttcacttttgacataggtaatgttgttgagcagttgagcaatgttcagtccagttgtgaagctggagaagnnnnnnnnnnnnnnnnnnnnnnntgaggnnnnnnnnnnnnnnnnnnnnnnnnnnnnnnnnnnnnnnnnnnnnnnnnnnnnnnnnnnnnnnnnnnnnnnnnnnnnnnnnnnnnnnnnn

SEQ ID NO: 4112 - DNA, 477 bp, Homo sapiens
  SIMILAR (291)..(61): 881254mologous to Homo sapiens glucose transporter-like protein,accession number M20681,Smith-Waterman Score=360.
ttaaagatcttgagtctgggagattgtcaggattgtccaagggggcccggtgtaatcacaatgatcagcagcagaggggaagagcaatccgactaggaagttggaggtccagttggagcagccggccactgccatcgcagctgggcgggggccctggctgaagagttcggccacaataaaccagggaatggggcctggtccaatttcaaaacaggccacaaagaccaagatagccccaatacagacaaagctcatcccattatagtgattagaaagtaaagtgaagatagtattaaccacacccgcgctgatggtggcatagatgggctgttgaacacctgcatccttgaagattcctgttgagtaatagaacaccttgttagccaagatggtctcgatttcctgacctcgtgatctgcccgcctcggcctcccaaagtgctgggattacaggcgtgagccaccgcgcccggtgcat

SEQ ID NO: 4113 - DNA, 1045 bp, Homo sapiens
  SIMILAR (525)..(821): 451254mologous to Homo sapiens Human myelin oligodendrocyte glycoprotein gene,accession number AAZ29204,Smith-Waterman Score= 160.
aaaaccataaaatgttccccagttttgcagcacgttaaatttcaaaaaattaaattgaaccagagtcccctggcaccgttgaaggaaaaataaatagaaatgtgttagtgccaagtagtaatctttggcattaggggattgatacaattttgacattaaatcagaattgaagtttaaaaaccaggcaatagtttacattaataatttttttttttttttttttttaagatggagtcttgctctgtcgcccaggccagactgcggactgcagtggcgcgatctcggctcactgcaagctccgcttcccgggttcacaccattctcctgcctcagcctcccgagtagctgggactacaggtgcccgccaccgcgcccggctaattttttttgtaattttttttttagtagagacgggggtttcaccgtgttagccaggatggtctcgatctcctgacctcaagtgatccacccaccttggcctcccaaagggctggggattacaggcttgagccactgcacccggcttttttttttttaatggatggaatctccttctgtcacccaggctggaatacagtggcacgatcttggctcattgcaaccgatgcctccccagttcaggtgattttcctggctcagcctcccgagtagccaggattacaggtgcatgccaccgtgccaggctaattttttgtatttttagtagagacgaggtttcaccatgttagccaggatggtctggatctcctgacctcgtgatccacctgccttggcctcccaaagtgctgggattacatgcgtgagccaccgcacccggcctcccctcacttaatttttaaaacccatttctcttctccagcttcacaactggactgaacattgctcaactgctcaacaacattacctatgtcaaaagtgaaaagataaaaagtattgtaaagattgcacagtgagtcaatctgggaagaatatactgtacaatcagcatttcagagctggaagggatctttaagatccaatccagcacccacattttaccaatgag

SEQ ID NO: 4114 - DNA, 361 bp, Homo sapiens
  SIMILAR (348)..(241): 881254mologous to Homo sapiens CIRP,accession number D78134,Smith-Waterman Score=153.
tagcactgcaatacaatcgatggagtatgcgtacgtctccagtaaaaaggacaatataataaacatctcaagaacctctcaggacgtctgcacgtctactgtgggcgcacagcacagatggacgcaggggctggtctactcggatctgccgtccatctacagacttcccattcatggccatcatggcatccttagcgtcgtcaatgttctcaaaggtgacaaacccaaatccccgagatctctggtctccctgtctttcacaaccaccacttcagagatctgtccgtactttgagaagacctgctccagcgactgctcattggtgtcaaaactcagcctccaacaaaagtttgccttcatc

SEQ ID NO: 4115 - DNA, 384 bp, Homo sapiens
  SIMILAR (359)..(126): 1001254mologous to Homo sapiens CIRP,accession number D78134,Smith-Waterman Score=414.
tactgcaaatacaacatcgatggagtatgcgtacgtcttccagtaaaaaaggacaatataaataaacatcttcaagaacctctcagggacgtctgcacgtctactgtggggcgcacagcacagatggactcgaaccggttccccccatagcctcggtcccctcctcctctagagaacccacggccccgtcctcggcccccacggaagaagccccggcccccggcagagccaccacggtacccacgggatcggttgtctgacgacttgcctgcctggtctactcggatctgccgtccatctacagacttcccattcatggccatcatggcatccttagcgtcgtcaatgttctcaaaggtgcgtgacgggcgagggggcggccgc

SEQ ID NO: 4116 - DNA, 656 bp, Homo sapiens
gcggccgccgctccctcgaagccgagtgcgcctcagatcccgcgagactggagtctccgcgctgcgaaccccctcagtggcgagccccccgcggtcactgctcggacaatgacccttgcagtcttccctgtcgggtcctactcgtgcgctgaaccgaggtccgcaggcttttcttccagtggccccgctccgccgacagacccccctgaaccacagactcggctttctgggtgcacacgtggccctttattcgaatccgactttcacagggctccacatcgttgtgggcaaggactggccgccccgtaagctgccggcgcaccgcagcccgtgctccaggagagactcgaggccctgagcccgcacctcactggcgaagcgcctcctggaaggaggaggaagggagggagaacaggcgcgggctccaggcgggggacccggcgctcccgggaggcgctgccctgcacccaacacacaccgaaaggcgcccgccatggggccataggtgcgggagagcaggactcactgaaacgcccaggtgccgcccgggacagggctcagcgccacatgccactcttcccgaaagcacttacaggggacaagcctcctgggcaagcggctgcctccagctcttgttccaggtgaagtccctcctg

SEQ ID NO: 4117 - DNA, 698 bp, Homo sapiens
  SIMILAR (698)..(318): 811254mologous to Homo sapiens CIRP,accession number D78134,Smith-Waterman Score=531.
aggttttttttttttttttttctgggtgcacacgtggccctttattcgaatccgactttcacagggctccacatcgttgtgggcaaggactggccgccccgtaagctgccggcgcaccgcagccacgtgctccaggagagactcgaggccctgagcccgcacctcactggcgaagcgcctcaggggacaagcctcctgggcaagcggctgcctccagctcttgttccaggtgaaggcccctcctgggacagtgaccccagaggtcatcgctgctctcaggccacccttccccgagtcctggccgggccccttcaaccgtaactgtcataactgtctctgtaggacccgcccgagctccggtcactgtagccaccactctgactccggctgctatagtagtctctggagcctccgtagcccccactcctggactcgaaccggttccccccatagcctcggtcccctcctcctctagagaacccacggccccgtcctcggcccccacggaagaagccccggcccccggcagagccaccacggtacccaacggaatcggtgtctgacgacttgcctgcctggtctactcggatctccgtccatctacagacttcccattcatggccatcatgggcatccctagcgtcgtcaatgttcttcaaggtgacaaaacccaattcccgagaactctggtcttcctg

SEQ ID NO: 4118 - DNA, 594 bp, Homo sapiens
  misc_feature (1)...(594): n = a,t,c or g
cggagtcagagtggtggctacagtgacgggagctgggcggggtcttacagagacagttacgacagttacgaagcaggcaagagagcagaggcacgtggcatcncagggcgacttcagacggccagccggttagctagttctgctgttgcttcacgagttctgagcattctctgctagcctatggaagctgcagccctcggaggacagaagtgttgtgcgcccaacagaacccctctgagacgcaagctgctcccttggctagctcatatgtggaaatagccctgtaattcgaggttgaaggggcccggcccaggactcggggaagggtggcctgagagcagcgatgacctctggggtcactgtcccaggagggacttcacctggaacaagagctggaggcagccgcttgcccaggaggcttgtcccctgaggcgcttcgccagtgaggtgcgggctcagggcctcgagtctctcctggagcacgggctgcggtgcgccggcagcttacggggcggccagtccttgcccacaacgatgtggagccctgtgaaagtcggattcgaataaagggccacgtgtgcacccagaaaaaaa

SEQ ID NO: 4119 - DNA, 602 bp, Homo sapiens
tttttttttttttttttttctgggggcacacgtggccctttattcgaatccgactttcacagggctccacatcgttgtgggcaaggactggccgcccccgtaagctgccggcgcaccgcagccccgtgctccaggagagactcgaggccctgagcccgcacctcactggcgaagcgcctcaggggacaagcctcctggggcaagcggctgcctccagctcttgttccagggtgaagtccctcctggggacagttgaccccagaggtcatcgcttgctctcaggccaccctttccccgagtcctggggccgggcccctttcaaccttgccaaagcaaagcagcgttactcccaacgtcctccacagggctcacagcttgcccctcccggcctccccggaaacagccacagccccttaggaaggtctcaggctagtcagggggctgtgacctcaggctccgtcacaggccagcatgcccagggcgggtctgcaccttggcgcagctggagccagctacccgtatgggatggagctatgtgggccagtgtgggctctagaaaaaaactaatggcggcaacagacatcagagaaagctaagttaag

SEQ ID NO: 4120 - DNA, 1381 bp, Homo sapiens
  SIMILAR (300)..(629): 391254mologous to Homo sapiens CIRP,accession number D78134,Smith-Waterman Score=129.
aattcccgggtccacgatttcgtggaggctcggggtcgttgtggtgcgctgtcttcctgcttgcgtcagggacctgcccgactcagtggccgccatggcatcagatgaaggcaaactttttgttggagggctgagttttgacaccaatgagcagtcgctggagcaggtcttctcaaagtacggacagatctctgaagtggtggttgtgaaagacagggagacccagagatctcggggatttgggtttgtcacctttgagaacattgacgacgctaaggatgccatgatggccatgaatgggaagtcctgtagatggacggcagatcccgagtaagaccaggcaggcaagtcgtcagacaacccgatcccgtggggtacccgtggtggctactgccgggggccggggctttcttcccgtgggggccgaggaccgggcccgtgggttctctagaaggaggaggggaccgaggctatggggggaacccggttcgaagtccaggaagtgggggctacggaggctccagaagactactatagcagccggagtcagagtggttggctacagtgaccggagctcgggcggggtcctacaaagaacagttacaacagtttcgcttcacaccaacgagtaaaaaccctttctgctcaagatcgtccttccaatggctgtgtgtttaaagatttgtgggaagctttcgctgaaccgttaaatgtgtagtaaatgcaccctccttgtattcccactttcgtagtcatttccggttctgatctttgtcaaaacccagcctggaccgtttctgacgccggggatggccttcgtttacttagactttttctttttttaagggaagtgctgtttttttttttttgaggggtttttcaaaacattttgaaaagcatttacttttttgaccacgagccatgagttttcaaaaaaatcgggggttgtgtgggtttttggtttttgttttagtttttggttgcgttgccttttttttttagtggggttggccccatgaagtgggtgccccactcacttctctgagatcgaacggactgtgaatccgctctttgtcggaagctgagcaagctgtggcttttttccaactccgtgtgacgtttctgagtgtagtgtggtaggaccccggcgggtgtggcagcaactgccctggagccccagcccctgcgtccatctgtgctgtgcgccccacagtagacgtgcagacgtccctgagaggttcttgaagatgtttatttatattgtccttttttactggaagacgtacgcatactccatcgatgttgtatttgcagtggctgaggaattcttgtacgcagttttctttggctttacgagccgattaaaagaccgtgtgaaatg

SEQ ID NO: 4121 - DNA, 1143 bp, Homo sapiens
  SIMILAR (737)..(534): 751254mologous to Homo sapiens Human secreted protein sequence encoded by gene 133 SEQ ID NO:303,accession number AAB56209,Smith-Waterman Score=273.
atggccaaaggtcagggggagtcttggctgctagatcaggaggctcttgctgaaattgaaaaacaacagcagaagtacaaatctttagaggctcgtgctgtgagtcctgtgctagatgctggttggaccttgccctcagggagcttgcagtcagcagaggagtcggcagaaagagagctaaacatagatcatggtgcagcaaggccctctctgctccatgaccaggcagatcatcaggcattcggagcacccattttcctcgatcagcagtctgagtcacccaaaccctcctacgcagaggtcttgcgcatctctgaaaaaaaggcagcagcccgtcagggacttgcagataaaatccccaccttcctgggacagagcacctgggggaaggtcgctctgaagagagcagcggatcttccagtacagcgttccaactctgatacgggacagactgcctcctcaagtgggtccctgacccccgtgtatcctgactgggagacacctcccagtaggggccgaccatgcatctatcacctcacacaggagagctctggctggcacctggcaggtgccccttttggacaaagcttccagaggaaggaacaggcagcaatctttgctgttatgcagcctctgctggtgatacccaggcaaacagggtctggagtggacctccaacaaactccagtagacctgaaacagagggaaaggaataatatcaacatcaacaaaaaggatgtcctctcagagacgtcctccgaagatcaccgacttcaaagatcaaaggtagataaatccacgaagatggggagaaaccagtgcaaaaaggctgaaaactccaaaaaccagaatgcctattctcctacaaaggatcacaacttcttgccagcaagggaacaaaactggacggagagtgagtttgatgaattgacagaagtaggcttcagaaggtgggtaataacaaactcctccgagctaaaggagcatgttctaacccaatgcaaggaagctaagaaccttgaaaaaaggttagatgaattgctaattagaataaccagttcagagaagaacataaatgacctgatggaggtgaaaaacacagcacaagaacttcgagaagcatacacaggtatcaatagctga

SEQ ID NO: 4122 - DNA, 251 bp, Homo sapiens; identical to SEQ ID NO: 3159

SEQ ID NO: 4123 - DNA, 520 bp, Homo sapiens
ctcagtcatgatttcactttatttgtatcgatgacaatattaactcttcagatttataaaatgacaaaacttgataattacctggaaacaatttattattaactaggttaaccctaaatccatcaagaaaaaccacctaacatattcagtgttaaaaagagacattacgactagcctggccaatatggcaaaaccctgtctctactaaaaatacaaattttagcagggtatagtggtacgtgcctgtaagtcccagctactcaggagggttggaagagaagtaatccaattagacattgaaaaataagagcgccaatttggaaaatcgaatgtctatgatcattttcttccctaaaacagggaagaaagtgaatgtggaaaaatccgattttcagcaatattcgcaggacctaaggcaacaaccaccatgcctggggcaactatactttccaaatcctgaatattaaaaaggttttcacatggtaatcatcttaatattttctgttttttagatgaagtt

SEQ ID NO: 4124 - DNA, 523 bp, Homo sapiens
tccagctcaaaaaagagaaagtaccagattgtacttttaaatctgtctagcgtattgagaattttaatgggagctgttgatttatttctcagggcatacatgttccaatctgtctccattgttgtctctctctttttttttttttttttgagacagtctcgctgtgtccgccccaggagtgcaagtggcacgatctctgctcgctgccgacctctgcctcccagattcaagcgattctggtgccttagcctcctgagtggctgggacttacaggcacgtaccactaataccctgctaaaatttgtatttttagtagagacagggttttgcccatattggccaaggctagtcgtaatgtctcttttttaacactgaatatgttaggtggtttttcttgatggatttagggttggacctagttaataataaattgtttccaggtaattatcaagttttgtcattttataaatctgaagagttaatattgtcatcgatacaaataaagtgaaatctgactgaggct

SEQ ID NO: 4125 - DNA, 820 bp, Homo sapiens
  SIMILAR (36)..(287): 721254mologous to Homo sapiens Human secreted protein, SEQ ID NO: 7870,accession number AAG03789,Smith-Waterman Score=308.
cgctttttttttttttttctttttttgagatggagcttgctctgtcacccaggctggagtgcagtggcacgatcacagctcactgcaacttccgccacctgggttcaagcaattttcctgcttcaacctcccgagtagttgagattacaggcacgtgccaccacacctgactgatttttgtatttttagtagagacagggtttcaccatgttggccaggctggtcttgaactcctgacctcaagtgatccacccacctcagtctaccaaagtgctgggattacaggttgtgagccactgcacccggcctctgtctgacttttaaatgatggagtatcccagaggtcaggctttagagctcttctttcttccatctacagagtgctcatttctttggtgatctcattcagtctcacggctttgaatgttatatgctgataagtcccaactttctctgtctcgcctaaacttcccctaatagcagaacctgatatcaaagtgcctatttgacatctccacttagatatctaataagcatctttaatgtaaaatttccaaaactgagctcctacaattccctcccacacttgttcagttttccccatctaagctaatggcaacttccatccctccagttgctttggccaaaacttttgagttgtcttttgactgctttttttctcccttcttacattgtgctcatcctttctttcaggcaaattctgtttggtataccttcaaatatatctagaattctatacttctcactacccctcattcccattatctttgaaacacactccaatgaggtttctcgtgcc

SEQ ID NO: 4126 - DNA, 1777 bp, Homo sapiens
  SIMILAR (106)..(183): 731254mologous to Homo sapiens Human secreted protein fragment encoded by DNA clone vo27 1,accession number AAB34769,Smith-Waterman Score=95.
gctcgacaattgtaaacgatcactatagggcaaaactttttttttttttttttggagatggggtcctgctctgtagcctaggctagagtgcagtggcatgatcagctcactgcaacctcaaactcctgggctcaagcaatcttcccacctcaacctcctgagtagctgggactacaggtgtgtgtgccaccatccccagctacttttataataaaatttctatgtagaaccagagtcttcctatgttgcccagccttggtcttgaactcctggggctaaggccagtcttcctgcctcggcctcccaaagtgctgggaattacaaggcatgagccaccacactcagccttaaaatgaaagattttgtaaaggaattggagcattcaactaaactccgtttttgtgaagatggtcattttggttttaaccctaacatgggtttagagattatttttatggaactctaaggcattctgggttcctcagttttcttcaaaggaaaggaggactttaggcaagtaggcagggacaagctacccccacaccaaaggccacccggcgacaatacctatggaaataagtccggaggccctccctagaatgcagcccaaataggaaactgttccaaacagaatcagtcttgcatacttctgctcagaaggctccctctcgctttggaaactggaatgaggatccacccaacaggaccctccatttttacacaggagttatgagagttacatcctctagcagagatgcttggtcattacctgtggtacatgagattaccgagctaaaagggaaaaaaaacgatcttaatgttctcccaatgaactcaacttaagctttttatggaggcactgaggccatgcagctccttttccaaaagacacagataaaagccaaataaggtagaggactttggaaattttctctgaaaagttaaattccacataatagtaagactgtttgctgagagaaaactgacaagtaaaaactggtttaagagacagacattcaagacaaactgtattggaaatacaataatgaattttggcctgatagccctcatgctgtcttatagcaaaacactaaaattcatgcaacagagaaattggtgacatgaggactttttctccagacttcctggggaaaaactgtgagaatatacttttttcttcttgtttgctttcgaaatgcattctttcttttgctgactttcccaaactttcccagtcgtttctgatgaaaaattcttcaataggaaaagaccaggtaaacttacatgaaagacatccaagtatcttttgagctccttctctctgcccgaggagcaatcaactggattacacaaaactacccttccacaactaaaacaggtagaattggaacaggaattagttgtcattaatatactccgtaataaaataaagcttgttctgaaacccacaaggggtggtaagaagagactgtataaaagctactgggttctcatagaaaatggatacagtatacagaatgtgagaagatacagaactcacactccagttataaaaatagacatggttctcagacaaaaaagcaaatgagtacaaaagaattctccaaaccgtgaactatttttaaaagatacatctatataaaacaacaagatgtcatctcagagctccaaagagtagtttgttgaaatggctgaaaaggggagatgaattggagacagataggtcaagaacccagaacagatgtgtcctactcttgtgtttggcagtgtacattgg

SEQ ID NO: 4127 - DNA, 727 bp, Homo sapiens
  SIMILAR (82)..(165): 671254mologous to Homo sapiens Human secreted protein sequence encoded by gene 112 SEQ ID NO:282,accession number AAB56188,Smith-Waterman Score=94.
tttgagatggagtcttgctctgtcgcccagggtggagtgcagtggcatgattttggctcactgcaacctccacctcctgggttcaagcgattgtccggcctcagcctcatgagtagctgggactacaggcgcccgccaccacgcctggctaattttttgcatttttagtagagacggagtttcacgatgttagccaggatggtcttgatctcctgacctcatgatccacccgcctcagcctcccaaagtgctgggattacaggcgtgagcgaccatgcccagtcccaaatatttttaaaattgcaaatgacaaagtcaatggggttcaaaactaaattcttaaactaagtaaggagataacagacaacatttaaatttgtctttggaaaacaactatgaaatattaccattttctcctatcagatcaagtcagtatttcattctgaaagcaatgtattaacatgtgattttatgaaataatcaaggtataggcaagctctcttgcggagcatacacattaactcaggatcatcctcattgctgttttttttcccccagcacttgtgaggccttgtaggggacagtggattaaatagccttcagggtcaaaacagttccttgacatttggattttaaactcctggtaattaaaattgattgcataatttactcctattacaggtgtgacacactgtgagattcaggattataattctttgctcgtgcc

SEQ ID NO: 4128 - DNA, 662 bp, Homo sapiens
  SIMILAR (196)..(306): 661254mologous to Homo sapiens PRO2550,accession number AF130089,Smith-Waterman Score=116.
ttttttttttttggagacagagtctcactcttgtcacccaggctggagtgcagtaactcgatcatggctcactccagcctccacttcccgggcccaagggattctcccacctcagccctccgagcagctgggatcacaagcatgcaccaccacacctggccaatttttttttgtagagacacggtttcaccatggtctggtcctgacctccttacctcaagtgatccacccgctgcagcctcccaaagtgctgggattacaggcgtgagccactgcgcccagcccgtaattttttgtaaaaagttagatttcagtagcacagacattttcaccccaagcaatctgcaacccagaggcttctgggacctcacagctcctcaaggtgagatcgtatcaacctgaaaagattcccgactcctgtgcaggagcaatgcagagggagggtgtggagtgttttagcctccttatgatctccatcataccctgccccccgccaagtctctgataaggatagttgcggttttcttaaccttactataagtttatacaacacctataccaaaattctgggcccactctccattcctggctctgtggactccaaggatgccccctccctccagaaaaaggtcatagcctacgtcgctggtgggaacagaact

SEQ ID NO: 4129 - DNA, 514 bp, Homo sapiens
  misc_feature (1)...(514): n = a,t,c or g
gccgtgacggtgcncccctnaaggccccctgtactgccctggccacctaaggcccaaagggaggggagcaagtgggggaccccctggccatggccccctcaggcaaaaacccctattccaccagcggggtgggggaaancaccaccaacaggctccctgctgactccccccttatgggatcctcagtttgcctccctttttaatgggaccctttaatgggagagagagtaacccctcccacagaatgtctgaattcttgcattctttaccccttcccatcactatattgattctttttttaaaaaacatgaacccaaactcccgccctcacttcgtctctacagaatgttcacagcaaaacacgtttggtctgtttttagattcttgaagaattcaatagtctttcaagatgtttaatgtgtttaaagctgggaacctgttgggagttcacaagtgctgcatatactgggtagcaaaagaaaatggaaaaaaacccacaaaacaaatttttaaa

SEQ ID NO: 4130 - DNA, 1624 bp, Homo sapiens
  SIMILAR (14)..(637): 571254mologous to Oryctolagus cuniculus ubiquitin-conjugating enzyme E2-32k,accession number U58652,Smith-Waterman Score=468.
  misc_feature (1)...(1624): n = a,t,c or g
gaggtgcaattcggcccagcagcagatgaccagctcgcagaaggccctgatgctcgagctgaaatccctgcaggaggaaccggtggagggcttccggatcaccctggtggacgagtccgacctctacaactgggaggtggccatcttcggaccccccaacaccctctacgaaggcggctacttcaaggcgcatattaaatttcctattgactacccctattcaccacctaccttcagattcttgaccaaaatgtnggcaccccaacatttatgaggaatgggagatgtatggcatttcgattcttcatccgcctgtaggatgacccacagagtggagaactgccttctgaaaggtggaatcctactcagcaatgtgagggactaatcctattaaggtgttaatctcactggcttaatgagccccaacacctttctccccagccaatgtccgatgcttcagttatgttcagggaaatgggagagacagtaaagggaaaagacaaaggaatatggcttgaaatttattagggaaaccaagttttcagccacttaaggcccgaaggcaggaaaagggtggggagttgaagggtcccccaccaaccctgggcgggaatactgcatcaaaactgaggtgcccctgcaatgacgaacaggtgcagagtttgctttacgacgaacttggtatgatgaccgacattgatgatgaaagatgaggaaggaggaaagatgccgacttgttatgatgatgatgaattctggggaatgaggaagccgtgacgtgctcccttcagtgcccccctgtaactgcccctggcccatcctccaggcccaaagggaggggagcaaaggtggggggacccctggccatgggcccccctcaggcaaaaaaccccctattcaacaagcgggggtggggggaaaaccacaaccacaggctcccctgcctgacctccccccttatgggatcctcaggttggcctccctttttaatgggcccctttaaatgggagagagagtaaccccctcccacagaatggcctgaattccttgcattcctttaccccttcccatcacctatattgattctttttttaaaaaacatgaaccccaaactcccgccttcacttcggtctctaccagaatgttcacaagcaaaaccacgtttgggtctgtttttaagattcttgaagaattcaataagtctttccaagatgtttaaatgtgtttaaaagctgggaaccttgttgggagttcacaagtgctgcatatacctgggtagcgaaaagaaaatggaaaaaaaacccacaaaacaaactttaaaaaaaaaaaaaaaagcaaatttgccaaggtttagctgctcatttacattagtgtgtgtgcattcgttcagccccatggtggtgaatatctgtttctttcctcttcctaaggggctgggacatggtgggcatcaagggactttgtgctaagcctgatgaaatgtgctccttcaatctccatgaaaccatcgtaacatggaggcctcagctgctctgaggagagaaatcagactttgttttttgaaatcgattgggatcgaaagcctgaaataaatattcatactttccatagaactgaaaaaaaa

SEQ ID NO: 4131 - DNA, 1002 bp, Homo sapiens
  SIMILAR (408)..(521): 571254mologous to Lampetra reissneri enolase-1,accession number AB025329,Smith-Waterman Score=84.
gcacttgggaaagctggctacattgataatatgtaactgccatgggcatagttgcctttgtattcttccaggtctgggaagtacaacttagacttcagatctcgtaatgacccaggaggcatataaacctgagcagctagtggccctgtacaagtccttcatcagggaaaaacattgagtattccctgattaaggacttgtacagaggactctgttttccctggtgtttctggtgtgtctcaaaaattgtttgactgtgatgacagggaagtttggaagaagttcactgctaatgcatgtctccaggaagcagggaatgatctcacagtgacacttgaggcacattgctgaggccgtcgatgagaattcatgtaactttctccagcttacagtggactagattgacatgcaagctgatccagtccaattggtagggcatcatggtttctcattactcactgacttaaaatacttttattgccatcctggtgaagcactgcactgggtagataacacaggggcaccttgctgatcagagcccttggccaggtacaaagagctcagtttctaaaactctgtcatttcaataatgttataaattgaatcatacagtatgtaattttatgggattcgctttttttctgttgatctctttttttctgagtcatctcagctgttgtgtgtatcaatagttcatttccttttactgttttgtttggtttaactcattgacctattgaaggatatctgggctcattccagtctgtgaataatgctgctgtggacattcatgtgcaagtttttgtgtgaacattaagttttcatttctttaagataaatgcccaggagtgaaactgatgggttctctgtactctccaactgcccaacctgtttatccacaagagagcgcgccatcccacactcccaccgctgcttttctcttcagttcaacctcgctcccctcaattccttcacctacactcttttaacgcatctcctgcc

SEQ ID NO: 4132 - DNA, 2643 bp, Homo sapiens
  SIMILAR (1357)..(2640): 931254mologous to Homo sapiens putative p150,accession number U93563,Smith-Waterman Score=2111.
acactccaatccaaaagccattatatgggccaagcaaggcaagcatctggagcgtctgtgtggagggcagggtgtggccatggccaacagcaggtgttggagcctaaatgggatgaacggggctcctccattgaggaggaacatgaacaggaacataagcaagctagatctggcatggtcaaccggtatcacgatggtcccagcagcactccattctcaggcatttattctcagggcccagtcaatgtcataagtggggccgacagacacctcatacagaagagctctagctggcatctgttgggtgcccttctgggacaaagcttccagagaaaggaacaggcagcaatctttgctgttctgcagcctctgctggtgatacccaggcaaacagggtctggagtggacctccagcaaactccagctgacctgcagaagaggggcctgactgtcagagggaaaactaacaaacagaaaggaatagtagcaacatcagcaaaaaggacgtccactcagagaccccatccaaaggatcacaactccttgccagcaagggaacaaaactggatagagaatgagtttgatgaacggacagaagtaggcttcagaaggtgggtaataacaaactcctccaagctaaaggagcatgttctaacccaatgcaaggaagctaataacgcctggcttctagttgagtttgttcagtgggacctattagcaagagatggagggtggaaagagaaattggggtatctcttcctccttttctacccactttggtgtcatagttccggtagtgactgtgtccctgtgcaggtctacctgatcaaccatacaggcattcctttctcagcacattgccaggaagacaggcacagggccttcctcctaaaggattcagacccctctgctctcatccgctccaggcagttgcaagtttttgtcaagacattagacattagacaaggatcccagttgagaaatgtatgtggacagtgcccctctcaggaacacagctccgagtcctggggctctgtaatggctctcacgtgcccttctcagagagcatgcagaggagccagagtgacaggatccaaagttcctgggccaggctgggaagagctccccctggaagtagctatggctccccagaacattcatgcaagtgggaggggctgtggcatgaccagaactggggagaccaggccctgcttttcccctgccatcctggtcctaaggccacttcacacccagagcacagcttgctctagaagacttttctcccagaaaaatttctgggaacacactgaggtcaggatcagcttggatccagggggaacttcttcctatgaggaaaagctgataagcaacttcagcaaagtctcaggatacaaaatcaatgtacaaaaatcacaagcattcttatacaccaataacggacaaacagagagccaaatcatgagtgaactcccattcacaattgcttcaaagagaataaaatacctaggaatccaacttacaagggacgtgaaggacctcttcaaggagaactacaaaccactgctcaaggaaataaaagaggatacaaacaaatggaagaacattccatgctcatgggtaggaggaatcaatatcgtgaaaatggccatactgcccaaggtaatttacagattcaatgccatccccatcaagctaccaatgcctttcttcacagaattagaaaaaactaccttaaagttcatatggaaccaaaaaagagcccgcatcgccaagtcaatcctaagccaaaagaccaaagctggaggcatcacactacctaacttcaaactatactacaaggctacagtaaccaaaacagcatggtactggtaccaaaacagagatatagatcaatggaacagaacagagccctcagaaataacgccgcatagctacaactatctgatctttgacaaacctgaggaaaaaaagcaatggggaaaggattccctatttaataaatggtgctgggaaaactggcgagccatatgtagaaagctgaaactggatcccttccttacaccttatacaaaaatcaatttgagatggattaaagacttaaacgttagacctaaaaccataaaaaccctagaagaaaacctaggcattaccattcaggacataggcatgggcaaggacttcatgtctaaaacaccaaaagcaatggcaacaaaagacaaaattgacaaatgggatctaattaaactaaagagtttaattaaactaaagagcacagcaaaagaaactaccatcagagtgaacaggcaacctaaaaaatgggagaaaattttcccaacctactcatctgacaaagggctaatatccagaatctacaatgaactcaaacaaatttacaagaaaaaaacaaacaaccccatcaaaaagtgggcgaaggacatgaacagacgcttctcaaaagaagacatttatgcagccaaaaaacacatgaaaaaatgctcaccatcactggccatcagagaaatgcaaatcaaaaccacagtgagataccatctcacaccagttagaatggtgatcattaaaaagtcaggaaacaacaggtgctggggaggatgtggagaaataggaacacttttacactgttga

SEQ ID NO: 4133 - DNA, 1138 bp, Homo sapiens
  SIMILAR (23)..(538): 631254mologous to Homo sapiens HSPC307,accession number AF161425,Smith-Waterman Score=449.
gggggttttccgggaggcgcgtggggcttgaggccgagaacggcccttgctgtcaccatacatggagactttgtaccgtgtcccgttcttagtgctcgaatgtcccaacctgaagctgaagaagccgccctggttgcacatgccgtcggccatgactgtgtatgctctggtggtggtgtcttacttcctcatcaccggaggaataatttatgatgttattgttgaacctccaagtgtcggttctatgactgatgaacatgggcatcagaggccagtagctttccttggcctacagagtaaaatggacaataatattaatgggaaaggactttgcatccaagcttcctaatttacaatgggaggttttaggttttcataaatcctggacccgatcgaatgcaccaaatatcccaaaacttcaataggattccttcttctgttccattgggatttcgtctgtggtcctattggagttttttccatgggctagaagtaattccatgaggaatggaaactgcccggggctaatctgatggggttagagtgccctttgagaagaaaatccagtggatacctggatttgctcctggtcaatgaaagttttaaaaggctgtaccaatccctctaatatgaaatgtgggaaaagaaatgaagagcagcagtaaaaggaaatatctagtgaaaaaaccaggaagcggtattgaagcttggactagaatttcttcttgggtattaaagagaccaagtttatcaccaggaattttttttcctgctggcctaattgcctatacccaatgatgtttgagtggcattttctttttagtttttcattaaaatatattcccatatcctacaacgtataatatcaaataaagtgattattttttacaacccccctcttaacattttttggagatgacatttctgattttcagaaattaaacataaaatccagaagcaagatttccgtaagcttgagaactcttggacagtgatcagcttttacctattggtgctttgcctttaacttagagtgtgtgatggtagattatttcaagatatgtatgtaaaactgtttcctgaacaataagatgtatgaacggagcagaaataaatactttttctaattaataccttt

SEQ ID NO: 4134 - DNA, 900 bp, Homo sapiens
  SIMILAR (224)..(364): 511254mologous to Homo sapiens PRO1722,accession number AF119851,Smith-Waterman Score=96.
tttttaaagagacagcgtttcggtcttgttgcccaggctggactgtaatggcacaatcttggctcattgcaacctctacctcccgggttcaagtgattctcctgcctcagcctcctgagtagctgggattacaggcacctgccaccacacccgcctaattttttgttatttttagtggagacagggttttaccattttggccaggctggtctcaaactcctgactgacctcaggtgatccacccgccttggcctcccaaagtgctgggattataggtgtgagccaccgtgccgggcctggactttgtactttttcaaatcatatttaattatttcttgatctttactcaaagaattattctgcgctaaatttgcaacattaaacaataattaagcctggatccgataagttattgggtgactaggaacctacaacacaatttatttttaatttaaactcttcaagtctggattaaacttggggggggaaaaactgaacattcagggtgatatttttaaattttctttgtgactaaatagatgtcattaatatcatgcttcatcttactgtgcatagatgacccatggcacacaaagtatatgtataatattgcaatattgtacttccatctttaaaagtatgccaaagacttcataatgaattcaccatatttaaggaataaggcaaattaatgtttatccgaaatcaaaatgagattggataattcctggaatctgatttctgtaagtttcagtcctaaagggaccttaaatatctactagaacgaagtacagtgtatttctcagattacatgacattagtcaaccaatttagttgtaacacaaagtgagaaagccttaggtgttgaaggagtgtgaaaataaaaatctcttttcatgc

SEQ ID NO: 4135 - DNA, 910 bp, Homo sapiens
  SIMILAR (8)..(241): 961254mologous to Homo sapiens cyclin-E binding protein 1,accession number AB027289,Smith-Waterman Score=404.
cggacgcgtgggttttaatgtgcgctgggacagaaacgacacaaacttaattcctaatggaagtagcataactgtcaaccagactaacaagagagactatgtttctaagtatatcaattacattttcaacgactctgtaaaggcggtttatgaagaatttcggagaggattttataaaatgtgcgacgaagacattatcaagttattccaccccgaagaactgaaggatgtgattgttgggaaatacagattatgattgggaaaacatttgaaaagaatgcacgttatgaaccaggatataacagttcacatcccaccatagtgatgttttggaaggctttccacaaattgactctggaagaaaagaaaaaattccttgtatttcttacaggaactgacagactacaaatgaaagatttaaataatatgaaaataacattttgctgtcctgaaagttggaatgaaagagaccctataagagcactgacatgtttccagtgtccctccttccctcccctaaatattcctacaatggaaacagttgaaagaagcgcttcaagaagcccatcaacaacaacagagggatttggctgaccagcttgccttgtcccaacagccttattttgttgttgttatcgttgttgttgttgttgttgttgttgtttctctactttgttttgttttaggcttttagcagcctgaagcccatggtttttcatttctgtctctagtgataagcaggaaagagggatgaagaagagggtttactggccggttagaacccgtgactgtattctctcccttggatacccctatgcctacatcatattccttacctcttttgggaaatatttttcaaaaataaaataaccgaaaaattaacataaaaaaaaaaaaaaaaaaaaagatt

SEQ ID NO: 4136 - DNA, 525 bp, Homo sapiens
  SIMILAR (261)..(521): 541254mologous to Homo sapiens dJ979N1.1 (dJ979N1.1),accession number AL035659,Smith-Waterman Score=285.
atctcacatgatgctattgctcaagagtctaaacgatattggcagaatttggaagcaaatgtacctggagcgcaggtacttggtaatcaaataatgcctggatttcttaatatgaagataaagtttgtgtgccgcccccagtgtcctgagaaacggtccaagtccattgaaccagacaaaaacagaaaatattgtagtgcaaaagcaaggcattcgtggacccaaagaccggcgtgcgatgagagtgatgtcctattgaacgtaagaagtggatgaacatccgtcctctccccacaaagaaacaaatgcctttacagtttgatctgtgcaaccatattgcttctgggaaaaaatgtcaatatgttggaaactgttcctttgctcatagtcctgaggaaagagaagtttggacttacatgaaggagaatgggatacaagatatggagcaattttacgaactatggctcaagagtcaaaaaaatgaaaaaagtgaagacatagccagtcagtcaaacaaggaaaatg

SEQ ID NO: 4137 - DNA, 2183 bp, Homo sapiens
  SIMILAR (759)..(1376): 401254mologous to Homo sapiens dJ979N1.1 (dJ979N1.1),accession number AL035659,Smith-Waterman Score=335.
acagttcggcagacgctcatacagacacagtaccgttgatcgtattcaagaatgcattctccgtgatggaggttttcttggttcctggctcataattcttagggaagtctgcgttctgctgatcacgatcactttattgtcctaccagtatcactgtatgtactttgttaaataaaaatacaaataacctgaagaggtattatttgaaagctgtgtaactccatggtatggctagtgtgataattgtcttctgataatgcatatgtagtgaattatggccgaggttagtttccagtactggttataagtaagttaaatttctgaaatgttttgggcactgttcagtaacctttggagtagcttgcagtgtctttactgctttcaagtgctgatgtggaggaatcattagtgttgggcagggaaacaggagctgtcagactgagagggccagggatgttcattgtggagattaaatgttctgagtaagtgagtttgtagacattttcttgtaagaaaatgttccatgctttactctgttttggacattttcttttgaaaaattttgagatagaaaccttaatatcatttcatatatttagagcatatagttaatttgagtagagtcaaattaatcttactttagaatttgattactaagtattagcatggataataatgcttcttttgcttaaatgtaaaaattaggccgttttactaggtgtactttgtcttaatcatattcctatttttttatacagctgtgcaaccatattgcttctgggaaaaaatgtcaatatgttggaaactgttcctttgctcatagtcctgaggaaagagaagtttggacttacatgaaggagaatgggatacaagatatggagcaattttacgaactatgggctcaagagtcaaaaaaatgaaaaaagtgaagacataggccagtcagtccaaacaagggaaaatgggaaaaccaaattcacatggccaacaggattatggctggaaggttacagtgggacttttcactggctgggatgtgtgggggaaaaactggcaacagtgagaagcagtggcagggccacatctcctccgagaagcacaaagagaaggttttccacaccgaggaccgaccagtactgctggcagcaccgcttcccaacaggctatttcagtatttgtgataggtatatgaatgggcacctgcccaggaaggaaacagctgtaaattttgcacatgggaaatgcccgaactttcatggaatggggaaggaaaggaaggagattgcccttaaaggtggaagcttcaacaaagcaccgaaaagatcacttaattggcccaaaatgataatgactttgggaaaatatagttttttgtttaaagatttaaactaatatgctggcttttatggtatgatacctaatcagagcattgaccagaaaaatttgaagtgttctgaggcacatagcagaggagctgccagatttcctgcttgtattggcgtatatcgttcctcctgagcagcaacccacagtaggtagggaaattggggctgttttcaacagggcttggccaaacggttctcaacgggaaccactgggcattcaggatgggtggaagtggactgctaacccggttgccattctgttggaacagaacttttgggatggaagtgtgttgggggaaggaggataagggttatattctagggacaaactctttggagttggtcctttcatataaggattcgtggacggtaaagagaataaacaacttgtactggggatcaggaataacatggatgggatggaaattctttaacatgttttagcaggaatggaatttgtttaatataataaagtttgcctacttatcctgtatgtaggttgcctaaaaaggattttccttaactcagattttaagcccaaataacccatttaaccctagtatttggtaaaagggggtatttttctgtatttgtatgtttcactataataagggaattaaggataatgtgcattgagaatattttgaaaaataattgacgtcgaaattttatttcttgggtcttttgctgtttaaatgatgattttgaaagattaaaccgtgtactgttggtattgtgttaagtgtatggaccaatactgcctgtaataaagattttatatatagaaaaaaaaaaaaa

SEQ ID NO: 4138 - DNA, 421 bp, Homo sapiens
cggggcctccctttgtgtgtgtggccccgctggtagggaccccagtgccgctgactggcaagacacactgggagcacccaccattctgtgcggcccccagcagccatctcaaccacctatccctgcgctcccttgaatgggaagaagccccacgttgtccttgaattcctttttcactttgcatctcttcacgtgcaggctgggaccagcggagacaccgcggcgaatgcagatgactgcaccagcctcccacaacccagacacttgcgttcacaagcaacctaaggggcaggtgaagaagcgcagccctgccagacgcgctagattcctctaaggtctctgagatgcaccgttttttaaaaaggcgtggggtgaactgattttgatcttcttgtctagatgcaataaataaatctgaagc

SEQ ID NO: 4139 - DNA, 879 bp, Homo sapiens
  SIMILAR (271)..(567): 731254mologous to Homo sapiens carboxylesterase,accession number M73499,Smith-Waterman Score=396.
atggtgatcatggagcgtagcaagctctcagagctggccgccagcacctccgtgcaggagcagaacaccacggacgaggagaaaacacagcctgtgtctctgctccccattacaataaagctgcttcatgatctctctccacttcctctcctccggaatatcctggcaccagaatttcttctgccaggaacccatgtggcccaacctgagagcttgacagaatctaaagagttggaagattctaggggattttcaagtctcactgcccacccagtcttggtgtggttcccaagaggtgccttcaagactggctcagcctccatctttgatgggtccgccctggctgcctatgatgacgtgctggttgtggtcgtccagtaccggctaggaatatttggtttcttcaccacaggggatgaacacagcccggggaactggggtcacctggaccagctggctgccctgcactgggtccaggacaacattgccagctttggagggaacccaggctctgtgaccatctttggagggtcagtgggaggagaaagtgtctctgttcttgtgatggtgtggatccacagaggggggctgatggtgggcaccgcatcaacctctgatgggcgggtactcgcagcccatgaaaacgtggtggtggtgaccattcagcactgcctgggcatctggggattcttcagaaaccccaatggggaagggctgccccactggccagagtacaaccagaaggaagggtatctgcagattggtgccaacacccaggcggcccagaagctgaaggacaaagaagtagctttctggaccaacctctttgccaagaaggcagtggagaagccaccccagacagaacacatagagctgtga

SEQ ID NO: 4140 - DNA, 639 bp, Homo sapiens
ctagtcaggagtggcaggaaaggacgccgacgagtgttcagcctgtcggaggccgacagtcatggcggccactgggtttagtgctccgaacggcagctgccacggcacctcacgcacagtcaattcaggcaggtctcccctgtgagccgctcgggccgcgacgtccactcgccacgctgcatttccacagtcggcagggtccgcgcttcgcgacagtccttctgagccagacctgtacagcctggaaacgctgtccttctctgtgacgtgtgcaccagtgtcaggctcggcccgggccagaagcagatgctctggccacagccacgggatgtctgtccgctgcttatggaaacgtggccttcctgaatgtcccattaccccctcggctctgtctccccagcccgtggccaggaagtcagacttttctccaaatccctcatttcctgagcctggcctcaacttgtggccctgccttggttggatacccttgtagatcaagttcaggaagcagttcttaaacaacaacaaggccatgtcataggtgatgggtaagaagaggttattttttcccttgacatttgctattttgtgtttcagagcctttgcaggcgatttcttgggcctggtgaactcatgcat

SEQ ID NO: 4141 - DNA, 417 bp, Homo sapiens
  SIMILAR (207)..(13): 951254mologous to Homo sapiens similar to rat olfactory receptor OR18; similar to S29710 (PID:g423702),accession number AC004908,Smith-Waterman Score=311.
tcagatagtggaggggcttaatagggccacataactgtcaaaggccatggctatgagcagcaccatctccacaccaccaatgacgtggatgaagaagatttgagcgatgcagcctccaaaggagatgactttgcgctttctgaacaggtcataaatcatcttgggagaagtgacagagcaggctcctaagtcaatgaaggagagactggtactttgtcttgcaggcttcgccgtggcccagtgcataaaccagcacagctccccgtccctgtcctcacagtcgccaccctccgccagcgggagccccagcggcagcgggagcaccagccactgcgactctggaggcaccagctcgtcctccacccccaggcattctctgagcttcccagacacatcatttttagcttttcttaatgt

SEQ ID NO: 4142 - DNA, 616 bp, Homo sapiens
  SIMILAR (1)..(216): 861254mologous to Homo sapiens KIAA0350 protein,accession number AB002348,Smith-Waterman Score=315.
  misc_feature (1)...(616): n = a,t,c or g
ggctggggagtggtcaagtntgcaggcctattgcaggacatgcaggtgactggcgtgaggaccgacagcggtgccctgaacatcaccatccacaagcttgcgtccagcccccattccaagccattccccatcttccaggccacgttcatcttctcagaccacatccgttgcatcatcgccgagcagcgcctggccaaaggccgcatcccaggcaaggcgcatgaagatgcagagaatagctgccctccctggacctcccaatccagcccaccactgaagtcctggggtttggactcggctcctccacctccactcagcacctgcctttccgcttctacgaccaggggcgccggggcagcagcgaccccacagtgcagcgctccgtgtttgcatcggtggacaaggtgccaggtgagccagccccccgccctgcgccacagctcgttcatcatggtgggcgttcaaggtctttctctctgtggagcctgtgtgagctgcccttcctctctcagaagccccgtcggctggcagcaccagcttcttagaatttgtcaaagcacagcgcaagattaaacacaacacccccccataaattttggctttaccctttaaaaaa

SEQ ID NO: 4143 - DNA, 717 bp, Homo sapiens
  SIMILAR (433)..(714): 551254mologous to Homo sapiens p40,accession number U93571,Smith-Waterman Score=243.
atggataaattcctggacaattacaccctccgaagactaaaccaggaagaagtcaaatccctgaatagaccaataacaagttctgaaattgaggcagtaattaatagcctaccaaccaaaaaaagcccagaaccagaaagattcacagctgaattcttccaaaagtacaaagaggagctgtccaccatccgtttagtcccacacttcatgttcagaacttctccttacgctcctccaattttaagtcaaaggctgccagcgaagttcagcacgtgggctttggattccaacagaccagctgtgtctcttgaaaggggcctacctgtgacaatatcgttaactgaagctcaattgatgaatcccattaaaggaaagctgctattgctaaatcaaagcatggagtctctgccctccccagtaggctatgccatccaggatcacaactcctcaccagcaaggaaacaaaattgcatggagaatgagtttgatgagttgacagaagtagggttcagaaggtgggtaataacaaactcctctgagctaaaggagcatgttctaacccaatgcaaagaagctgagaactttgaaaaaaggttacatgaattgctaactagaataaccagtttagagaagaacataaatgacctgatggagctgaaaaacacagcacgagaacttcgtgaagcatacacaagtatcaatagccaaactgattaa

SEQ ID NO: 4144 - DNA, 990 bp, Homo sapiens
  SIMILAR (25)..(522): 921254mologous to Homo sapiens KIAA0350 protein,accession number AB002348,Smith-Waterman Score=768.
atggtacacggcagagaggagggaggcatggatcctgaaaaattagagcgaatccagctccccgtgccaaatgcggccgagaagaccacctacaaccacccgctagctgaaagactcatcaggatcatgaacaacgctgcccagccagatgggaagatccggctggcgacgctggagctgagctgcctgcttctgaagcagcaagtcctgatgagtgctggctgcatcatgaaggacgtgcacctggcctgcctggagggtgcgagagaagaaagtgttcaccttgtacgacatttttataaggtaattggcagagcacagatggacagcagcatgggagaagacatttttttggacatgtttgaagatgagtataggagcatgacaatgaagcccatgaacgtggaatatctcatgatggacgcctccatcctgctgcccccaacaggcacgccactgacgggcattgacttcgtgaagcggctgccgtgtggcgatgtggagaagacccggcggctgttgcccagagtagacgagtgtggctgtgaagtgacaagcccagggcctggcagacagcagcttgcacatgcagcaaggaagcaggagggtgaaaaccgagcctttgttccaggccagctcgtgggctcagcacatcaccggtgccatcccgttgtacctgcacgctctgtttcttcctccataaaatcttcaagttacaataaggtgcccacagttcctgccaccccggattattatgaaggtcacctgatacttggggacaaggtcctggcagatgacgggtgctcagttcaggccatccgggtgttcttcatgctgcgttccctgtcactgcaattgcgaggggagcctgagacacagttgccgctgactcgggaggaggacctgatcaagactgatgatgtcctggatctgagagggctctcaccaggtagtggcaagatggccttcagcagccccaagatttgttga

SEQ ID NO: 4145 - DNA, 2780 bp, Homo sapiens
  SIMILAR (2079)..(2777): 931254mologous to Homo sapiens dJ475N16.3 (novel protein similar to RPL7A (60S ribosomal protein L7A)),accession number AL035587,Smith-Waterman Score=1091.
tgtcgtggaaagcggctcgcggttcctccaccgcctccgccgccgcattctccgcttgtgctaccgccgcgggcgctgggccgctctgctggtccggcatgagaccgtgagacgagagacgggtcggggccgccgacatgtttggccgctcgcggagctgggtgggcgggggccatggcaagacttcccgcaacatccactccttggaccacctcaagtatctgtaccacgttttgaccaaaaacaccacagtcacagaacagaaccggaacctgctagtggagaccatccgttccatcactgagatcctgatctggggagatcaaaatgacagctctgtatttgacttcttcctggagaagaatatgtttgttttcttcttgaacatcttgcggcaaaagtcgggccgttacgtgtgcgttcagctgctgcagaccttgaacatcctctttgagaacatcagtcacgagacctcactttattatttgctctcaaataactacgtaaattctatcatcgttcataaatttgacttttctgatgaggagattatggcctattatatatcgttcctgaaaacactttcgttaaaactcaacaaccacactgtccatttcttttataatgagcacaccaatgactttgccctgtacacagaagccatcaagtttttcaaccaccctgaaagcatggttagaattgctgtaagaaccataactttgaatgtctataaagtggataaccaggccatgctgcactacatccgagataaaactgctgttccttacttctccaatttggtctggttcattgggagccatgtgatcgaactcgatgactgcgtgcagactgatgaggagcatcggaatcggggtaaactgagtgatctggtggcagagcacctagaccacctgcactatctcaatgacatcctgatcatcaactgtgagttcctcaacgatgtgctcactgaccacctgctcaacaggctcttcctgcccctctacgtgtactcactggagaaccaggacaaggtcttcttaattatacatcatgcaccgctggtgaactcgttagctgaagtcattctgaatggtgatctgtctgagatgtacgctaagactgaacaggatattcagagaagttctgtcttacccactctaagctccttatggcagggatctcacctgtcactgaatcagctgcagtctgggctgcacaaatgctcatctcacttatgcggagcccaggctgcagctgattcagtgacaggtgagatccctgccataaggagcttagagtggctaatcagtgctggttccaaggcgcgcacattcttcttcctgaaaatgctaataggcttctgggagaaggttgattgtgaatatcaaaggcgtcaagtgctgagcacgcggctgcaagaggccttgccgtcaaatcgcctcactgatgttgcagctgtgcattcttcatgcatgttgggctttggttccacagctccacgcggctcctggattggcgatccagcggctgtgcatctgcccctacctggggagctggccgagcaccttgggtccaagggtaccaccactgtcaccaagcaccagccccaggccaagcccagcattcggtgcttcattaaacccaccgagacactcgagcggtcccttgagatgaacaagcacaagggcaagaggcgggtgcaaaagagacccaactacaaaaacgttggggaagaagaagatgaggagaaagggcccaccgaggatgcccaagaagacgccgagaaggctaaaggtacagagggtggttcaaaaggcatcaagacgagtggggagagtgaagagatcgagatggtgatcatggagcgtagcaagctctcagagctggccgccagcacctccgtgcaggagcagaacaccacggacgaggagaaaagcgccgccgccacctgctctgagagcacgcaatggagcagacccttcctggatatggtgtaccacgcgctggacagcccggatgatgattaccatgccctgttcgtgctctgcctcctctatgccatgtctcataataaagaaaatctcctgaaaaagaggaaggcttatcaggcactcaaagccacccaggcaaagcaggaacttttggcaaagaaggagcagaagaaaggaaaagggctcaggtttaagctactggaatcattcctacatgattactggcagcagaaacctgacaaggtgcatctcagacgactagaagtgaaacctcatgccgtggaattgccagataaacattccttggcctttgttgtacgcatcgaaaggattgatggcgtgagtttactggtgcagagaaccattgcaagactttgcctaaagaaaatttttagtggtgtctttgtaaaagtcaccccccagaatctacaaatgctgcgtatagtggaaacttatgtgacctggggatttccaaatctgaagtctgtccgagaactcattttgaaacgtggacaagccaaggtcaagagtaagaccatccctctgacagacaacacagtgattgaggagcacctggggaagtttggcatcatttgcttggaagacctcattcatgaaattgcattcccagggaagcatttccaggagatctcatggttcttgcgccctttccacctctcagtggcccatcatgctaccaaaaatagagtgggcttcctcaaggagatgggcacacttggctatcggggtgaacgcatcaatcagctcatccgccagctgaactag

SEQ ID NO: 4146 - DNA, 6687 bp, Homo sapiens
  SIMILAR (2903)..(3085): 381254mologous to Volvox carteri f. nagariensis hydroxyproline-rich glycoprotein DZ-HRGP,accession number AJ242540,Smith-Waterman Score=97.
ccggaacctgctagtggagaccatccgttccatcactgagatcctgatctggggagatcaaaatgacagctctgtatttgacttcttcctggagaagaatatgtttgttttcttcttgaacatcttgcggcaaaagtcgggccgttacgtgtgcgttcagctgctgcagaccttgaacatcctctttgagaacatcagtcacgagacctcactttattatttgctctcaaataactacgtaaattctatcatcgttcataaatttgacttttctgatgaggagattatggcctattatatatcgttcctgaaaacactttcgttaaaactcaacaaccacactgtccatttcttttataatgagcacaccaatgactttgccctgtacacagaagccatcaagtttttcaaccaccctgaaagcatggttagaattgctgtaagaaccataactttgaatgtctataaagtgtcattggataaccaggccatgctgcactacatccgagataaaactgctgttccttacttctccaatttggtctggttcattgggagccatgtgatcgaactcgatgactgcgtgcagactgatgaggagcatcggaatcggggtaaactgagtgatctggtggcagagcacctagaccacctgcactatctcaatgacatcctgatcatcaactgtgagttcctcaacgatgtgctcactgaccacctgctcaacaggctcttcctgcccctctacgtgtactcactggagaaccaggacaagggaggagaacggccgaaaattagcctgccggtgtctctttatcttctgtcacaggtcttcttaattatacatcatgcaccgctggtgaactcgttagctgaagtcattctgaatggtgatctgtctgagatgtacgctaagactgaacaggatattcagagaagttctgccaagcccagcattcggtgcttcattaaacccaccgagacactcgagcggtcccttgagatgaacaagcacaagggcaagaggcgggtgcaaaagagacccaactacaaaaacgttggggaagaagaagatgaggagaaagggcccaccgaggatgcccaagaagacgccgagaaggctaaaggtacagagggtggttcaaaaggcatcaagacgagtggggagagtgaagagatcgagatggtgatcatggagcgtagcaagctctcagagctggccgccagcacctccgtgcaggagcagaacaccacggacgaggagaaaagcgccgccgccacctgctctgagagcacgcaatggagcagacccttcctggatatggtgtaccacgcgctggacagcccggatgatgattaccatgccctgttcgtgctctgcctcctctatgccatgtctcataataaaggcatgggatcctgaaaaattagagcgaatccagctccccgttgccaaattgcggccgagaaggaccaccttacaaccacccgttaggttgaaagattcattcagggttcatggaacaacgtttgcccagccagatgggaagatccggctgggcgacgctgggagcttgaggttgccttgtttcttgaaggcagcaagtcctgatgagtgctggctgcatcatgaaggacgtgcacctggcctgcctggagggtgcgagagaagaaagtgttcaccttgtacgacatttttataagggagaagacatttttttggacatgtttgaagatgagtataggagcatgacaatgaagcccatgaacgtggaatatctcatgatggacgcctccatcctgctgcccccaacaggcacgccactgacgggcattgacttcgtgaagcggctgccgtgtggcgatgtggagaagacccggcgggccatccgggtgttcttcatgctgcgttccctgtcactgcaattgcgaggggagcctgagacacagttgccgctgactcgggaggaggacctgatcaagactgatgatgtcctggatctgaataacagcgacttgattgcatgtacagtgatcaccaaggatggcggcatggtccagcgattccttgctgtggatatttaccagatgagtttggtggagcctgatgtgtccaggcttggctggggagtggtcaagtttgcaggcctattgcaggacatgcaggtgactggcgtggaggacgacagccgtgccctgaacatcaccatccacaagcctgcgtccagcccccattccaagcccttccccatcctccaggccaccttcatcttctcagaccacatccgctgcattcattcgccaagcagcgctttgccaaaggccgcatccaggcaaggcgcatgaagatgcagagaatagctgccctcctggacctcccaatccagcccacaactgaagtcctggggtttggactcggctcttcaacctccactcagcacctgcctttccgcttctacgaccaggggcgccggggcagcagcgaccccacagtgcagcgctccgtgtttgcatcggtggacaaggtgccaggcttcgccgtggcccagtgcataaacgagcacagctccccgtccctgtcctcacagtccccaccctccgccagcgggagccccagcggcagcgggagcaccagccactgcgactctggaggcaccagctcgtcctccaccccctccacagcccagagtccagcagtcaggagtggcaggaaaggacgccgacgagtgttcagcctgtcggaggccgacagtcatggcggccactgggtttagtgctccgaacggcagctgccacggcacctcacgcacagtcaattcagatgcccccatgagtccagaactgcctaagcctcaccttcctgaccagttggtaatcgtcaacgaaacggaagcagactctaagcccagcaagaacgtggccaggagcgcagccgtggagacagccagcctgtcccccagcctcgtccctgcccggcagcccaccatttccctgacccttgtccccccagttgacccccacagcctccgcagcctcaccggcatgcccccgctgtccacgccggctgccgcctgcacagagcccgtgggcgaagaggctgcatgtgctgagcctgtgggcaccgctgaggactgagtcagtgccggggcctccctttgtgtgtgtggccccgctggtagggaccccagtgccgctgactggcaagacacactgggagcacccaccattctgtgcggcccccagcagccatctcaaccacctatccctgcgctcccttgaatgggaagaagccccacgttgtccttgaattcctttttcactttgcatctcttcacgtgcaggctgggaccagcggagacaccgcggcgaatgcagatgactgcaccggccactcagggagctgcctgggctccgtgtctctgagccccgggtggcaggacccaccggcacctctttcttcctctgtcatatggctcctctgtcaccagccccagtgtgcacagaagaattggaccaggtcactgtacgtagaaatttgtagaaaagcagacttagataaacatctcctttggatatttatttccgcttttggcagcaggtgaacatttatttttaaaacttctatttaaaagaagtccaaaaacatcaacactaaggtttgatgtcatgtgaaaagtgtaataataacagttaagatttcatgatcattttcactggacctttcctgatattttgtttcagagttcttagtgtggctttttccatttatttaagtgattctttgttactcactaactctgcaagcctgtggaataatgaagtaccttcctggaaagtttggattattttttaaacaaaaacaagggagatacatgtattctcaggtacacacagagctgagagggctgaatggttttctgctatagcagccgagaggcctcccatcatggaaagatttctccaggaaaaggaggaatgtagccagctccccactcaggacgcttcctcatttctcttcaccaaaaccaaacagagacagcttccagcaccttcttcagtgttaccatctctaagaaggaaccagttgggaccgtgaagactcccgaccctgtggccatgatggaaatcaaaggaagacaccctctacgtcacctgccctcgactgtgtgtgcccacatgtgccgagagatggcccagagccagttcccctccagctgcaagggcatggtgtccccagagctctgagtctgtcactctccctctgctactgctgctgatctgaatatggaaaccccatggttcccttccccattcggactgggtgtgtacaagcaaggacccagatgcatcagacacagcccccaagatgttcctttctactcggccagctcgggagccagacacagcactcacagcccaggccgtgatccaccctccccaagtccaccagggccagcggcccctcacctctctggtcactggtgagaccttccacaactttcctccagacctgccagcagatgtgcccaccaggggcattaggtatccgccggagcctggccatagggtagtctcgggagccgcgctgagatcttttgccacctgcattttagaagaacatggtctctgtctcctcggcccagccagctgtcccggcaaggcctgccgagggcagttttcaacctcatgaaggaaacacagtcctgccaaggagggggagtggcgcccatggggacaggcctcagtccttagaagccctctgggtagctgtgcccacccagccttcatggctgcaggtacaaggacctttgcttccatagagaaaacgcacagctcagaaagggggccacatgggcagaaacccaaaggaaggacaaaccacgaccaccgtggccatctggcagaatccctggaagaaaacgaaggcagggtggagcggggggaagaccatcatggagagaaggaccacagcatcaggagacgggacacgccacacccagcaggcagcctgtgtgttgcttaattttttaagagcaagaggggtagagaggatcaagctggccctggctggagatggctagcccctgagacatgcacttctggttttgaaatgactctgtctgtggggcagcagaaactagagaaggcaagtggctgccccaccccaaggcgtgaccaggaggaacagcctgcagctcactccatgccacacgggtgggccaccaacctgctgtcagaagactctgggctccaactggtcttgtaaccactgagcactgaaggagagaggtcttggtcagggctggacagcatgcccgggaggaccaccataggattaaaggtgactgggaggaccagcggaggataaaagacactgctcagggcagggcttctaccctgcatccctggccaagaaaagggcagtccccatgtgggcttgcagggtcactctcaaggggcctcttttcagctggggctgggcaacttgcgtctgggggacacctccaggtttgtggggtgaggattttcctataaaccagggctcccagaagctttgcttatgtaaggaagttttgggagccagcccattggaggccaccagccattttggcttcaaaggaccccacctcacccaggtctcagcggcagcgggcacagctatgtcttcaggagctcccgtcaaacctcatagctggggcgctcccagacaggccagtccagacaggacacgctgggcccctggcatccagaggaagagccaggagtgtgggaaggcccacagtgggggctgtggcttctgacactcaggtcatagcctcagaggtctgaggtcagcccccacagacccatccggcccgccccccaagtccctgcagagagcacttatagttatggcccaggccctggtccaccccttcccctgtgcacctccggctgggtttgccaagtcagggagcagggctggccgcaggaactcccaaaccttggctttgaatattgttgtggaaggtgtgcctcgtcccctttctggaacgtgcaaaggtaacctgtccccagcaggtcagattggggccaagctgaggcgctccccccaggcaggaaagggccaagccttcaccatcgacgtgggatttgggaggagggggcctccgtgagcagcccctcctctggccgctgtcccagcccagtccctctcccggagccttggcagcctcccacaacccagtacacttgcgttcacaagcaaccctaaggggccaggtgaaagaaaccgcaagcccctgcccagaacgcgcctagaattccctctaaggtcctctgagatgcacccgttttttaaaaaagcgcgtggggtgaacctgattttgatccttccttgtcctagatgccaataaataaatctgaaggcatttaatgttagtcaactttgacattggggcctacactgttacggagttccttatgtttcccttgagcctaaaaatatgtaaaataatttttgtcccagtgaggaaccgaggggttaggaaaacctcggtggcctttgaggcctcggggaccgctctagggaagtacctgctttcgcccagcatgactcatgcttcgtgggtactgaacacgagggtggaaatgaaaactggaacttccttgtaaatttaaacttggcaataaaagagaaaaaaagtt

SEQ ID NO: 4147 - DNA, 2215 bp, Homo sapiens
  SIMILAR (2)..(1801): 1001254mologous to Homo sapiens aconitase precursor,accession number AF086790,Smith-Waterman Score=3175.
aaattatgcataccctggagttcttctgattggcactgactcccacacccccaatggtggtggcctaggaggcatctcgattggagtagggggtcgtgatcgtgtggatgtcatggctgggatcccctgcgagttgaagtgtaccaaggtgattgcgatgaagctgacaggctccctctctggttggacctcacccaaagatgtgatcctgaaagtggcaggaatcctgacagtaaaaggtggtacaggtgccattgtagaataccatgggcctggtgtcgactccatctcctgcacgggcatggcaacaatctgcaacatgggtgcagaaattggggccaccacatcagtgttcccatacaatcacaggatgaagaagtacctgagcaagactggccgagcagacattgccagtctacgtgaagaattcaaggatcacctagtgcctgaccctggctgccagtatgaccaagtgattgaaattaacctcaatgagctaaagccacatatcaatggaccttttacccctgacttggctcacccagtagcagaagtgggcactgtggcagagaaggaaggttggcctctggacatcagagtgggtttgattggcagctgcaccaattcaagctatgaggatatgggacggtcagcagctgtggccaagcaggcactggcccatggactcaagtgcaagtcccagttcaccatcacaccaggctctgagcagatccgcgccaccattgagcgggatggctatgcacagatcctgagggatgtgggaggcattgttttggccaatgcctgtggcccttgcattggccagcgggacagaaaggacatcaagaagggggagaagaatacaatggtcacttcctacaacaggaacttcacaggccgcaatgacgctttccctgagacccatgcttttgtcacatccccagagattgtcacagccctggccattgcaggaacccttaagttcaacccagaaaccgacttcttgacaggcaaggatggcaagaagttcaagctggaagctccagatgcagatgagcttccccgatcgagctttgacccagggcaggacacctaccagcaaccccccaaggacagcagtgggcagcgggtagacgtgagccctaccagccagcgcctgcagctcttggagccttttgacaagtgggacggcaaagacctggaggacctgcaaatcctcatcaaggtcaaagggaagtgcaccaccgaccacatttctgctgcgttcccctggctcaagttccgtggacatctggacaacatctctaataacctgctcattggtgccatcaacattgaaaacggcaaggccaactccgtgcgtaatgctgtcacccaggagtttggccctgtgcctgacactgctcgatactacaagaaacatggcatcaggtgggtggtgattggagacgagaactatggtgaaggctcaagccgggaacatgcagcactggagcctcgccaccttgggggccgggccatcatcaccaagagctttgccaggatccatgagacgattaagaaacagggcttgctgcccctcacctttgctgacccctctgactacaacaagatccatccagtggacaaactgactattcaaggcctgaaggactttgcccctggcaagcctctgaaatgcatcatcaagcaccctaatgggacccaggaaaccatcctcttgaaccacaccttcaatgagacccagatcgaatggttccgtgcaggcagtgccctaaacaggatgaaggagctgcagcaataaggaaggtcccggcaagctggctgtcatgtcccactctggacccactctggaccctgctggatgtcagaagtacaggtccgtgtgcatcctcagagccagagctggtctatccagcatggcctagctctgagatgacgaccagacctgcttcctgctctctccatcctcagccactgagtgatccaccgtggagggcacttgagattaagtcccagcccctgcctttcagcttggttcttccttcaaaaatgccatgcaacctgtatttatttttaatgacagcactccctctaaaaaaaagttttcatcctgcctgatcatttcactggtggctgaaggattttagagaacctttgttctcataagaaaaaaaaaaagccaaatccattgacaaaaaaaaaaaaaaaaaaa

SEQ ID NO: 4148 - DNA, 1240 bp, Homo sapiens
gttagtgagagatatcttaggatatctggccctagacaaagacaaggaagggggccgactcaggaagtcagaggccaaaagctcagagagggggctacacggggcctcacagtgagcaggcagagagggtctgaggtgattggactttttctgctttgagaaacaaacagaaccagggctgaacccaagtcctggcccagccgggtgaaaggactctggcaacccccttggtggcttgggtggggcagagggtgcttcccaaggaagggggcgccttgagcttcacagatgcatcttgtgtggggcccggaggccgtccctgtctcacccaacctcccttccacacacaccttgcctctgccaagcaccaatgggtggcttctgtcttctttgccactgcaaacaaccacgtgcctctgtcccctcgggggcctcgtttgggtctcattcacgcaggcttcacttgcccttaggcagcaggcgaggaagggcccctccagcccctttaccgggagcctcaggatgcccaggcgccaggtgggtgaggccaggcaggtagggccagacaggtgaggtcggtgccctcctctgccttaataaccttacccccgcttgcctgacagaaacatggcaatcaaggtgggtggtgatcggagacgaagaactacggcgagggctcgaagccgggagcatgcagctctggagcctcgccaccttgggggccgggccatcatcaccaagagctttgccaggatccacggtgagctggagtctgtacccaggccatcctcatcccatccatagtgatcaaggtcactctccctgcccgtggctgagttgggcctggttctaggctgtgtccactgcagcccacaggcccgtcagcctcttgccccttcttaggctcacacagtgcacatccgacgctcagcttcccggcttcccgcaggccctgcttccaggcttgtagatctgagccgctgagatctaggacatgtgccagggggttctttctgatcatgaatgtgcagcaggaaggcctcgcagacctcagcaccagcgcacacttgctaggggcacccctagtgaaagggagcagaccagggccccatagtcactgcccgggcattgtcccaggcagcaggattaggggcatctcccagagccccagatgggttcagaaaatgaagctctccaggctagtcaggcccccgatgaccgaatgccgcctgctttcccc

SEQ ID NO: 4149 - DNA, 2763 bp, Homo sapiens
  SIMILAR (21)..(2276): 881254mologous to Homo sapiens aconitase,accession number AF093096,Smith-Waterman Score=3451.
catctttgtcagtgcacaaaatggcgccctacagcctactggtgactcggctgcagaaagctctgggtgtgcggcagtaccatgtggcctcagtcctgtgccaacgggccaaggtggcgatgacgcattttgagcccaacgagtacatccattatgacctgctagagaagaacattaacattgttcgcaaacgactgaaccggccgctgacactctcggagaagattgtgtatggacacctggatgaccccgccagccaggaaattgagcgaggcaagtcgtacctgcggctgcggccggaccgtgtggccatgcaggatgcgacggcccagatggccatgctccagttcatcagcagcgggctgtccaaggtggctgtgccatccaccatccactgtgaccatctgattgaagcccaggttggggacgagaaagacctgcgccgggccaaggacatcaaccaggaagtttataatttcctggcaactgcaggtgacaagtatggcgtgggcttctggagccctggatctggaatcattcaccagattattctcgaaaactatgcgtaccctggagttcttctgattggcactgactcccacacccccaatggtggcggccttgggggcatctgcattggagttgggggtgcagatgctgtggatgtcatggctgggatcccctgggagctgaagtgccccaaggtgattggcgtgaagctgacgggctctctctccggttggacctcacccaaagatgtgatcctgaaggtggcaggcatcctcacggtgaaaggtggcacaggtgcaatcgtggaataccacgggcctggtgtagactccatgtcctgcactggcatggcgacaatctgcaacatgggtgcagaaattggggccaccacttccgtgttcccttacaaccacaggatgaagaagtacctgagcaagaccggccgggaagacattgccaatctagctgatgaattcaaggatcacttggtgcctgaccctggctgccattatgaccaactaattgaaattaacctcagtgagctgaagccacacatcaatgggcccttcacccctgacctggctcaccctgtggcagaagtgggcaaggtggcagagaaggaaggatggcctctggacatccgagtgggtctaattggtagctgcaccaattcaagctatgaagatatggggcgctcagcagctgtggccaagcaggcactggcccatggactcaagtgcaagtcccagttcaccatcactccaggttccgagcagatccgcgccaccattgagcgggacggctatcgacagatcctgagggatctgggtggcattgtcctggccaatgcctgcgggccctgcattggccagtgggacagaaaggacatcaagaagggggagaagaacacaatcgtcacctcctacaacaggaacttcacgggccgcaacgacgcaaaccccgagacccatgcctttgtcacgtccccagagattgtcacagccctggccattgcaggaaccctcaagttcaacccagagaccaactacctgacgggcacggatggcaagaagttcaggctggaggctccggatgcagatgagcttcccaaaggggagtttgacccagggcaggacacctaccagcacccacccaaggacagcagcgggcagcatgtggacgtgagccccaccagccagcgcctgcagctcctggagccttttgacaagtgggatggcaaggacctggaggacctgcagatcctcatcaaggtcaaagggaagtgtaccactgaccacatctcagctgctggcccctggctcaagttccgtgggcacttggataacatctccaacaacctgctcattggtgccatcaacattgaaaacggcaaggccaactccgtggggcaatgccgtcactcaggagtttggccccgtccctgacactgcccgctactacaagaaacatggcatcaggtgggtggtgatcggagacgagaactacggcgagggctcgagccgggagcatgcagctctggagcctcgccaccttgggggccgggccattcatcaccaagagctttgccagggatccacgagacgaacctggaaggaaacagggcctgctgccttttggacctttcgctggacccggctgactacaacaagattcaccctgtgggacaagctgaccattcagggcctgaaggacttcacccctgggcaagccccttgaagtgcatcatcaagcaccccaacgggaccccagggagaccatcctcctgaaccacaccttcaacgagacgcagattgagtggttccgcgctggcagtgcccttcaacagaaatgaaggaacttgcaacagtgagggcagtgcttccccgccccgccgctggcgtcaagttcagcttcacgtgttgccatcagttggatccgattccttccagccatggcttcctattccaagatggtgtgaccagacatgcttcctgctccccgcttagcccacggagtgactgtggttgtggtgggggggttcttaaaataactttttagcccccgtcttcctattttgagtttggttcagatcttaagcagctccatgcaactgtatttatttttgatgacaagactcccatctaaagtttttctcctgcctgatcatttcattgggtgggctgaaggattctagagaaccttttgttcttgcaaggaaaacaagaatccaaaaccaaaaaaaaaaaaaaaaaa

SEQ ID NO: 4150 - DNA, 408 bp, Homo sapiens
cagccccccggggttcttggatggtggtggcggaggaccctgcgtgcagtgtgacgctctgtcctgaatcccttagcgggtacctaccaggaggatcagggcaaggtccctctccagctgcaggtgaggcctgcggaactcagcttggatggcagcctttggtgggccgctgtggcccgcacgtctctgttctctccaagtaacatgcgacggtgtctggtgtcacgtctcgcctgagaagcccgtcttaggaaagcttagcttgaacacagtgctcgggaggaagatccagaaattgtgaacaatgtttgatttagtagcgtgacttgcctttccctttaaaaacatcttttacaaatctgtcttggaataaagtctattttctgccttttggtttttaaaaaaaaa

SEQ ID NO: 4151 - DNA, 453 bp, Homo sapiens
  misc_feature (1)...(453): n = a,t,c or g
ccttcacctgcttgggcggcccggtcccgggaccactggcactcttggcnagaggccagcgcgtggccagccccccggggttcttggatggtggtggcggaggaccctgcgtgcagtgtgacgctctgtcctgaatcccttagcgggtacctaccaggaggatcagggcaaggtccctctccagctgcaggcaccagccccagcctcccaccacgctcactgcctggcttggaaaagttaagaagcccctcaggaagagaatcgaggctaagttcctctgcgccgagggccccgagcatatccgccaaggctcagctgcagtgccaggcggaggaggaagatccagaaattgtgaacaatgtttgatttagtagcgtgacttgcctttccctttaaaaacatcttttacaaatctgtcttggaataaagtctattttctgccttttggttttt

SEQ ID NO: 4152 - DNA, 465 bp, Homo sapiens
  misc_feature (1)...(465): n = a,t,c or g
tctcgcctgagaagcccgtcttaggaaagcttagcttgaacacagtgctcgggaggtttctgctctgtctgtcatggcagtctcttggtttgtgtctggccaaggccatgcgtgtgcctcatggcccttcctggccgcctgccacaccgcaagctcgctggggggacactagaagcaccgtggcctgggattccatctggagctgtccgcaggcaccagccccagcctcccaccacgctcantgcntggcttggaaaagttaagaagcccctcaggaagagaatcgaggccaagttcctctgcgccgagggccccgagcatatccgccaaggctcagctgcagtgccaggcggaggaggaagatccagaaattgtgaacaatgtttgatttagtagcgtgacttgcctttccctttaaaaacatcttttacaaatctgtcttggaataaagtctattttctgcca

SEQ ID NO: 4153 - DNA, 1856 bp, Homo sapiens
  SIMILAR (18)..(260): 881254mologous to Mus musculus putative,accession number AK017733,Smith-Waterman Score=389.
cattcgtggtggacttcgacagacctcatgagacacgggtgctgcaagtctcctgcggccgagctcactctcttgtgttgactgacagggaaggagtcttcagcatgggaaacaattcttatgggcaatgtggaagaaaggtggtcgaaaatgagatttacagtgaaagtcacacagtccacaggatgcatgacttcgatggccaggtggaccaggtcgcctgtggtcaggatcatagtctgttcctgacggataaaggtagaagtctattcttgtggatggggtgctgatgggcaaacaggtctgggtcactacaatatcaccagctcgcccaccaagctgggtggagacctggcgggagtgaacgttatccaagttgccacctacggtgattgctgcctggccgtgtccgccgacggaggacatttttggttggggaaacctcgagtacctgcagctggccctcctgtcactgactccacacaggtgaatgtgccccgctgcttacacttctcaggagtggggaaggtgcgacaggcctgcatgcggtggcacgggctgtgcagtgttaaaccggagaaggacatgtttttgtctggggctatggaattcttgggaaaaggtccaaacctaagtggaaagtgcccgtccctgaaaatgattccacccactctctttggctttgacggatttcaacccagaaatccagggtttcccgcattccgatgtggaattcaagccactttgctgcactgaccaacaaaggagagctgtttgtatggggcaagaacatccgagggtgcctggggaatcggtcgcctgggaggaccagtatttcccatggagggtgacgatgcctgggggagcctgtgggacgtggcatgtggcgtggaccacatggtgaccctgggccaagtcatttcatcttaaacctccctcaccttgctttggggcggccccgtcccgggaaaccacttggcatttcttttggcagaggccagccgcgttggccaagccccccggggttcttggatggtggtggcggaggaccctgcgtgcagtgtgacgctctgtccttgaatccctttagcgggtacctaccaggaggatcagggcaaggtccctctccagctgcaggtgaggcctgcggacgctcagcgttggagtggcagccgtttggtgggccgcgtgtggccgcagcacgttttctgttctctccagagtaacatgcgtacggtgtcgtggtgtcacgtcgtcgcctgagaagccgcgtcttaggaaagcttagcttgaacacagtgcttcgggaggtttcttgctctgtctgtcatggcagtctcttggtttgtgtctgggccaaggccatgcgtgtgccttgggaccgagccccagtttagggcgagggaagtcaaggctggcttcggcccctcgggttttcaattcaggcccaccctgcctcaatggcccttccctggccgccctgccacaaccgcaagctcgctggggggacactagaagcaccgtggccctgggattcccatctggaagctgtccgcatggcaccaagccccagcctccccaccacgctcactgccctggcttggaaaagttaagaagcccctcaggaagagaatcgaggctaagttccctctgcgccgagggccccgaggcatatccgccaaggctcgagctgcagtgccaggcggaggatggaagatccagaaattgtgaacaatgtttgatttagtagcggtgacttgcctttccctttaaaaacattcttttacaaatctgtcatggaataaagtctattttctgccttttggtttttaagctctgaaaaaaaaaaaaaaaaa

SEQ ID NO: 4154 - DNA, 546 bp, Homo sapiens
  SIMILAR (217)..(543): 491254mologous to Homo sapiens p40,accession number U93571,Smith-Waterman Score=242.
atgaaacagcccaacaggaaaaggaagcttaatatggattccaaagagcgtttggatcaggacggacgcttggtgaagatgtcattctttgtgttctgctgtgtcgtgtcctctgaggaatcagagcacgaggagactcaggatttgatgtgttcagagttattctgggtacttctccacatgtggtccctggaccagcagcatcagcatcacctggaggatcacaactcctcgccagcaaggggacaacactggatggagaatgagtctgatgaattgacagaagtaggcttcagaaggtgggtaataacaaactcctctgagctaaaggagcatgctctaacccaatgcaaggaagctaagaaccttgaaaaaaggttagacaaattgctaactagaataatcagtttagagaagaacataaatgaactgatggagctgaaaagcacagcacgagaacttcgtgaagcatacacaagtatcaatagccaaattgatcaagtagaaaaaggatatcagagattgaagatcaacttaatgaaataa

SEQ ID NO: 4155 - DNA, 304 bp, Homo sapiens
  SIMILAR (70)..(267): 601254mologous to Homo sapiens Human myelin oligodendrocyte glycoprotein gene,accession number AAZ29204,Smith-Waterman Score= 168.
  misc_feature (1)...(304): n = a,t,c or g
ttttgaggccaagtctgtattgccgagactggagtgcagtggtatcatctcagctcactgcaacctctgcctccagggttcaagcgattcttgtggctcagcgtccaggcgtgcgccaccatgcccagctaatttttgcatttttagtagagatggggtttcaccatgttggccaggctggtctccaactcttgaccttaggtgatccacccacctcggcctcccaaagtgctgggattacaggcgtgagccaccatgccctgcctgcctggctaatntttgtatttttagtagagacagggtt

SEQ ID NO: 4156 - DNA, 6283 bp, Homo sapiens
  SIMILAR (4727)..(3327): 1001254mologous to Homo sapiens zinc finger transcription factor,accession number AF049907,Smith-Waterman Score=2486.
atttttttttgagacagagtcttgctctgtcgcccaggctggagtgcagtggcaagctctcagttcactgcagcctctgcctcctgggcgcaagtgattctgctgcctcagcttcctcagtagtggggattacggcacgtgctatgccataatttttgtattttgtgcaacgtcataatctcagctcactgcaaactctacctcccaggttcaagcaattgccctgcctcagcctcccgagtagctgggattaaaggcatgcaccaccattgcctggctaatttttttgtatttttagtagagacggggtttcaccatgttggtcaggctggtcttgaactcctgacctcaggtaatccacccacctcggcctcccaaagtgctgggattacaggcgtgagccaccatgcctggccccaagtatgaatattaaataccactggtggtgccttgaagccctttcccatggggattgaagaaaaaccacagttaagactcaaagtaggggacaaatagcttggttgtaggccattgacgtgatccctgaaagattgtttgaacaatgttacccacaaccatccaaacttattaggaaggataaagattttctaaagctatattgaggtgaagagaagagactattcctccaactcaacgtggggatgaaaaaaaggtaaaaaccagagtttacaaaaattcacttttaatattcaaatgaaagcaacccccttctcctgcctctctgaacatggccagcatttcagacaccctaccacctcccaggctctggctgcctgataaaaaaatcccaatttttgccaaaacctcaaataccacaaaacactaaaagaacagatgtgagcaacttatttaagttctacatttagtagctgatggacacataaggctttcaagaagacactcttctcttcacaacatattaaataagtcctagcacaactgactgcttccaaaactaccacccaagcgtgccaccactcttggctgaacagaaactcttcctcatgacaagggcactatgctgatttcagcagaactgaaggaccacgactctcccagaatatctgtatttttacctctcagacttctcctgcaatgtcctaatgatcatgtaaatagtcttcaatgagaaacaggacatcaaaccttccaaacaggcagaaaatgctctgctaataccatgggagagggtgatcagtttttggcagaacaaaatggcatcaccaccttagtactgaaattagtaggagtaatagaacaatttctcctcaaatataatggctaggatcatacctaaaacccactggcctctaccatgagtgaaagaaaaggagacaataggcttgattgtacaatcccctcagtatacgtgtgtcaggtacacagagaaaagactgctaaccagtaacgtttcaatactaagagaagctattaatgtggcaaacaaccaagaggtaatatctagtttctaggtttaaaaaaaaacaatatatatatatatttataataaagttttaaatacaaagtgctttttatatatcgagaatgatacagtgttgtgaataaatccctgtttgtaatcttgcttacaagagttaactggtaaataagtattttctttcctctttccagacaatgttcaacaagtaaacaccctggtgttaggagcttgagaatcagaggccattgccagcaatgtctattacattacagcaaagccaaacttttcaaataaaatttcaccccaaatccaagaaaaattatttttattttaagaaaaaaagtttctatttagaagtaaataacccagtacgattgtggaaaagatgacatggtagtagcaccctgtcctaccctggtgataacctcaggtatgttacacagcttaaaagcatgtgcaatattacctttctttttaacctaaatcatctaactgatgggcagaaaaggtctcagaatagttgcttttcttgtttgtttttttaattttttttttctggtcggcgtagctttgtggacttttaagtttaagcagctttatctataatgtgggagcatggttctgtagactaccttgctaaacttaggactccttttacaaacacattccagtgctcataaagaactggtagtattagctcagtgtaccctctaaagagtatctcccccaccttgaaagagtgtattctcaagattcttcttgggcagttttgtcccccttaagtataaccactcatagaatcctgcctatctgccctctcactctggttggtggagtgtcaccttagcactctatgaactactcaagttcacagggaactctcagccacaacttgtggctccttctcactaagtgtggtcatggaccactctctttgtaaagcaccataatctaagacagagcaggggctgtggcagcccgtggtaccgtggtcagtcacagcagcttggtgtctaccagccacagagaagaccccactgtatggaggctacaattaaccaaacaggatttgggaaagcaaaccaatgagaaatacctatctctggcaccctagagaattacaattagataaaattgtccaaactcaatgttagaactaaaatacaaaacactgccttatcaagagtctgaaacaccttgtgacagtagtggcatcttacagaaactgacaagggcactatgtcagccttgtaccgtaaattatctgtttcatatttagaaagtcactctcttagcatctccatagttttagttaaaatatcctttagaaagactaaaaccagacaacagagctctgttaaccaatttctcatcctaggaatcacattatttctagcttttatataagtagcacttccttcagtgaaatagctaccaaaacaaatccacattacctaagtatctatagcaagagcaaaataaaatttcagcatgaccttgtaataatgagtgatccaaagctgctgccacccaaaatggaactggtgggtggagtccagttccaagtgcaggtgtctctgtccacctgtttcgatcacaaccagtcagaaggtttcccttgccagctgggcggtgggttaactcaccccattacccattccaggccaggactggaacacacaaatttgaggaattagatttttttaattggcctacttagagctggtctttcagaaatatcttcctttttttttttaagcttctctcataatagcaagtagcacgcatcatctgtgcccagatttgcattaattaccatagtttatttttgtgcatgccactcaagggccagatcctatttttagttagcctcagttgtattctgctcagcctttgcagcttcgtaggacttagtacaagaagtcacatgccggtggaaactgtccctccacataaacctctttgcacagatattacactcatacggctttatgcctgtgtgaattttcatgtggcccacgagatggtgcttcattttgaatttcttaccgcagaccccacagccgtaaggccgaagaccgaggtgcatgctcatgtgccgatctctctgactcttgtgagtgaaacttttcccacactgacaaggatacagcttgtcagtggctgagaatcctaagtgggaagcttcttctttaatccctgttaccatttcaatattctcactgtaacctgctgcgagggcagcctcctgtctgtgcccaattagattcccatctgacctctctccggaaaactcttccatggaagagccatagaaatccacctgctcatcataattgctttcatcagcctgttcatcaaactcagcttccactttcttctccccgatgtggaagtcctcctccactcccgaaggctgcaccgtgtgctctgtctgcacggtgttgatggactctgtgacctggtgctcgtcgtaggtcgcgtgcacatccatgccctcgcaagcctgttctaagcgctcgggcttcacgtggatccagcgtttgtgagccatgatgctgggcttgctgtacatgggccgggtgtagtggaactcggcgctgtcgctggcgccctcctccccatcctggcttgccatttccgtgctcaggcggtcatgctctgtggacgagttgctgggcaggtattcgtgctcggtgagctgggatgacagctcgtctttggtgctctcctcttcattttcaccatctctcagttcttgggctttgggaaaatcagtatgacccccagagcccagctcaaagctctctaccaggccattataactactgctgcttggtgactggtggtcactgccatgatttagcttctgacaaaggactgtagggtttccctctaaaacttcagtgcatttgtctaccacatgccacatctggaggaagcttgccgctgtcaagtaactaacaatttctggagcgggcattactagacgtcctgtataactagataggagaatgttctcaaacactcttgggttcatcacatcaggcaaaacaattctcctgctgtttttcaggagtacctggtcacaaaagtagggtgaactggcagcaagaacggctttgtgtgcccggaaaatgtggccttggacaacaatggagacgtcacataattgtccttgctggcgctgctggttcagtttctgtagaatggtgctggaaaaatcaggaaattctacccgaaaagagtttgttccaggctccatttcatcacaaatcttgttcggtgctacaagagaaagaaaaattagtacaaattccagcccaaagataaacttattttatcccctcctccattgttaagacaagttccaaagttccacaaagtcctctagcctatgggccccactgggtaagggattcaatccctagagcaaagcttgcaggtgcgtgtttgccaaaggcaggactcaccaccactccttgtggaactcctgattttggttctgtgtctgtgggtaagagaactgaatccatagggacaagatttgtaagctatacaaatctcccaagtaaaaccaagtactgtaaatatttacagttaaaacaaacaagatacccattcaaataatataatttttttttaaacgagatggggtcttgctctgttgcccaggctggagtgcagtggcacaatcatagttcactgcagccttgaactcttgggtaatcaagctatcatcctgcttcagcctcctgagtagctgggactgtatgtacatgccaccatgtccagctagttttttttttttttttttgagatagagttttgctcttgttgcccaggctggagtgcaatggtgtgatctcggctcactgccacctccaccttctggtttcgagcgattctcctgccttggcctcccaagtagctgggattataggcgcccgccactacacctggttaattttttttttttgtatttttagtagagatggggtttcactatgttggccaggctggtctcgaactcctgacctcaagtgatctacccacctcagcttcccaaagtgctgggattacaggagtgagccaccatgccctgcccagtctttataaatgaagcttgactctggactgtgatagcagaaacaaatacaggcagtgcctcagagaatacaaaatatcaagcaaatcctaagtgttgaagctagaacccaggtgagtgcactctgcattactgagaatgtgctccctgccaaaaggctcctaccctattccaaccaagccggaaatggcaacagaccaaacgtgaggagtgagtgcctctgtgctccttgaggctgtttcattacagataacaaggttacctagggcagttgtgaagatgaaatgaggatgtgtgtggaagggcagagcagatgcttgatgttctccatctgaacactactcttgaccacagtatttctcattctcctttctgaaatgcctctaggccttaagcgcctatttctataaatgttgggtgatcagaccaatatggtttctgaaaaaactgttcagaaatagactaattttctttgggtggttcagtctgatgctgaaataaattgcaagatgattttcaaaaataacatgaaccccgacagcttcgctgagaaatatggagcctcttcaaacgtgtttttaaaaagaactggatgtgcaggcgtaacagatttattacaaaacaaaaactccccaagccagccttattactggggctcatcattaaaatccagtgctcctcgtgccaagctaggcgtaatggtgtgtacaggc

SEQ ID NO: 4157 - DNA, 5440 bp, Homo sapiens
  SIMILAR (2)..(5437): 1001254mologous to Homo sapiens myoferlin,accession number AF182316,Smith-Waterman Score=9664.
caacatgaccccttctgaattgatggatgagatcatcagcatccgggtttataattctcactctctgcgggcagattgtctgatgggggaatttaagattgatgttggatttgtttatgatgaacctggccatgctgtcatgagaaagtggcttcttctcaatgacccggaagataccagttcaggttctaaaggttatatgaaagtcagcatgtttgtcctgggaaccggagatgagcctcctcctgagagacgagatcgtgataatgacagtgatgatgtggagagtaatttgttactccctgctggcattgccctccggtgggtgaccttcttgctgaaaatctaccgagctgaggacatcccccagatggatgatgccttctcacagacagtaaaggaaatatttggaggcaatgcagataagaaaaatctcgtggatccttttgtagaagtttcctttgctggaaaaaaggtttgtacaaacataattgagaaaaatgcaaacccagagtggaatcaggtcgtcaatcttcagatcaagtttccttcagtgtgtgaaaaaataaaactaacaatatatgactgggaccgtcttactaaaaatgatgtagttggaacaacatatctacacctctctaaaattgctgcctctggtggggaagtggaagatttctcatcttcgggaactggggctgcatcatatacagtaaacacaggagaaacagaggtaggctttgttccaacgtttggaccttgttacctgaatctttatggaagccccagagagtacacgggattcccagacccctatgatgagctgaatactggaaagggggaaggagttgcctacagaggcaggatcttggttgaattagccacttttcttgagaagacaccaccagataaaaagcttgagcccatttcaaatgatgacctgctggttgttgagaaataccagcgaaggcggaagtacagcctgtctgccgtgtttcattcagccaccatgttgcaagatgttggtgaggccattcagtttgaagtcagcattgggaactatggcaacaagtttgacaccacctgtaagcctttggcatcaacaactcagtacagccgtgctgtatttgatggcaactactattattacttgccttgggcccacaccaagccagttgttaccctgacttcatactgggaggatattagtcatcgcctggatgcggtgaacactctcctagctatggcagaacggctgcaaacaaatatagaagctctaaaatcagggatacaaggtaaaattcctgcaaaccagctggctgaattgtggctgaagctgatagatgaagttatagaagacacgagatacacgttgcctctcacagaaggaaaagccaacgtcacagttctcgatactcagatccgaaagctgcggtccaggtctctctcccaaatacatgaggcggctgtgaggatgaggtcggaagccacagatgtgaagtccacactggcagaaattgaggactggcttgataaattaatgcagctgactgaagagccacagaacagcatgcctgacatcatcatctggatgatccggggagagaagagactggcctatgcacgaattcccgcacatcaggtcttgtactccaccagtggtgagaatgcatctggaaaatactgtgggaaaacccaaaccatctttctgaagtatccacaggagaaaaacaacgggccaaaggtgcctgtggagttgcgagtgaacatctggctaggcttaagtgctgtggagaagaagtttaacagcttcgcagaaggaactttcaccgtctttgctgaaatgtatgaaaatcaagctctcatgtttggaaaatggggtacttctggattagtaggacgtcataagttttctgatgtcacaggaaaaataaaactcaagagggaattttttctgcctccaaaaggctgggaatgggaaggagagtggatagttgatcctgaaagaagcttgctgactgaggcagatgcaggtcacacggagttcactgatgaagtctatcagaacgagagccgctaccccgggggcgactggaagccggccgaggacacctacacggatgcgaacggcgataaagcagcatcacccagcgagttgacttgtcctccaggttgggaatgggaagatgatgcatggtcttatgacataaatcgagcggtggatgagaaaggctgggaatatggaatcaccattcctcctgatcataagcccaaatcctgggttgcagcagagaaaatgtaccacactcatagacggcgaaggctggtccgaaaacgcaagaaagatttaacacagactgcttcaagcaccgcaagggccatggaggaattgcaagaccaagagggctgggaatatgcttctctaattggctggaaatttcactggaaacaacgtagttcagataccttccgccgcagacgctggaggagaaaaatggctccttcagaaacacatggtgcagctgccatctttaaacttgaaggtgcccttggggcagacactaccgaagatggggatgagaagagcctggagaaacagaagcacagtgccaccactgtgttcggagcaaacacccccattgtttcctgcaattttgacagagtctacatctaccatctgcgctgctatgtctatcaagccagaaacctcttggctttagataaggatagcttttcagatccatatgctcatatctgtttcctccatcggagcaaaaccactgagatcatccattcaaccctgaatcccacgtgggaccaaacaattatattcgatgaagttgaaatctatggggaaccccaaacagttctacagaatccacccaaagttatcatggaactttttgacaatgaccaagtgggcaaagatgaatttttaggacgaagcattttctctcctgtggtgaaactgaactcagaaatggacatcacacccaaacttctctggcacccagtaatgaatggagacaaagcctgcggggatgttcttgtaactgcagagctgattctgaggggcaaggatggctccaaccttcccattcttccccctcaaagggcgccaaatctgtacatggtcccccaggggatcaggcctgtggtccagctcactgccattgagattctagcttggggcttaagaaatatgaaaaacttccagatggcttctatcacatcccccagtcttgttgtggagtgtggaggagaaagggtggaatcggtggtgatcaaaaaccttaagaagacacccaactttccaagttctgttctcttcatgaaagtgttcttgcccaaggaggaattgtacatgcccccactggtgatcaaggtcatcgaccacaggcagtttgggcggaagcctgtcgtcggccagtgcaccatcgagcgcctggaccgctttcgctgtgacccttatgcagggaaagaggacatcgtcccacagctcaaagcctcccttctgtctgccccaccatgccgggacatcgttatcgaaatggaagacaccaaaccattactggcttctaagctgacagaaaaggaggaagaaatcgtggactggtggagtaaattttatgcttcctcaggggaacatgaaaaatgcggacagtatattcagaaaggctattccaagctcaagatatataattgcgaactagaaaatgtagcagaatttgagggcctgacagacttctcagatacgttcaagttgtaccgaggcaagtcggatgaaaatgaagatccttctgtggttggagagtttaagggctcctttcggatctaccctctgccggatgaccccagcgtgccagcccctcccagacagtttcgggaattacctgacagcgtcccacaggaatgcacggttaggatttacattgttcgaggcttagagctccagccccaggacaacaatggcctgtgtgacccttacataaaaataacactgggcaaaaaagtcattgaagaccgagatcactacattcccaacactctcaacccagtctttggcaggatgtacgaactgagctgctacttacctcaagaaaaagacctgaaaatttctgtctatgattatgacacctttacccgggatgaaaaagtaggagaaacaattattgatctggaaaaccgattcctttcccgctttgggtcccactgcggcataccagaggagtactgtgtttctggagtcaatacctggcgagatcaactgagaccaacacagctgcttcaaaatgtcgccagattcaaaggcttcccacaacccatcctttccgaagatgggagtagaatcagatatggaggacgagactacagcttggatgaatttgaagccaacaaaatcctgcaccagcacctcggggcccctgaagagcggcttgctcttcacatcctcaggactcaggggctggtccctgagcacgtggaaacaaggactttgcacagcaccttccagcccaacatttcccagggaaaacttcagatgtgggtggatgttttccccaagagtttggggccaccaggccctcctttcaacatcacaccccggaaagccaagaaatactacctgcgtgtgatcatctggaacaccaaggacgttatcttggacgagaaaagcatcacaggagaggaaatgagtgacatctacgtcaaaggctggattcctggcaatgaagaaaacaaacagaaaacagatgtccattacagatctttggatggtgaagggaattttaactggcgatttgttttcccgtttgactaccttccagccgaacaactctgtatcgttgcgaaaaaagagcatttctggagtattgaccaaacggaatttcgaatcccacccaggctgatcattcagatatgggacaatgacaagttttctctggatgactacttgggtttcctagaacttgacttgcgtcacacgatcattcctgcaaaatcaccagagaaatgcaggttggacatgattccggacctcaaagccatgaacccccttaaagccaagacagcctccctctttgagcagaagtccatgaaaggatggtggccatgctacgcagagaaagatggcgcccgcgtaatggctgggaaagtggagatgacattggaaatcctcaacgagaaggaggccgacgagaggccagccgggaaggggcgggacgaacccaacatgaaccccaagctggacttaccaaatcgaccagaaacctccttcctctggttcaccaacccatgcaagaccatgaagttcatcgtgtggcgccgctttaagtgggtcatcatcggcttgctgttcctgcttatcctgctgctcttcgtggccgtgctcctctactctttgccgaactatttgtcaatgaagattgtaaagccaaatgtgtaa

SEQ ID NO: 4158 - DNA, 4845 bp, Homo sapiens
  SIMILAR (4)..(2943): 861254mologous to Homo sapiens fer-1 like protein 3,accession number AF207990,Smith-Waterman Score=4372.
tgggctgtatttgatggcaactactattattacttgccttgggcccacaccaagccagttgttaccctgacttcatactgggaggatattagtcatcgcctggatgcggtgaacgctctcctagctatggcagaacggctgcaaacaaatatagaagctctaaaatcagggatacaaggtaaaattcctgcaaaccagctggctgaattgtggctgaagctgatagatgaagttatagaagacacgagatacacgttgcctctcacagaaggaaaagccaacgtcacagttctcgatactcagatccgaaagctgcggtccaggtctctctcccaaatacatgaggcggctgtgaggatgaggtcggaagccacagatgtgaagtccacactggcagaaattgaggactggcttgataaattaatgcagctgactgaagagccacagaacagcatgcctgacatcatcatctggatgatccggggagagaagagactggcctatgcacgaattcccgcacatcaggtcttgtactccaccagtggtgagaatgcatctggaaaatactgtgggaaaacccaaaccatctttctgaagtatccacaggagaaaaacaacgggccaaaggtgcctgtggagttgcgagtgaacatctggctaggcttaagtgctgtggagaagaagtttaacagcttcgcagaaggaactttcaccgtctttgctgaaatgtatgaaaatcaagctctcatgtttggaaaatggggtacttctggattagtaggacgtcataagttttctgatgtcacaggaaaaataaaactcaagagggaattttttctgcctccaaaaggctgggaatgggaaggagagtggatagttgatcctgaaagaagcttgctgactgaggcagatgcaggtcacacggagttcactgatgaagtctatcagaacgagagccgctaccccgggggcgactggaagccggccgaggacacctacacggatgcgaacggcgataaagcagcatcacccagcgagttgacttgtcctccaggttgggaatgggaagatgatgcatggtcttatgacataaatcgagcggtggatgagaaaggctgggaatatggaatcaccattcctcctgatcataagcccaaatcctgggttgcagcagagaaaatgtaccacactcatagacggcgaaggctggtccgaaaacgcaagaaagatttaacacagactgcttcaagcaccgcaagggccatggaggaattgcaagaccaagagggctgggaatatgcttctctaattggctggaaatttcactggaaacaacgtagttcagataccttccgccgcagacgctggaggagaaaaatggctccttcagaaacacatggtgcagctgccatctttaaacttgaaggtgcccttggggcagacactaccgaagatggggatgagaagagcctggagaaacagaagcacagtgccaccactgtgttcggagcaaacacccccattgtttcctgcaattttgacagagactacatctaccatctgcgctgctatgtctatcaagccagaaacctcttggctttagataaggatagcttttcagatccatttgctcatatctgtttcctccatcggagcaaaaccactgagatcatccattcaaccctgaatcccacgtgggaccaaacaattatattcgatgaagttgaaatctatggggaaccccaaacagttctacagaatccacccaaagttatcatggaactttttgacaatgaccaagtgggcaaagatgaatttttaggacgaagcattttctctcctgtggtgaaactgaactcagaaatggacatcacacccaaacttctctggcacccagtaatgaatggagacaaagcctgcggggatgttcttgtaactgcagagctgattctgaggggcaaggatggctccaaccttcccattcttccccctcaaagggcgccaaatctatacatggtcccccaggggatcaggcctgtggtccagctcactgccattgagattctagcttggggcttaagaaatatgaaaaacttccagatggcttctatcacatcccccagtcttgttgtggagtgtggaggagaaagggtggaatcggtggtgatcaaaaaccttaagaagacacccaactttccaagttctgttctcttcatgaaagtgttcttgcccaaggaggaattgtacatgcccccactggtgatcaaggtcatcgaccacaggcagtttgggcggaagcctgtcgtaggccagtgcaccatcgagcgcctggatcgctttcgctgtgacccttatgcagggaaagaggacatcgtcccacagctcaaagcctcccttctgtctgccccaccatgccgggacatcgttatcgaaatggaagacaccaaaccattactggcttctaagtgcttaagcagtatgtcaacagcactcagcaaaatggcttctccagcgacagtgcatctgacagaaaaggaggaagaaatcgtggactggtggagtaaattttatgcttcctcaggggaacacgaaaaatgcggacagtatattcagaaaggctattccaagctcaagatatataattgtgaactagaaaatgtagcagaatttgagggcctgacagacttctcagatacgttcaagttgtaccgaggcaagtcggatgaaaatgaagatccttctgtggttggagagtttaagggctcctttcggatctaccctctgccggatgaccccagcgtgccagcccctcccagacagtttcggggattacctgacagcgtcccacaggaatgcacggttaggatttacattgttcgaggcttagagctccagccccaggacaacaatggcctgcgtgacccttacataaaaataacactgggcaaaaaagtcattgaagaccgagatcactacattcccaacactctcaacccagtctttggcaggatgtacgaactgagctgctacttacctcaagaaaaagacctgaaaatttctgtctatgattatgacacctttacccgggatgaaaaagtaggagaaacaattattgatctggaaaaccgattcctttcccgctttgggtcccactgcggcataccagaggagtactgtgtttctggagtcaatacctggcgagatcaactgagaccaacacagctgcttcaaaatgtcgccagattcaaaggcttcccacaacccatcctttccgaagatgggagtagaatcagatatggaggacgagactacagcttggatgaatttgaagccaacaaaatcctgcaccagcacctcggggcccctgaagagcggcttgctcttcacatcctcaggactcaggggctggtccctgagcacgtggaaacaaggactttgcacagcaccttccagcccaacatttcccagatactacctgcgtgtgatcatctggaacaccaaggacgttatcttggacgagaaaagcatcacaggagaggaaatgagtgacatctacgtcaaaggctggattcctggcaatgaagaaaacaaacagaaaacagatgtccgttacagatctttggatggtgaagggaattttaactggcgatttgttttcccgtttgactaccttccagccgaacaactctgtatcgttgcgaaaaaagagcatttctggagtattgaccaaacggaatttcgaatcccacccaggctgatcattcagatatgggacaatgacaagttttctctggatgactacttgggtttcctagaacttgacttgcgtcacacgatcattcctgcaaaatcaccagagaaatgcagattggacatgattccggacctcaaagccatgaacccccttaaagccaagacagcctccctctttgagcagaagtccatgaaaggatggtggccatgctacgcagagaaagatggcgcccgcgtaatggctgggaaagtggagatgacattggaaatcctcaacgagaaggaggccgacgagaggccagccgggaaggggcgggacgaacccaacatgaaccccaagctggacttaccaaatcgaccagaaacctccttcctctggttcaccaacccatgcaagaccatgaagttcatcgtgtggcgccgctttaagtgggtcatcatcggcttgctgttcctgcttatcctgctgctcttcgtggccgtgctcctctactctttgccgaactatttgtcaatgaagattgtaaagccaaatgtgtaacaaaggcaaaggcttcatttcaagagtcatccagcaatgagagaatcctgcctctgtagaccaacatccagtgtgattttgtgtctgagaccacaccccagtagcaggttacgccatgtcaccgagccccattgattcccagagggtcttagtcctggaaagtcaggccaacaagcaacgtttgcatcatgttatctcttaagtattaaaagttttattttctaaagtttaaatcatgtttttcaaaatatttttcaaggtggctggttccatttaaaaatcatctttttatatgtgtcttcggttctagacttcagcttttggaaattgctaaatagaattcaaaaatctctgcatcctgaggtgatatacttcatatttgtaatcaactgaaagagctgtgcattataaaatcagttagaatagttagaacaattcttatttatgcccacaaccattgctatattttgtatggatgtcataaaagtctatttaacctctgtaatgaaactaaataaaaatgtttcacctttaaaaaaaaaaaaaaaaaa

SEQ ID NO: 4159 - DNA, 2220 bp, Homo sapiens
  SIMILAR (2220)..(673): 921254mologous to Homo sapiens putative p150,accession number U93574,Smith-Waterman Score=2473.
tcacagaaggtccgaagcccccagttgtaagtgtctcttgcctcccactggcttcccatccccccactttgtgtacccccacaagagacccccaccccactgggcactgagactcccagagctcttcaaggtgggcttctttcccatgacattccagttctttgccaagtggagggggctggtgctgagccgctgaaaccatgttgttacgaccaagatatcatgggtctgatctctgtgctccctggaagggactgagtacccaaacacccatccacccttgcttgcagtctgggttgcagtcgtggtaccaagcccagaacgggcaaggtgggagagtgaagatgtgcggtcaagaaagccccagaactccctgagaccgtggacagctgaggcctgaggagtttctagaacctcagcagctgcagaggcatctgggctgattccacagcctgtcccctggagcttccaagccaatgctggaaccaggtctagactgggagccttgtaagaaactgaacgatgtaaaacgtgccaagagtgtaccattaactcgtcatttacattaggtatatctcctaatgctttccctcccccctcccccaaccccacaacaggccccagtgtatgatgttcctcttcctgtgtccaagtgttctcattgtcaattcccactgtggttttgatttgcatttctctgatggccagtgatgatgagcgttttttcatgtgtctgttggctgcataaatgtcttcttttgagaagtgtctgttcatatcctttgcccactttttgatggggttgtttgttttattcttgttaatttgtttgagttcattgtagattctggatattagccctttgtcagatgagtagattgcaaaaattttctcccattctgtaggttgcctgttcactctgatggtagtttcttttgctgtgctgaagctctttagtttaattagatcccttttgtcaattttggtttttgttgccattgcttttggtgttttagacatgaagcccttgcccatgcctatgtcctgaatggtattggctaggttttcttctagggtttttatcgtttcaggtctaacattgaagtctttaatccatcttgaattaatttttgtataaggtgtaaggaagggatccagtttcagctttctacatatggctagccagtttccccagcaccatttattagatagagaatcctttccccatttcttggttttgtcaggtttgtcaaagatcagatggttgtagatgtgtggtattatttctgagggctctgttctgttccactggtctatatctctgttttggtaccagtacagtgctgttttggttactgtagccttgtagtatagtttgaagtcaggtagcttaatgcctccagctttgttcttttggcttaggattgtcttggcaatgcgggctcttttttgattccatatgaactttaaggtagttttttccaattctgtgaagaaagtcattggtagcttgatggaggtggcattgaatctataaattaccctgggcagtatggccattttcacgatattgattcttcctatccatgagcatggaatgttcttccatttgtttgtatcctcttttatttcgttgagcagtggtttgcagttctccttgaagaggtccttcacatcccttgtaagctggattcctaggtattttattctctttgaagcaattgtgaatgggagttcactcatgatttggctctctgtttgtctgttattggtgtacaagaatgcttgtgacttttgcacattgattttgtatcctgagactttgctgaagttgcttatcagcttaaggagattttgggctgagacgatggggttttctaaatatacaatcatgtcatctgcaaacagggacaatttgacttcctcttttcctaactgagtaccctttatttctttctcctgcctgattgccctggccagaacttccaacactatgttgaataagagtggtgagagagagcatccctgtcttgtgccagttttcaaagggaatgcttccagcttttgcccattcagtatgatattggctgtgggtttgtcataaatagctcttattattttgagatacgtcccatcaatacctaatttattgagagtttttagcatgaagggttgttgaattttgtcaaaggccttttctgcatctgttgagataatcat

SEQ ID NO: 4160 - DNA, 858 bp, Homo sapiens
  SIMILAR (855)..(370): 911254mologous to Homo sapiens putative p150,accession number U93574,Smith-Waterman Score=838.
ctacatcatgtggcagacaacgagacatgctttgtatacttcattatctactattttcaaatgagatgtctgaggattagaaggttcagtgaattctcctggtatggctatgaggaatgaagtgagatctgcagagtacctggcttttcttcggtggtcaataaatggcactctcacttgactaatactgagtacaattccagttatcttgggagagactaggaaatcatgttggtgtgctgcacccattaacttgtcattcacgttaggtatatctcctaatgctatccctccaccctcgccccaccccacaacaggccccagtgtgtgatgttccccttcctgtgtccaagtgttctcattgttcaattcccacctgttcactctgatggtagattcttttgctgtgcagaagctctttagtttaattagatcccatttgtcaattttggcttttgttgccattgcttttggtgttttagacatgaagtccttgcccatgcctatgtcctgaatggtattgcctaggttttcttctagggtttttatggtttttggtctaacatttaagtctttaatccatcttgaattactttttgtataaggtgtaaggaagggatccaatttctgctttctacatagggctagccagttttcccagtaccatttgttaaataaggaatcctttccccatttcttgtttttgtcaggtttgtcaaagatcagatagttgtagatgtgtggcattatttctgagggctctgttctgttccattggtctatatctctgttttggtaccagtaccatgctgttttggttactgtagccttgtagtatagtttgaagtcaggtagcat

SEQ ID NO: 4161 - DNA, 339 bp, Homo sapiens
  SIMILAR (142)..(333): 1001254mologous to Homo sapiens fer-1 like protein 3,accession number AF207990,Smith-Waterman Score=344.
atggctgtgcttcctcttccatccaatcctcatgaccagccacagaacagcatgcctgacatcatcatctggatgatccggggagagaagagactggcctatgcacgaattcccgcacatcaggtcttgtactccaccagtggtttcctagaacttgacttgcgtcacacgatcattcctgcaaaatcaccagagaaatgcaggttggacatgattccggacctcaaagccatgaacccccttaaagccaagacagcctccctctttgagcagaagtccatgaaaggatggtggccatgctacgcagagaaagatggcgcccgcgtaatggctgtatga

SEQ ID NO: 4162 - DNA, 1584 bp, Homo sapiens
  SIMILAR (149)..(196): 1001254mologous to Homo sapiens Human secreted protein encoded by gene 3 clone HNHCT15,accession number AAB38012,Smith- Waterman Score=72.
atggatgaagctggaaaccatcattctcagcaaactaacacaggaacagaaaaccaaacaccacatgttctccctcataagtgggagttgaacaatgagaacgcatggacacaaggaggggaacatcacacactgggacctgttggaagtgttggaagttctggccagggcaatcaggcaagagaaagaaataaagatattcaattaggaaaagaggaagtcaaattggccctgtttgcagacaacatgattgtatatttagaaaaccccatcatctcagcccaaaatctccttaagctgataagcaacttcagcaaagtctcaggatacaaaatcaatgtacaaaaatcacaagcattcttatacatcaataagagacaaacagagatccaaatcatgagtgaactcccattcacaactgcttcaaagagaataaaatacctaggaacccaaattacaagggatgtgaaggacctcttcaaggaggactacaaacaactgctcaacaaaataaaagaggacacaaacaaattgaagaacattccatgctcatggataggaagaatcaatatcatgaaaatggccatactgcccaaggggccttcttgcaaaggctctaaactgcatccctatctgccactcccatctcaagtagcattagatctactgggtcatatggcccaagtggcagagcagcttgcacaggaacctggacttgttgcagagccttctcctgttctgagccccactcagaactctggcaactttccaggtcacttggatgagcaggaaatggaagcaaggcaatcacgatgcaaccaccttctagcatgttgtgttgtaaatattaatccagattatactaatgaacattcttacccaagattagacaaggaaggttcccgttctcctttcttgaaaaactgtatgcaggtactaccagtggaggctgcagaacagcaaagtttgctgcctgttccttcttctggaaccttcatcccagagggcacccaccaggttccagctggagctgtcctgtatgaggtgtctgtcaacccctgctgggaagagtctcccagtcaggaggcacaggggtcaaggacccacttaaggagagatgccatgcccagagaggaggaatctagagaggcagtctggctgcagtggctttgtggcactgcggtgagctccgcccggttcaaacttcctggaagctttgtttacactgtgaggggaaaaccacctactcaagcctcagtaatggtggatgcccttccccctgccaagcttaagtgtcccaggtcaacttcagactgctgtgctggcagtgagaatttcaagccagtggatcttagcttgctggcctctatggggagtatatttactttagggaccgggaaaaaatgtttcaaggttaccacaggggaaaaacagaattgccaatgggagaaaatcatcacaatttcttccccagaagagtgtgatgttcccattcctgtgtccccagagtgtgagtccccagagtgtgatgttccccttcctgtgtccatgtgttctcattgttcaattcccacctatgagtga

SEQ ID NO: 4163 - DNA, 735 bp, Homo sapiens
  SIMILAR (311)..(75): 791254mologous to Homo sapiens Human secreted protein sequence encoded by gene 133 SEQ ID NO:303,accession number AAB56209,Smith-Waterman Score=345.
atggttattgcggaacaggtggtgtttggttacattagtaaatcagagatttcttcttggtttggagccattgctgggagacacctcccagtaggggccgacagacacctcatacaggagagcactggctggcatctggcaggtgcccctctgggatggagcttccagaggaaggaacagacagcaatctttgctgttctgcagcctctgctggtgatacccaggcaaacagggtatggagtggacctccagcaaatgccagcagacctgcagcagaggttcctgactgttagaaggaaaactaacaaacagaaaggaatagtatcaacatcaacaaaaaggacgtcatccgaaggtcaccaacatcaaagacgaaaggtagataaattcacagagatggggagaaaccagcacaaaaaggctgaaaattccaaaaaccagaatgcctcgtctccttcaaaggatcacaactcctcgccagcaagggaacaaaactggatggagaatgagtttgacgaattgacagaagtaggcttcagaaggtcagtaataacaaactcctccaagctaaaggagcatgttctaacccaatgcaaggaagctaggaaacttgaaaaaaggttagatgaattgctaactagaaaaaccaatttagagaagaacataaatgacctgatggagctgaaaaacacagcacaagaacttggtgaagcatacacaagtatcaatagctga

SEQ ID NO: 4164 - DNA, 583 bp, Homo sapiens
  SIMILAR (253)..(579): 981254mologous to Homo sapiens myoferlin,accession number AF182317,Smith-Waterman Score=578.
tttttttttttttttttcattagtaaatgcctaggaatgcaatctctagatcatagaataggtggctacttaactccaaaagaaactaccagacattttccaaagtgattgtatctgtctacactcccgccagcgatttgggagttccggtcgccccatccacaacctcaggcccacttgatactgtcagcccttttgattttagaccttacctgcattttaatgagaaattaagactctgttggtggttttcagatatataattgtgaactagaaaatgtagcagaatttgagggcctgacagacttctcagatacgttcaagttgtaccgaggcaagtcggatgaaaatgaagatccttctgtggttggagagtttaagggctcctttcggatctaccctctgccggatgaccccagcgtgccagcccctcccagacagtttcgggaattacctgacagcgtcccacaggaatgcacggttaggatttacattgttcgaggcttagagctccagccccaggacaacaatggcctgtgtgacccttacataaaaataacactgggcaaaaaagtcctcgtgc

SEQ ID NO: 4165 - DNA, 1221 bp, Homo sapiens
  SIMILAR (1)..(423): 891254mologous to Homo sapiens putative p150,accession number U93564,Smith-Waterman Score=668.
atgggcaaggacttcatgactaaaacaccaaaagcaatggcaacaaaagccaaaattgacaaatgggatgtaattaaactaaagagcttctgcacagcaaaagaaaccaccatcagagtgaacaggcaacctacagaatgggagaaattttttgcaacctactcatctgacaaagggctaatatccagaatccacaaagaactcacacaaatttacaagaaaaaaacaaacaaccccatcaaaaagtgggcaaaggatatgaacagacacttctcaaaagaagacatttatgcagccaacaaacacatggaaaaatgcccatcatcactggccatcaaagaaatgcaaatcaaaaccacaatgagataccacctgatgccagttagaatggcaatcattaaaaagtcaggaaaaaacaggtgggaattgaacaatgagaacacttggacacaggaaggggaacatcacacactggggcctgttgtggggtgggggaaagggggagggaaagcattaggagatacacctaatgtaaatgacgagttaatggccttctcaactacgcggcccaccttcttccctcgttctgaccccactacaacaaggcccatggcggtgccacctcacgaggagaaggacgatcaccttgagacccatcggcctctgaggccacggaccacgctgccccatgctccagacggccgctggctcctcctcacactcactcacacttcaacccctgggaagactggcctgcggacctaccggccgtgtctcagtaggacagaaaaagtccagacagcaggagcgcgaccctcacaccctcacagctccgccgcgttcaccacgtgggcaaaggggccgacgggaagacgcccagggcacatgcgcagtgagtcagcaacacagaaagaagtcacgatgtctccttgcacagctctgcggggacagaaggcagacagcaaggcacatggacaacaagggacttgggcagcaaggggcatgcacactgagtcaggcacatgcaaggccagccgcggttttccctctctcctctcaccccggactcgcatccctaaggtgtttgtagcagaaagaaagggactaagaggctttgttctctctcttaccctaccattctcatgcatccagaaacactgggaacagacagtccccatgtcaccattagtggaggatgtgtctgagaaagaccttttgtga

SEQ ID NO: 4166 - DNA, 357 bp, Homo sapiens
  SIMILAR (112)..(243): 841254mologous to Homo sapiens Human secreted protein, SEQ ID NO: 7217,accession number AAG03136,Smith-Waterman Score=188.
ttaggaagaagctcgggggtctccttgtaacgtcttctttttcatattaacgggggtaatatagttagaagcttctaagttttctttagtaccgacaggccccagtgtgtgatgttcccctccctgtgtccatgtgttctcattgttcaactcccacttatgactgagaacatgtggtgtttggttttctgttcctgtgttagtttgctgagaatgatggcttccagcttcaaccatgtccctttccagatgctgctgcctagaatttcccctcctgctaaaccaggaaaatggctcctcctccttgaagagcctaatccagtatttcttaaccgtgaagcctttcctaactaccat

SEQ ID NO: 4167 - DNA, 495 bp, Homo sapiens
  SIMILAR (443)..(381): 901254mologous to Homo sapiens Human secreted protein, SEQ ID NO: 6834,accession number AAG02753,Smith-Waterman Score=96.
ctacaatgcctggcaggcaacggggacacagcctttactaacaggcagttgaggaagactcagtgacaccgtcacagttgctggctccagtgccacacctgaaatgtgagcaccagaacaacacctggacgttgctatgaactgggacctgtgttgaggaactctcagagctagcctcagttctttggaaatgtgcttggtcaccttctctatagttttctcggcccattccagtgtgatgaaaatattaggtatttgtcctaatgctctccctcctcttgccccccatgcaccaacaggccccagtatgtgatgttccccagcctgtgtccatgtgttctcatggttcaactcccacctatgagtgagaacatgtggtgtttggttttctgttcctgtgatagtttgctgaggatgatggtttccagcttcatccatgtcccttaccgtttttgttattgtaaccttgttgtatattttgaagtcagatgtcat

SEQ ID NO: 4168 - DNA, 399 bp, Homo sapiens
  SIMILAR (243)..(145): 871254mologous to Homo sapiens PRO1546,accession number AF116638,Smith-Waterman Score=175.
tcaagtcttgtcatcaacatgtagtttctgcttttccttgtgcttgcctgaaggcttttctaatagctgcatactagaaagagtgttttcaactgtgtaaagctctttctccattgcatttcctctgtcttgataaatcagctctatgacaggccctggtgtgtgatgttccccactctgtgtccaagtgttttcattgttcaattcccacctatgagtgagaacatgtggtgtttggttttctgtccttgcgatactttgctgagaatgatggtttccagcttcatccatgtccctcccgaaaggcacaagtccaaacatcatgacactaggggttagtgctccaacatgtgagtttggaggagacacaaacattaagtacagaagatactgcggcat

SEQ ID NO: 4169 - DNA, 431 bp, Homo sapiens
  SIMILAR (119)..(232): 891254mologous to Homo sapiens PRO1546,accession number AF116638,Smith-Waterman Score=200.
ccaagtattcggttccatagtaagaatacatcagggggaatggtttcctcttctttatggcatactgcttcccagagtccagaattgcctgacaaattgacttgatctgtgctggagtcagcaccaaacaccacatgttctcactcataggtgggaattgaacaatgagaacacttggacacaggaaggggaacatcacacactggggcctgttgtggggtggggcgagggtggagggatagcattaggagatatacctaacgtgaatgacaagttaatgggtgcagcacaccaacatgatttcctagtctctcccaagataactggaattgtactcagtattagtcaagtgagagtgccatttattgaccaccgaagaaaagccaggtactctgcagatctcacttcattcctcatagccataccaggag

SEQ ID NO: 4170 - DNA, 1302 bp, Homo sapiens
  SIMILAR (1302)..(355): 891254mologous to Homo sapiens putative p150,accession number U93564,Smith-Waterman Score=1506.
tcacacaacttccaatccactgtctccactgtgatgtataataggcatctcacatttaaccagttcaaaactgaattcctggttttcctcctgagacatgcgctcttcactttcttccccatttctgtaaatggcaaccacagtcttccagttactcaagcaaagagcattgagccatttttcactcctctttctcacacccacatccaatttatcaggaaatctgttggcttgcccgtcatttacattcggtatatctcctaatgctatccctccacgctccccccaccccatgacaggccccggtgtgtgatgttccccttcctgtgtccaagtgttctcattgttcaattcccacctgctgtttcctgactttttaatgattgccattctaactggtgtgagatggtatctcatagtggttttgatttgcatttctctgatggccagtgatggtgagcaattttttcatgtgtttcttggcctgcataaatgtcttcttttgagaaagtgtctgttcatatcctttgcccactttttgatggggttgtttgtttttttcttgtaaatttgtttgagttctttgtagattctggatattagccctttgtcagatgagcagattgcaaaaattttctcccattctgtaggttgcctgtttactctgatggtagtttcttttgctgtgcagaagctctttagtttaattagatcccatttgtcaactttggcttttgttgccattgcttttggtgttttagacatgaagtccttgcccatgcctatgtcctgaatggtattgcctaggttttcctctagggtttttatggttttaggtctaacatgtaagtctttaatccatcttgaattaagttttgtataaggtgtaaggaagggatccagtttcagctttctacatatggctagccagttttcccagcaccatttattaaatagggaatcctttccccattgcttgtttttgtcaggtttgtcaaagatcagatagttgtagatgtgtgttattatttctgagggctctgttctgttccattggtctatatctctgttttggtaccagtaccatgctgttttggttactatagccttgtagtatagtttgaagtcaggtagcgtgatgcctccagctttgttcttttggcttaggattgtcttggcaatgcgggcccttttttggttccacatgaactttaaagttttttccaattctgtgaagaaagtcactggtagcttgatggggatggcattgaatctataaattaccttgggcagtatggccat

SEQ ID NO: 4171 - DNA, 2861 bp, Homo sapiens
  SIMILAR (16)..(183): 981254mologous to Homo sapiens myoferlin,accession number AF182316,Smith-Waterman Score=288.
atgttggaagacagagatggggaagaagatgaaggtgatgaagacaggttggacaatgcagtcaggggccctgggcccaaggggccagttgggacggtgtcggaagctcagcttgctcggaggctcaccaaagtaaagaacagccggcggatgctgtcaaataagccacaggacttccaggtagcaacggcctggcgttctgcttctttgtttaatctttatattgcccatcttctggcaattgcagtgatgtttcagtggacctattccaatggacaatggctcaaccggccggctttgaatgatttcatccctacagctgctcttggtctctataacccaaccccagttcccatcttgggaatgaccctaggtggctccacccaattggtagcacctggtatagcacaaagctgccctggcctggtgttagcaatcctaataggtgaaggaaatgaagcaacacctgaggatcctaaggatcccacgtgctgggaaaggttgggtaaccatcccccttctgtgctgcagatccgcgtccgagtgattgagggccgacagttaagtggtaacaacataaggcctgtggtcaaagttcacgtctgtggccagacacaccgaacaagaatcaagagaggaaacaaccctttttttgatgaggttctgtggcttcaaccaggtgaccacacccctgcttcatactcaagagctggactcaacgactaccacaactgctgcaagaataaaatgcagggtgttgttctcactcataagtgggaattgaacaatgagaacacttggacacaggatggggaacatcacacactggggcctgttgtgggactctggcctcaatgcctcactgacccggagggctttggtgaggagacctgggcttccactcagccctttgcaggtgttacctgcaaagccctctacctcctccactttactcccacagccattgggagtcactgtctagaccattgtttctcggacttcctgggtattaagaattaccgaaaggaaaaagtcggactcagggatctgggaatctgcagacgccctggtgagggacgtctggggaagcacattctgagaaatgttttgggagacgatgcggaggccgaattaattggcacggcgactgtagccctgaaggacctgactggtgaccagagcagatccctgccgtacaagctgatctccctgctaaatgaaaaagggcaagatactgggatatataattgtgaactagaaaatgtagcagaatttgagggcctgacagacttctcagatacgttcaagttgtaccgaggcaagtcggatgaaaatgaagatccttctgtggttggagagtttaagggaaaacttcagatgtgggtggatgttttccccaagagtttggggccaccaggccctcctttcaaacatcacaccccggaaagccaagaaatactacctgcgtgtgatcatttggaacaccaaggacgttatcttggccgagaaaagcatcacaggagaggaaatgagtgacatctacgtcaaaggcttggattcctggcaatgaagaaaacaaacagaaaacagatgtccattacagatctttggatggtgaagggaattttaactggcgatttgttttcccgtttgactaccttccagccgaacaactctgtatcgttgcgaaaaaagagcatttctggagtattgaccaaacggaatttcgaatcccacccagggctgatcattcagatatggggacaatgacaagttttctctgggatgactacttggggtttcctaggaacttgactttgcgtcacacgattcatttcctgcaaaaatcaccaggaggaaattgcagggtttggacatgatttccgggaccttcaaagccatgaacccccttaaagccaagacagccttcctctttgagcagaagtttatgaattgatggtggccatgctacgcagagaaagatggcgcccgcgtaatggctgggaaagtggagatgacattggaaatcctcaacgagaaggaggccgacgagaggccagccgggaaggggcgggacgaacccaacatgaaccccaagctggacttaccaaatcgaccagaaacctccttcctctggttcaccaacccattgcaagaccatgaaagttcatcgtgtggcgcggcttttggtgggtcatcatcggctttgctgttcctgcttatcctgctgctcttcgtgggccgtgctcctcttactcttttgccgaactattttgttcaatggaagattgtaaagccaaatgtgttaacaaagggcaaaggcttcatttcaagagtcatccagcaatgagagaatcctgcctctgtagaccaacatccagtgtgattttgtgtctgagaccacaccccagtagcaggttacgccatgtcaccgagccccattgattcccagagggtcttagtcctgggaaagtcaggccaacaaggcaacgtttggcattcatgtttatctctttaaggtatttaaaagttttatttttctaaagttttaaattcatgtttttcaaaatatttttcaaggtgggcgggtccccatttaaaaatcatctttttatatgtgtcttcggttctagacttcagcttttggaaattgctaaatagaattcaaaaatctctgcatcctgaggtgatatacttcatatttgtaatcaactgaaagagctgtgcattataaaatcagttagaatagttagaacaattcttatttatgcccacaaccattgctatattttgtatggatgtcataaaagtctatttaacctctgtaatgaaactaaataaaaatgtttcacctttaaaaa

SEQ ID NO: 4172 - DNA, 396 bp, Homo sapiens
  SIMILAR (3)..(122): 971254mologous to Homo sapiens Similar to RIKEN cDNA 2310004N11 gene,accession number BC005169,Smith-Waterman Score=204.
  misc_feature (1)...(396): n = a,t,c or g
cggaggagtgctcccagtacgagtttgagaactacatgcgtcagcagctgctgctggccgaggagaagagctccatccatgacgcccggagctgggtacccaagcggcagttcggctgggccacgacgcacagcccatgacctccttggacacggccatcctggcgcagcgctacctgcggaaataacagcctcagccggggccaccagcactgctgccacttcttccagccccagccaaaggcgtggctgtcagggctgggccctgtagtgctggactctcccgggccacaatagggacagggcagggacagggacagcccaggtcacacgtggggtcagcagaggtaccacgaagctaccttttgggatgattgctcgattgtttggtttttan

SEQ ID NO: 4173 - DNA, 373 bp, Homo sapiens
  misc_feature (1)...(373): n = a,t,c or g
ccataccaacttctctcccatctntaggtggctcagtccatggccactccctgcccccagcctggttggacagcaaggaatccacagcccacacgtgagctccctcctcacccccaggcagggaagcccttcctgccagtccctgtcccctttcagcccaccagtccctctctgctgccggtgatgggaggcctttctagacctggctctttctctcccgtctcagtggcttctttgaggtgctgcacacactgagagaagtcctattgtaaagaaacggaaaaagtcacaaaaaagtttgtataaagacatatttttgtactacatggggactcttcctgcatgtcagcaataaaaaaaaatgatttggaaa

SEQ ID NO: 4174 - DNA, 1752 bp, Homo sapiens
tttttttttttgagactccataatcagatttattttcctctaataagacagtttagcatctccgagttttgcattctacagtcttacaaactttagttattagcatcagagacacaaaaacattgccagaccctcaaaacacaaataaataccaaataagaaccacaccataatataccaatacaacaacaacgtagaaaacagtatatgctatcaggacagtcaggcatggcttgctaagctcacagtaacaacatgcattattggctgggcaataactcacggctctttttatctttttcttagaagagcggaaaacaggacccaaatcactggtcacaaaatcacttggactgtcaagatgtgtcttcacagcaagcggctactacagacgcaacttttaaaacaggcagattaaaaaagacagggtcaaatgagagattggccttctttggtctttgtttttgggtaacagaaccgaacagaggcaccggcagagaagaggctgcgaatctgcagatgctgtgcagcgtcgacactgccctccacacttcacagaccttctcctacaggcatttcttacagaaatcaccggacatcatgccagcttgtgtgttttccaattaagtcattgaatttgctgttggagggtatcttacttgtctgaggggactaagttgtcaaatccagtcatcacctaattacaggagcggtacagcgatcctggacttctagcctcttttcacggtgagagttcacaagacagactagacacagtgcagcaggagaaatgaaacgcaggctctgcttcgccaccggggcctcctcaccccaacacctgccagccccgagacggccgaggcttcacacgtctgccctgccaccgcatgtggggcacaccagggatcaggtggaaaatgcccttgcagtgagctgctggccccgcctcacgccgcctgatggcccggctccctaatgccaccgtgcctgtgaccatcagcatcagcctggacgaggcagcaataatgaccaggtagcctgccgacactgacctcgcctggctaggaccccggtgcgcacattctactttggagaaaacagagctactgagatttgcaaacggaaaacagaactatggtcatgggctgagaagtagatttgggtgacagaccctcattcacctcacagatacaaaagcaatggggcttcccccactctccctagctctccttctgcagtctaataagtaaagatctggactaaaatttttaaaaaaacagtattttacagctctgccagagcccttctgacacacaaattacccccagtagagggaggagtctgggagggccggggattgagcaaggggcccgcaaggggagtctgcacccgcccaatcctgcacgggcccaagaagacagtggcactgccaccctactggggctgtgcacagggtgacggtcctcaggccaatcctccccgtgcaggggagaaaggaggtgtcagcccagctgttgggatcagtgtactccccggccctcccttgggctgacaaggaatgaccccgctgcggacagaatggtcgtttaaggacccatccagactccccttcctttgtccaacatcacctctggctgtaggatgtgggtccaccatgctgactaccaccagacgccatcaagcaaaaggggtgctggaatgtgacgttggcatggtcgacatccatgggacaccgttgcccctggcccaggg

SEQ ID NO: 4175 - DNA, 1603 bp, Homo sapiens
  SIMILAR (1010)..(1597): 771254mologous to Homo sapiens putative p150,accession number U93564,Smith-Waterman Score=774.
cagcattactcacaatagccaaaaggtagaaaccaccaaatgtccacgaatggatgaatggataaacaaaagacagtatatccatacaatggaatattattcagccttaaaaaggaaggaaagtctgttacatgctgactctgaaaacattatgctaagtgaaagaagccagacacaaaaggacaaaagtgccattgccaagatttataagaagaaagtcaattcagctaaagaggtgctaaataaagagcccaagagaagatctgaaggtagtcgttcaaacccgctcctgcagaagttaaaattaaatcataaacaaaaggcaaatggcacctggaacaccagcaagtcagaaccgttcactcccctggaaagggggctgaagccagggagccaaatggtatggctcgttgggtcccacccccatagagcccagcaaactaagatccactggcttgaaattcttgctgccagcacagcagcagtctgggatcgacctggggtgcttgagctcgagcacctgggggaaggggcagctgttaggcgcagcttcagcagacttaaacgtccctgcctgacagctctaaagagagcagtggacctcccagcacagcgttcgagctctgctaagggtcagactgcttcctcaagtgggtccctgatccccgtgtatcctgactgggagacacctcccagtcacaaacatcgaagaccaaaggtagataaatccacaaaaatggggagaaaccagcgcaaaaaggctgaaaattccaaaaacaagaatgcttcttttcctccaaaggatctcaactcctcgccagcaagggaacaaaactggatggagaatgagtttgatgaattgacagaagtaggcttcaaaatgtgggtaataacaaactcctccgagctaaaggagcatgttctaacccaatgcaaggaagctaagaaccttgaaaaaaggttagatgaattgctaactagaataaacagtttagagaagaacataaatgacctgatggagctgaaaaacacagcatgggaacttcgtgaagtatacacaacacgtcatcacacttattctaaaattgacaacataattggaagtaaaacactcctcagcaaatgcaaaagaacggaaatcaaaacaaacagtctcccagaccacagtgcaagcaaattagaactcaggattaagaaactcactaaaaactgcacgactacacagaaactgaacaacctgctcctgaatgactgctgggtaaataacgacatgaaggcagaaataaagatgttctttgaaaccaatgagaacaaagacacaacgtaccacaatctctgggacacatttaaagcagtgtgtagagggaaatttatagcactaaatgcccaaaagagaaagcaggaaagatctaaaactgacaccctaacatcaaaattaaaagaactagagaagcaacagcaaacaaattcaaaagctagcagaagacaagaaataactaagatcagaacagaaccgaaggagatagagacacaaaaaacccttcaaaaaatcaatgaatccaggagctggatttttgaaaagatcaacaaaatagaccactag

SEQ ID NO: 4176 - DNA, 2655 bp, Homo sapiens
  SIMILAR (3)..(467): 981254mologous to Homo sapiens Similar to RIKEN cDNA 2310004N11 gene,accession number BC005169,Smith-Waterman Score=760.
acagcatcccgcaggagctcttccgcaagatcaaggctgccgagtatttcattcctgttgatggacgggtttctgagaacaccgtgtgtctcatacggaagctgctggtccttgacccccagcagcgcctggccgccgccgacgtcctggaggccctcagtgccatcattgcatcatggcagtccctgtcatctctgagtgggcctttgcaagtggttcctgacattgatgaccaaatgagcaatgcggatagctcccaggaggcgaaggtgacggaggagtgctcccagtacgagtttgagaactacatgcgtcagcagctgctgctggccgaggagaagagctccatccatgacgcccggagctgggtacccaagcggcagttcggcagcgcaccaccggtgcgacggctgggccacgacgcacagcccatgacctccttggacacggccatcctggcgcagcgcctacctgcggaaataacagcctcagccggggcccacccagcactgctgcccacttccttcccagcccccagccaaaggcgtggctgtcagggctgggccctgtagtgctggactctcccgggccacgatagggacagggcagggacagggacagcccaggtcacacgtggggtcagcagaggtaccacgaagctaccttttggggatgattgctcgattgtttggtttttaaatctgagaagcctagataactaattctgcttttaatcacgatgttttaatctacctctgtctctttaaccatgctgtctctggactgagcaagagggaggagggagcctgctcaccccactccagggccttccccagcggccaccaactgacctggggcgctgctccccacagtccaaataagctgaaagtgcagctcgctgcaggccccagagcgagcttcccctcctccctgctctcccaggcccctgccacagcctctttccgtccctctctttctgatccaggcccctcagtccaagctttggaaaaccttcacctcatcttaaaccgaactcaaatatatttatttttttaccataccaacttctctcccatctctaggtggctcagtccatggccactccctgcccccagcctggctggacagcaaggaatccacagcccacacgtgagctccctcctcacccccaggcagggaagcccctcctgccagtccctgtcccctttcagcccaccagtccctctctgctgccggtgatgggaggcctttctagacctggctctttctctcccgtctcagtggcttctctgaggtgctgtacacgcgcgttaacctgttcccttctctatccttccccgtggtactgagctcacgtggactcccagtgcgaaagggcccatgggttgggctgcaggcctggccgcgagcggcggctgtctgcacagctcccgctagcctactcttgtgtttaggggatggtgggaacatatcccagtgcccttgcctcataatagatgtggtgactctcccggtagaccctagcaagggtcctccatggtggtgagggactcaggagaattgtagggattgggggaccctggcctgcctgggtttgagaacaagccctgttgccctttttgagccgagattttgaagtggaatgcccgtcttgccagaaatgctgttctcacgcagaatgccccctccccttgcccttactggacttggccctgcctgatgccaagcaaagacccttacccagaggcctaccccccatatgtcctcagagaggctgagtgtcccctccaggcagtcatgggccctgaggcccctcctgcctggccctgctccccagtggggaggtgactgtgtttcccagagtgtgagccgctctcctccccctaagaagctgactcactgtgagtgaccttgggcaagttcccaaacctccttgtgcctcagtttccccatctggaaaaaatggggccacctcttgccagcagtagcagggctgcccacgcccctttctccccatgccccatccagcacttgggcgactcatgcctctgcctcagtgggccctgtgggagcctactggaagcccagcacttactccccctgaagcaagcgaagcctgcgtcatgtctcagctgtccagccgctgagggccaagggtcttgtgctggtggggctgggggatgccctcttttctatatttatttcatagaaagtctcctgcgggagcggaaatgcagtccggcctagggctcccaagcccttgacctgtcctcctgtgagggcctgaagctgggccagggcccgtcgcagcggagcccccttctcaagaagtcaaactggtcccttccgggcggttgcccgtgcgtggtctttctccttcttttcaaagcaatagccgccggggtctgcaaagccctgtcagacagactgggccctttccaaaggtcaagccatgtgtctgatgaaattcctggttgaagaaagagaagaaggatgggtcagccctcactgggtgtcacacactgagagaagtcctattgtaaagaaacggaaaaagtcacaaaaaagtttgtataaagacatatttttgtactacatggggactcttcctgcatgtcagcaataaaacttcctgatctggaaaaaaaaaaaaaa

SEQ ID NO: 4177 - DNA, 1192 bp, Homo sapiens
  SIMILAR (149)..(541): 471254mologous to Homo sapiens put. ribosomal protein L3 (AA 1 - 348),accession number X06323,Smith-Waterman Score=236.
gatttcccccgacaaagcagttaaaatcttaatataacaggaaaatgcggaattagcccagcacccctctcaatgctggctcacttcgttccaggacagtatgtgatgtcacaaccaaaactatgtgtaaaggtttccaaggtgtcatgaaaagatggggattaaaggcccagccctgctacgcatggccaatcgaaaagcacaggaagacctggagcctgttgcaactggtgatattggcagagtctggcctggaactaaaatgcctggaaaatggggaaacatatacaggcaagaatatgggactgaaagtgtggagaataaacacaaagccccccataatcctatgttaaatggtctggacctggaccataaaaatggcttaggtaaaggtcaaaagattttaaactgccggccatttaaggatctcggtaaaaatctacccatcccctacatatttttcctggagggagatgaagggggaactgcccagaagattggtatggatgaaaaacgtgtgtccagtcccggtgcgccctccaattaacatttgccctaacatcctttgggacgtgggcagaacccttacatattcctgtgagcctccgatgagcccagagtgatatccataacccacccagaaatccatactctccctttccttagtcacaacaaaaatcacacatgtcatctttggccaggggcataaatatatccattcatacccccattaaattttgttagaaaaattaccccacattaaatatatgagttaagtaggattggatttgcctgaaattggtgttgggccatattagcaaaatattccttaatttgtggactcgattccttttttacctacatatttccccaagttatccttaagatgtcctgtaaatttaacttttattaaagttttgtcaatctttgtgaaatagtggttgtggaacagtagaaaaccatatggggactatagtgcaacctatttgggtaaagaaaccatttgcttaaaatgggagaaataaattggatttttaatttaaaataacaggaaccatttttaaagccccggacaaaggaaagacaataaaatcataaattatcggtcctgtttacatttttgttgggagaggtgattactttttagttttatcactcaattataagatcagggggttttgttttggtttgt

SEQ ID NO: 4178 - DNA, 322 bp, Homo sapiens
  misc_feature (1)...(322): n = a,t,c or g
actctttggttatttacccaaatgagttgacaatatgtccacaaaaaaaccctgcacgtggatatttacattagctttatgcataactgccagaacttggaagcaaccaagatgtcctttagtaggtaaatggataaactgtgctgcatatagaaaatgaaatattactcagattttaaaaagagctgtcaagccatgaaaagnnnnnnnnnnnnnnnnnnnnnnnnnnnnnnnnnnnnnnnnnnnnnnnnnnnnnnnnnnnnnnnnnnnnnnnnnnnnnnnnnnnnnnnnnnnnnnnnnnnnnnnnnnnnntgaatgtaaa

SEQ ID NO: 4179 - DNA, 621 bp, Homo sapiens
  SIMILAR (177)..(344): 671254mologous to Homo sapiens PRO2550,accession number AF130089,Smith-Waterman Score=163.
ttttttttcttttttttgagatggagtttcactcttgttgcctgagcttgagtgcagtggcgcgatctcaactcactgcaacctccgcctcccaggttcaagagattctcctgcctcagcctcccgagtagctgggattataggcgtgcatcaccatgctcagctaattttttggattttcttttttagtagaaacaaggtttcaccatgtttgccaggctggtcttgaactcctgatgtcaggtgatctgcctgcctcggcctcccaaagtgctgggattataggtgtgagccactgtgcccggccattggcttctttgtttttaattcacatattcaacaaatgtatttcaggtgtcaggctctgctctaggccttggagatacagtgctgctcagaaaagtctggatcttgcctactaataatctaaatctagcaagagagacaaacattaatcaaattctccccaaaatgaaagtaaaattacagacatgataaacattagaaagagaaaatatgtcacaggcaggcatgacctagaagggtgccaggaagacattcctaaggaagtcaggctggagtcgaggcctgacatggaggaggaggggagggagcctctca

SEQ ID NO: 4180 - DNA, 522 bp, Homo sapiens
  SIMILAR (126)..(284): 771254mologous to Homo sapiens Human myelin oligodendrocyte glycoprotein gene,accession number AAZ29204,Smith-Waterman Score= 216.
agacggatcttgctttgttgcccagactggagtgcagtggcacaatctcggctcactgcaacctctgcctcccaggttcaagtgattctcctgtctcagtctcccaagtagctgggacttgcgccaggtgcacaccaccacacccagctaatttttgtatttttagtataaccggggtttcacgatgttggccaggctggtcttgaactcctgacctcaggtgatccacccaccttggccacccgaagtgttgggattacaggtgtgagccactgcgcccggcctggaagtatttataagcagaggttggataagaaattgaggagttctgtagcagccaggacaaacagatgcccactatggtctcttccaatttgaattaagacagttcatgtgctgacaagggcctaagctgaagaagtctaaattccttgagggctaagaaatatatatcatgcctcaaatcttggaatgtggcagggaagagacagaccaatcctatattttcacaacatttcagcc

SEQ ID NO: 4181 - DNA, 870 bp, Homo sapiens
  SIMILAR (50)..(244): 671254mologous to Homo sapiens Human secreted protein, SEQ ID NO: 7870,accession number AAG03789,Smith-Waterman Score=215.
cgtcgacttttcttttcttttttgagacaaagtcttgttctggtcatccaggctggagtgcaatggggcgatctcggctcactgcgacctctgcccgctgggttcaagcgattctcctgtctcagcctcccaagtggctaggattacaggcacgggcccccacgcctggctaatttttggatttttactagagaggggatgttgccatgttggcgaggctagtctctaactcctgacctcagggtgatccgcccgcctcggcctcccaaagttctggggattacagggcatgagccactgcgcctggggctgaaatttggtaaaattttgggtttatgaataaggatgacctactgttactactaggagatgtcaaaagatgttattaaatatactcattttcttttccacagtcatatttagaggacgaaagttttcatttaaaaatatttcacggtaatagtagagattttttaaactagcatcatttttttctcctgcagatatcacccacccagcacttctaatggcgctgaatctaaatgcttacatgtaagttatctcctaattagctatgatttctcattagaggtgagatttaacatttgccaaaagaaaaataaattccaattttgaacgtttatcttttgtccttttctttgatagaaaggacactgaaatctaagtttctgatttaaaaaaatagtaacaaaaaaagttatggcccgtggatcacatgcttcacactgtcccacattgttccctccatcgctctgccctctctcacagctaatcttcagatactcattctcatactaagatcctcctacagcttatcctattcaaattctttatttctgaaccacatcc

SEQ ID NO: 4182 - DNA, 506 bp, Homo sapiens
  SIMILAR (154)..(279): 831254mologous to Homo sapiens PRO1722,accession number AF119851,Smith-Waterman Score=175.
  misc_feature (1)...(506): n = a,t,c or g
tggagacagagacttgctctgttgcccaggctggagtgcagtggccaattctcagctcactgcaacctctgcctcccaggnttaagcgattctcctgcctcagcctcctgaatagctgggattataggtgcctgccaccacacgcagctaatttttgtatttttagtagaaacggggttcccccatgttggccagtctggtctcaaactcctgacctcaggtgatctgcccacttcaggctcccaaagtgctgggattacaggggtgagccactgcacctgggctgggaagtcatatattttttaaatatctcaatttatccttcctagtgccttttatgttattctgggcctaatattctaatattgtccttctaatttaactccacaagactttatcattgtttatacagtgttcatttacatctatccacatatcaccttttttttctcttctttcattcttgtatctcagatgacctgagatacaagaatgaaagaagagaa

SEQ ID NO: 4183 - DNA, 485 bp, Homo sapiens
  SIMILAR (198)..(485): 1001254mologous to Homo sapiens ornithine decarboxylase antizyme,accession number D87914,Smith-Waterman Score=488.
gcgcggagagacgcagcggaggttttcctggtttcggaccccagcggccggatggtgaaattctccctgcagcggatcctcaatagccactgcttcgccagagagaaggaaggggataaacccagcgccaccatccacgccagccgcaccatgccgctcctaagcctgcacagccgcggcggcagcagcagtgagaggatgatcggctgaatgtaacagaggaactaacgtccaacgacaagacgaggattctcaacgtccagtccaggctcacagacgccaaacgcattaactggcgaacagtgctgagtggcggcagcctctacatcgagatcccgggcggcgcgctgcccgaggggagcaaggacagctttgcagttctcctggagttcgctgaggagcagctgcgagccgaccatgtcttcatttgcttccacaagaaccgcgaggacagagccgccttgctccgaaccttcagctttttg

SEQ ID NO: 4184 - DNA, 644 bp, Homo sapiens
  SIMILAR (582)..(424): 961254mologous to Homo sapiens ornithine decarboxylase antizyme,accession number D87914,Smith-Waterman Score=263.
  misc_feature (1)...(644): n = a,t,c or g
ttcggagtgagcgtttatttgcacgattacaacatgcggacaaacccaggcgagatgagcgagtctacggttcctacccacccggctgacaaggggtggccccaggggccggatgcccagccccgaggcggccctactcctcctcctctcccgaagactctctctcgaacgtgtaggcccatgaagcaagcgtcgggtctcttggggacaaggggatgccccggtctcacaatctcaaagcccaaaaagctgaaggttcggagcaaggcggctgcgggggagaagccgtcagaacccctgccgaccagaaccccccgcccgcaccccccacccccgcagggagaccgtgcctgcgggctgagaatgaaggggcggcgcaggcacccccacgcaccctactgcaggcgatacgggtcacctacctctgtcctcgcggttcttgtggaagcaaatgaagacatggtcggctcgcagctgctcctcagcgaactccaggagaactggcaagctgtccttgctcccctcgggcagcgcgccgcccgggatctcgatgtagaggctgccgccactcagcactgttcgccgaattccncgncnctgcctagggatctcgataggntctcgattnncccccctnnggcccg

SEQ ID NO: 4185 - DNA, 1251 bp, Homo sapiens
  SIMILAR (1)..(156): 961254mologous to Homo sapiens ornithine decarboxylase antizyme,accession number D87914,Smith-Waterman Score=249.
atggtgaaatcctccctgcagcggatcctcaatagccactgcttcgccagagagaaggaaggggataaacccagcgccaccatccacgccagccgcaccatgccgctcctaagcctgcacagccgcggcggcagcagcagtgagagcgagtcggtctggatggcccgggacgcgccgggcgaggccgcgcacgtagacggcacccagggcttctccgcgggggccgccggggagctgggggtggcgcactccgacagcccggcagcgccctgggaagacccccgccgcttcccgggaagacgcgtcccgcttccgggggcgcgggtgccagctgcggttgtgggggagcccgcggggtctcggtcgagctttcccgactgcgtcccccgaggtgggcgtcgctcagccccggatcgggaggatgatcggctgaatgttaacagagggaactaacgttccaaccgacaagacggaggattcttcaacgtccagttccaggcttcacagaagcccaaacggcattaaattggcgaaacaattgctgaagtggcggcagcctctttaacataaagcccgcgggcgggcgccgctggcccgaggggagcaaaggacagcttttgcagtttctcctggagttcgctgaaggaagcagctgcgagccgaccatgttcttcattttgctcccacaagaaccgcgagggacagatcctgccttgctccgaaactttcagcttttttgggcttgaagattttgaagaccggggcatcccccttgtccccaaagagacccccgacgcttgcttcatggccttacaacgttcgagagagagtcttccgggagaggaggaggaagtaggggcccgcctccggggctgggcaattcccccgccctggggccacccctttgtcagccgggtgggtaggaaccgtagactcgctcatctcgcctgggtttgtccgcatgttgtaatcgtgcaaataaacgctcactcccaataaacgggggattttctgaaaggtttaatattgtggttggtgatactgaagtatttggctttaaattctaaataaaaatttatattttacttttttaattgctgggtttaagatgattcagattatccttgtactttgaggagaagtttcttatttggagtcttttggaaacagtcttagtcttttaacttggaaagatgaggtattaatcccctccattgctctccaaaagccgaataaagtgattacaccccg

SEQ ID NO: 4186 - DNA, 2223 bp, Homo sapiens
  SIMILAR (77)..(898): 561254mologous to Homo sapiens Similar to PDZ domain- containing guanine nucleotide exchange factor I,accession number BC001956,Smith-Waterman Score=680.
ggggccgccgcccccgcgtgcgcgcatgagccgccggccccccgagcgccacggccggagctgcggcggcggcatcatggccccgaccctgctccagaagctcttcaacaaaaggggcagcagcggcagctccgcggcggcgtctgcccagggcagggctcctaaggaaggacccgcctttagttggtcatgttcggagtttgacctgaatgagattcgcctgatagtttaccaggactgtgacaggagcggccgacaagtcttgtttgactctaaagctgttcaaaagattgaggaggtgacagctcagaaaacagaggatgttcctattaaaatatcagccaagtgctgccagggaagcagcagtgtcagcagcagtagcagcagcagcatctcttcccacagttcttctgggggatcttcacatcatgctaaggaacagcttccaaagtaccagtacacaagaccagcttccgatgtcaacatgttaggggaaatgatgtttggctcagttgccatgagttacaaaggctccaccttaaagatacactacatacgttctcctccacaactgatgattagtaaagtcttctctgctagaatgggcagcttctgtggaagtacaaataacttgcaagacagctttgagtacatcaaccaagatcctaatttgggaaaactgaacacaaatcaaaatagtttgggtccttgtcgtactggaagtaacctaggtctgctgcaagcatgcagcagcaaactgctgcagggggtagctgaaggaggacctctccggctcacccggagtgcttctttctttgcagcacacagcacaccagttgatatgccaagcagaggacagaatgaagacagggacagtggcattgctcgatcaggtacttgtactctgtttattggtttaactaacagagtgaactatctacagtggtgtggaagaaattttcaagtagggtcttgggagagaagagggttgggtgtcagccatactaggaggttgcatcagcaaagttcagtgattaatgggacacaggttatggaggaggaaggaggaaccaaggatgcatctccagtttctaacctgagaaagcgagtggaagcctcactaagcagtcttttgatcacacctttcccatctccaagctcctctacatcttcttccagcagttaccagcgccgctggcttcgaagtcagacaacaagtttggaaaatggcatcatcccaagaagttgagttgcaagtttcctcttgctgagaaaacctccgctggtgatacccaggcaaacagggtctgtagtgtacctccaacaaaccacagcagacctgcagcagacaggcctgttagaaggaaaattaacaagcagaaaacagccacatcaacatcaacaaaaaggacgtccactcagagaccccatccgaaggtcaccaacgtaaaagaccaaaggatcacagctcctcaccagcaagggaacaaaactggatggagaattgagtttgatgaattgacagaagtaggcttcagaaggtgggtaataacaaactcctctgagctaaagaagcatgttctaacccaatgcaaggaagctaagaaccttgaaaaaaggttaggtgaattgctaactagaataactagcttagagaagaacataaatgacctgatggagctgaaaaacacagcacgagaacttcatgaagcatacacaagtatcaatagctggatcaatcaagcagaagaaaggctatcagagattgaagatcaacttaatgaaataaagcgtgaagacaagattacagaaaaaatgaagaattccaccacagtgcttgtgtccacttggggcagccaactagaacaaaataaccttccccacataatttcccctttatttcacagcacccatgacctaaatattagcttttatggaggctgtctgctgcaagcatgcagcagcaaactgctgcaggggttagctgaaggaggacctctccggctcacccggagtgcttctttctttgcagctaaactgtgtttaaccaaacacttccttcctacggaaatgatccttatcaaaagcaggaaaacaacccctgatacacaaccaaggcgattgtacttgttacaaggtgttgtggatcaaactagtagaaaaggccctaccgccttgaatattcggcaaaagaccttcgccgctgctccgccacatcgatga

SEQ ID NO: 4187 - DNA, 665 bp, Homo sapiens
  SIMILAR (224)..(274): 881254mologous to Homo sapiens Human RECAP polypeptide, SEQ ID NO: 14,accession number AAB68884,Smith-Waterman Score=72.
  misc_feature (1)...(665): n = a,t,c or g
tttttttttgagatggagtctcactctgtcatcaggctggagtgcagtggagtgaactcggcttactgcaacctccgcttcccggttcaagcggttctcctgcctcagcaccgcccccccaagtaggtgggactacaggcacccaccaccacgcccagctaatttttgtatttttagtagagacagggtttcatcatgttggccaggatggtcttgatctcttgaccttgtgatccgcccacctcagcctcccaaagtgctgggatgacaggcgtgacgaccgtgcccggcctcaaggagtacttttattaaaaagattctctgaagaaaaagatataaatctgatgttaaataaaaacattaaaaaattataaattacataaggatgtaacatatatttttaaaaagtaaatctgggctggatgtggtnnnnnnnnnnnnnnnnnnnnnnnnnnnnnnnnnnnnnnnnnnnncnnnnnnnnnnnnnnnnnnggtcaacccgcccgaaatttccaaatttataaaccgaaaatcctgaaaacccccgaaggttcctttaaactggccatgggcccccttctaaattcttttatttaaaacatggtttggctttttttaaggaacttatcctccttaaagttcaaatttgggccttgaacccttgg

SEQ ID NO: 4188 - DNA, 463 bp, Homo sapiens
  SIMILAR (1)..(300): 651254mologous to Homo sapiens Human secreted protein sequence encoded by gene 112 SEQ ID NO:282,accession number AAB56188,Smith-Waterman Score=324.
tttttttttttttggagacagagttccgctccactcagctgcccaggctggagtgaagtggtgcaatctcggctcactacaacctccagctcctggctcaagccattctcctgcctcagcctcccgagtagctgagattacaggtctctgccaccatgcccgactcatttttgtatttttagtagagatgaggtttcaccatcctggccaggctggtctccaactcctgacctcatgaaccacccgcctcggcctcccaaagtgctgggaatacaggtgtgagccactgcacctggccagtagttatcttttctttaaagttatttacttgttttttaaattgatgtataacattggatgcatttattatatatcacatggtaaaagaatccctctaaataatacttctctcttggattatatgaatctttgtcatttaaagctccgcctaagtaaaaaaaaa

SEQ ID NO: 4189 - DNA, 506 bp, Homo sapiens
  SIMILAR (286)..(164): 781254mologous to Homo sapiens Human secreted protein, SEQ ID NO: 7879,accession number AAG03798,Smith-Waterman Score=170.
ttttttggagatggaatctcactctgtcgcccaggctggagtgcagtggcgcgatcttggctcactgcaacctccacctcctgggttcaagcgattctcttgcctcagcttcccgagtagctgggattacaggcgcccgcaaccacgcccagctaattctttgtatttttagtagagacggggtttcaccatcttggccaggctggtctcgaactcctgacctcgtgatccacccgcctcggcctcccaaagtgctgggattacaggcgtgacgtaccgcgcccggccctaacacagaacttttctaacttaacttttggagaagaaaatagaaaaccaaacccagaggacagctgtgtaaggtatttactcctcagcattaggcaaaggagtcctacagcactcttacatgtcattctatttcaacagatgattcaactggtcctgtagatccgatgactgttcaacattcttctgaatagcttcttgctggtattgaagatgtg

SEQ ID NO: 4190 - DNA, 1943 bp, Homo sapiens
  SIMILAR (409)..(714): 571254mologous to Homo sapiens Human myelin oligodendrocyte glycoprotein gene,accession number AAZ29204,Smith-Waterman Score= 249.
tttttttttttttttttttgagacagagtctcgctctgtcacccaggctgaagtgcagtggcacgaatacttggctcactgcgacctcgcagctgcccggactcaagtgatgctgctgcctcagcctcctgagtagctaggactacagctacaacccgctgccacgcctggctaatttttttttttttgtattttttagtagagacggggtttcactatgttggccaggctgctctcgaactcctgaccttgtgatctgcccacctcggcctcccaaagtgctgggattacaggcgtgagccaccagcgcccggccttgcctctccgtctttaaacaataaggttcaaagttccgtgggagcacaaaggagacatgatgaggacaacgggagtagggcctgagtttttttttgtttttttttttttaagcgttttgctcttgttgcctaggctggagtgcaatggcgagatctcagctcactgcaacccctgcctctcaggttcatgtgattctcctgcctcagcctcccgagtagctgagaccacaggtgcgtgccaccacacccggctaatttttttgtatttatttagtagagacggggtttcaccctgtcagccaggatagtctcgatctcctgacctcgcgatccgcccacctcggcctcccaaagtgctgggattacaggcgtgagccaccacccccggcctgtattttcagagaggagagcttggtgtttttgtggtgccaagtggtaagataatgtctctttgaggcttcctatggacttgcctttattttaagtaaactcaagacaccagttaacctcaacagagtttggcacttattagaatttgttgtgcatcttattgaaagccaggtttacatcacctcaccccattattctttttagttaaataaatttaccatgccaagtaacctgaatggagcaaattggttgatctttaaggcagtaggtttgactagctagctatcattattgtcacatctaatgctaggcaccagaaaccatttgagccaggagtgtgaatgaataattccagagacactttagacattttttaatgttttatatgaacattttacatttgtgtgattgccatagatattaaattatactagtactgataaaaacagacaaacattacataacttattttatatattgttccaaagaaaagaatttgttttaatggtttcaaaataactgcacctgaatttgtttatgtgccttaagttctctagtgctatttcaacttttttttcaatctaaatgaagcttaccttagataaggttcatatttgtttcctatagagtaaataaacttccccttcttaaattgtgtaataaggcaccaacgtgtgggttgcttggcaggaatgaggaatgttaagggagattgttggatgtttggagtttcattatattttttgtttttattttttgatacctaggtgctttttaaaatattcagacaaatatctatcttacattgattaaacccgtgtaaattcatttgcagtatctacatcgaatgtcaaaaaagtatacttatttttgttccatacttatgtacaattttttccctcttcaggctttttcatttaactttcttaaaaaagcacttactctccccttccctatcacccctcccccaaggtttctttatttaaatttttattgagagttgttggagctctaagacaatacaaatttagagttgaacaaaagtataatctgctttacaactagtatagacctaaggtcatttgctttcaattagaggctccagagtcttcatagtggaaagaatgctttgtatttaattggtcttagttaattcgtggcacgtcgaatacttacttatctgctatgattacttcttctccctcgttagtagtagtatgtcctaggtgtttctag

SEQ ID NO: 4191 - DNA, 437 bp, Homo sapiens
  SIMILAR (238)..(297): 751254mologous to Homo sapiens Human secreted protein, SEQ ID NO: 4433,accession number AAG00352,Smith-Waterman Score=82.
ttttttttttttttgagacagagtctcattccattctgtcacccaggctggagtgcaatggtacgatctcggctcactgcaacctccgcctcccgggtccaagggattgtcctgcctcagcctcctgagtagctgggattacaggcgtgtgccaccatgcctggctaatttttgtatttttagtagagacggggtttcaccatgttggtcaggctggtctcgaacttctaaactcgtgatccgcctgcctcagcctcccaaagtgctgggattacaggcgtgagccaccatgcccagccaaatctagggcaggaacatggctgcagcatataaaaagaattgaattccatacttttgttaaccctgttttttgtttgtttgtagttgttgctgtttttgagacagagtctcgctctgtcgcctaggctggagtgcag

SEQ ID NO: 4192 - DNA, 308 bp, Homo sapiens
cacttagtctgaactggtgtattattttatacatatacatatgtatatatgtagtagtgttgtattattctgtcacagttgtctttcgaatatgggaacttagttttttttggctgggttacttttgtttcggatatgtttatgtctgtttattttctattttttgttatagtgatgattgctttttataatgatttaaaataacgaggggcgaacaaatatggtagagacctgaggctaagtctgggaatggtttgtgagagctgggagttgaaattttatgtgttgcttttctgcttggtgtgcag

SEQ ID NO: 4193 - DNA, 1685 bp, Homo sapiens
  SIMILAR (170)..(250): 551254mologous to Homo sapiens core1 UDP-galactose:N- acetylgalactosamine-alpha-R beta 1,3- galactosyltransferase,accession number AF155582,Smith-Waterman Score=84.
atgaataagctatttagtattttgttgggagaaaaggttgacacccagcctaatgttcttcataatgatcctcatgcaaggcattcagatgataatggacagaatcatctagaaggacaaatgaacttcaatgcagattctagccaatttaaagatgagaacacagacattgctgaaaaggctcgaggagaaagttagaattctttgctgggttatgaccggccctcaaaaacctagagaaaaaggccaaacacgtcaaagctacttgggcccagcgttgtaacaaagtgttgtttatgagttcagaagaaaataaagacttccctgctgtgggactgaaaaccaaagaaggcagagatcaactatactggaaaacaattaaagcttttcagtatgttcatgaacattatttataagatgctgattggtttttgaaagcagatgatgacacgtatgtcatactagacaatttgaggtggcttctttcaaaatacgaccctgaagaacccatttactttgggagaagatttaagccttatgtaaagcagggctacatgagtggaggagcaggatatgtactaaccagagaacccttgaagagatttgttgatgcattgaaaacagtcaagtgtacacatagttagctccattgaagacttagcactggggagatgcatggaaattatgaatgtagaagcaggagattccagagataccattggaaaaggaaactttttccatccctttgtggccagaaccaccattttaatttaaaaggttatctacctagaacgttttggtactggaattacaactattatccctcctgtagagggtcctgggttgctgctctgatcttgcagtttcttttcactatgttgattctacaaccatgtatggagttaggaatacctcgtttatcatcttcgtccatatgggttatttatacaggatattcaacctaccttacctgaacgtatactaaaggaaattagtccaagcaaacaaaaatggaaggatacaaaagtgaagtttagggaaatccttgaaagaaaatcatgaatgaacaaaggtaatatgtcttagcactgcactgaaaaaggacttctgcatttctgacatagaacactggaatcccagtgaggaattctaagtgaacattcgcttatagaaacctttcacatgaatgactataaactgaagctttaaatgagctgtgaagtgtgttaaaatgtgttttgatacagtaatatattaatgagagctatatatatgaggaacttgtgttttttaaatggtggccaggtagaggaactagaaaagagattttgttgcctgttttctgaccatctgtgttattgtcactgagaaactaaaatagtaaatttacctaaaactacactgcaccatgttagtaataaacagatctgccttaaagaaaagaaaattttagaaagaaatattgttgcctcagtgttgttaatatagctcaaaaattgagtttatatttgcagtatgctataaatgatacccccctaccacacccacacacacagtttttgtctaatgaaaatgttgctgtgattatttataattggtagtatttcttccagaagaagctaaaataagactggcacttaccctgaagtgcattaataaaaccaccctttaaaattaaaaaaaaa

SEQ ID NO: 4194 - DNA, 478 bp, Homo sapiens
  SIMILAR (276)..(172): 451254mologous to Homo sapiens HSPC093,accession number AF161356,Smith-Waterman Score=75.
tttaagagataagagtgtcggcgtcagcgtggagtgcaatgatgcaatcacagctaacagcagctttgacctccttgggctcatgcaatcctccctcctcagttccccaggtagttcagactacaggcaggtactactacactcggctgaattttaagtttttaatcttgtagagatggggtcttactatgttgtccaggcaggtctcaaattcctggcctcaagcgatcctcctgcgttgacctcccaatgggctaggatcacaggcatgagccacattaccagggcctaatgatgcagctttgttgcttatgcagctctttaaaaaagtgactcagggaaataaccatttaggtaaccatttaggataaccatgcttagggtggtataatataccaagcaaatctaatcaggtaaccatggtattatgcatgtgacattctagctaaaaatatcctaccatcaaaatacattactg

SEQ ID NO: 4195 - DNA, 1080 bp, Homo sapiens
  SIMILAR (436)..(693): 1001254mologous to Sus scrofa Smad3,accession number AB052738,Smith-Waterman Score=464.
atggggattcaccacgttggccaggctagtctcgaactcctgacctcaggtgatctgcccgcctcagcctcccaaggaagaggcgtgcggctctactacatcggaggggaggtcttcgcagagtgcctcagtgacagcgctatttttgtccagtctcccaactgtaaccagcgctatggctggcacccggccaccgtctgcaagatcccaccagaccttacaggcctgcagagcacagaagacaaagacacggatgagttcaatataagggacgggtgccaagcaccaagccagcagcccaggaaaggcccccctctccacaccatctccctatttttggaagccctctttgcagacttctccctgctctgggagtcggagcttgtgggccagccttccatctccccttgcagccctgtttctgtgtttttggcaggatgcaacctgaagatcttcaacaaccaggagttcgctgccctcctggcccagtcggtcaaccagggctttgaggctgtctaccagttgacccgaatgtgcaccatccgcatgagcttcgtcaaaggctggggagcggagtacaggagacagactgtgaccagtaccccctgctggattgagctgcacctgaatgggcctttgcagtggcttgacaaggtcctcacccagatgggctccccaagcatccgctgttccaaacatactgattgggaggtgcgtgttcagcagaacctgcacacaggacagcgggaaaaatcgatgagcgccacctctttaaaaactcacttacgtttgtcctttttcactttgaaaagttggaaggatctgctgaggcccagtgcatatgcaatgtatagtgtctattatcacattaatctcaaagagattcgaatgacgctcgacccaagcagcattatttcccctaagtcagcggttctcaaagtgggtcccaggaccgaaccagcagcatcggttatcacacagatgttaaagatgcaaattctcaggccccacgccaggcctactgaagccgcaactctggagtggggccctccaggtgactgtgacatagctcacttctga

SEQ ID NO: 4196 - DNA, 1373 bp, Homo sapiens
  SIMILAR (252)..(527): 601254mologous to Homo sapiens Human myelin oligodendrocyte glycoprotein gene,accession number AAZ29204,Smith-Waterman Score= 266.
tttttttttttctgagatgtagtgtcactctactgccaaggctggagtgcagtgccacaatctcagctcactgcatcctctgcctcctgggttcaagcagttcccctgcttcagcctccctagtagctaggattatgggtgtgcaccaccacacccggctaatttttatattcctagcagaattagccaggcgtggtggcgggtgcctgtaatcccagctactcaggaggctgagacagagtttcaattttgttgcccaggttggagtgcaatggcacaatctcagctcaccacaagcttttcctgctgggttcaagtgattctcctgcctcagcctcccgactagctgggattacaggcatatgccaccatgcccggataatttttgtatttttagtagaggcggggtttcaccatattggccaagctggtctagaactttggacatcatgatccacatacctcggcctcccaatgtgctgggattacaggcgtgacacccgtgcccggcccaatttttgtatttttagtagagacaggggttcaccatgttggccaggctagtcttgaactcctgacctcaggtgatctgcctacctcagcctcccagtgtgagccaccgcacccagcctggattgttgaattcaatgcttgggtcacctccagattcattttcacagtctttcatgttttggtcatactacattgtattttgctgcccatatgactgatctttttttgttaaatgtgagatacttgttaaaaaatatttagcaatgaattgaggcctaggtagcatgttatcttgctgcagaaggagatggggagtctacttctgggggatgggtcaggggtcctccgtacagggctggaaattgagggtcgtctctgcagggctcagtccctacaaagggccagggtattttcctgtccacctctattctgatgcatgactcttctgggtctcaaccagagccagtggacttcagtatgggtcgctttcattggcagaccctcaatccacttgttttccatctaatcccacgcatgtgtgcaaaagctgctgtgcttctttgcatctcagtagttccttctggaattcagcaatgaaactcagggaaatgggttccaaatgcgaggctgactttcgtcctgggtttccttcttctccatcttcacctcatgtctgtttactgccatgttagcaatttgatgtattcaatcatgggttttatattctgtttggtgtcccccattgttctcatcggagatcagaagcttcagatgcacttatgtcaactcaagagtagaatgcttccttagcttccctccagagtcaggtttttgtgtttctagttcccaagtgcacagca

SEQ ID NO: 4197 - DNA, 1995 bp, Homo sapiens
  SIMILAR (1250)..(1354): 511254mologous to Homo sapiens p40,accession number U93569,Smith-Waterman Score=102.
atgcttgcaggccagcagcgcgagttcccggtgggcgtgggctccgcggaccccgcactcggagccgccggctggccccagcggcctgggcaggctcgggacctgcagctcgccatgcctgagcctcctatcccctccatgggctcctgtgcggctggagcctcgcctacgagcaccgccccctgctccaaggcgcccagtcccatcgaccacccaagggctgcggagtgcaggcgcagggcgcgggactggcaggcagctccacctgcagcccccgtgcgggatccactgggtgaagccagcagggctcctgagtctggtggggcctcggagaacctttatgtctagctcagggattgtaaatacaccagttggcactctatctgtagctcaagctaatctggtggggacatggagaacctttgtgtctagctcagggattgaaaacgcaccaatcagcgccctctcagaccactgggctctaccaatcagcaggatgtggagctgtattccaattttcgctgctcttaaaattttttttaatatcattgcttcccaattgactcacaataacgcagacatagggactgctggagactgtgaccttaaacagttaaagatgtctgcatatacgacatcatgtttgatgggggtgcagggcggtttgccgctgccaccctcggcaccatctctgaactgcccgcttttccggaggagcggaaaagttggaagccgaaaagacaggcgcccggagccctggtctaggtatcaggtgatccggagccctagtcggtgcccactaagaacaccccttctcccatcgggggttcggaggagtgttaagcctgcgggtctgccagtccctaaggcggaactgaaagcgaagatcagccaagagcacagtcggaggcggcagagacggtggcggcctgacctggctctttcgcccctcggagaaccggatcacaactcctcacaagcaagggaacaaaactggatggagaatgagtttgatgaattgacagaagtgggcttcagaaggtggggtaataacaaactcctccctcctgagcctaaagaagcctggttcctaccccaatgccaggaagcctaagaacccttgaaaaaagggttagggtgaattgcctaacctagaataacctagccttagagaagaaccataaatgaccctgatggagctgaaaaacacagcacgagaaccttcatgaagcatacacaagtatcaatagcccaagccgatcaagcggaagaaaggatatcagagattgaagatcaacttaatgaaataaagtgtgaagacaagattagagaaaaaagaatgaaaaaggaacaaacaaagcctccaagaaatatgggactatgtgaaaaagaccaaaactacgtttgattggtgtacctgaaaatgacagggagaatggaaacaagttggaaaacacacttcaggatactattcaggaaaacttccccgaactagcaagataggccaacattcaaattcaggaaatacagagaacaccacaaagatacaccttgagaagagcgaccccaagacacataattttcagattcaccaagattgaaatgaaggaaaaaatgttaagggcaaccagaaagaaaggtcgggttacccacaaagggaagcccatcagactaacagtggatctcttgggtgaaactctacaagccagaaaagagtggggaccaatattcaacattcttaaagaaaagaattttcaacccagaatttcatatccagccaaactaagcttcataagcaaaggagaaataaaatcctttacagacaatcaaatgctgagagattttgtcaccaccaggcctcccttacaagagctcctgaaggaagcactaaatatggaaaaactggtacctcccactgcaaaaacataccaaattgtaaagaccatcaacactatgaagaaactgcatcaactaatgggcaaaataaccacctag

SEQ ID NO: 4198 - DNA, 1304 bp, Homo sapiens
  SIMILAR (154)..(324): 541254mologous to Homo sapiens PRO2550,accession number AF130089,Smith-Waterman Score=133.
  misc_feature (1)...(1304): n = a,t,c or g
ttgagacggtgtctcactctgtcgcccaggctggagtgcattggcaccatgtgggctcacagcaacctccgtctcctgggtccaaacaattctccaacctcagcctcccgggtggctgggattacaggcacccaccaccacatccggccaatctttatatttctagtagagacagggtctcactatgttgccaaggctgatctccaactcctggcctcaaatgaccctcccacctcggcctcccaacatgctgggattataggcaggagccactgcacccggccgaggatatattaatggagtaataagttataatacaagataacatgatccaagtatcaaatgtgtgtttcaattaggtagtacttcaggaattcttagactaaaattaccaccaagaatggaaatattggaaaaagcttcatgcaataagtagccaaaatttgaaggaaagacaggacttagatcaaagtaaagtagaaaaaaaagcactacaacctggagtaatagctttgacaaagcttataagagcaagaaggtttgggggaacagtaagtaaaccatatctggctttggcaaatggcttcatgtagaattgcagagttgggagcaaaccaatactttttgagtaacatttgatttcttacatttttcattttttaatccaaatttttagtgtataaagtnnnnnnnnnnnttaaaataatggaacagagatcaggcgaagttacttctgtcaacaacaaaaaatatcccacctataaaaacatggagatctctctgtcctataacctctacaatagttattcaggccttgtacttaactacacagccaagtttttagaattagaaacttgatttagaactctagcaagtgaggtgtttttcattttaatagaaacatcaacttttctattaattcctatttctaccaaattctctaccaagcaacaactctctttcctccctcttttgttcaacaccttcatgagtttcatgaattataacctttgagaacacctgagtcacaagtatacaataaaaatgaggatgcatattattcatctcccaggtctgtcaccaatgtatcagaagcctaaggcagtcagttccacccagggaatatagacaggtcactttaaaaagaggcctcctctctaaattttactcaaatactgctattctcaaaatccccttccatatatcaggagggaaaaaataagcccactgtcattcccaacactgccattctatggtcctgccttttctgaaacttatattaacacttaaattttattagtaac

SEQ ID NO: 4199 - DNA, 695 bp, Homo sapiens
  SIMILAR (69)..(281): 581254mologous to Homo sapiens Human myelin oligodendrocyte glycoprotein gene,accession number AAZ29204,Smith-Waterman Score= 165.
gagagacagtcttgctctgttgcccgggctggagtgcaatggcacgatctcggctcaccgcaacctcccctcccaggctcaagcgattctcctggcctcaacctcctgagtagctgggactataggcgtgcgctaccacaccctggctaatttttgtatttttagtagagacagggtttcaccatgttggtcaggctggtctcaactcctgaccttgtgatccacccacttcagcctctcaaagtgctgggattacaggtgtgagccaccgcgcccggcctgttttacgtttttaacagaattattattattttgagacagggtctggctcagctgcccaggctggaatgcagtggcacgatcatggcaatgcagcctcaacctcccaggctcaagcaagcctccaacctcagcctcctgagtagctgggaccactggcatgcaaccacacccggctaatacaactgtttgtaaaactgagagaaagcaagtctttagaatgcacttactaaataacacgaattacagggaacagtaacatactgcatatagtgatgtagactgtgggaaactacaaggacaaatgagccagtcctacctcagaatagttccagccagataaaagaacccacagaattatggttatgttataaaataaagcaattaagttttagaaatccatcttgaaatatttg

SEQ ID NO: 4200 - DNA, 385 bp, Homo sapiens
  SIMILAR (1)..(72): 661254mologous to Homo sapiens Human secreted protein, SEQ ID NO: 7874,accession number AAG03793,Smith-Waterman Score=71.
gaggcagggtctcactctgtcgctcacgctggagagcagtggtgcgattacggctcactgcaacatcaaccttcctgtactcaagcaattctcccaccttagcctcccaagtagctgagactacaggtgtgtgccaccatgcccggctaacttcttaataattttaatgatttctgtgtcaattagggggtctgtatagaacagttatcagtttgtttcttcctttactttttattcactggcaaaatttgaaatatttgagatgaagtgtaaatagtccacgtctttttctccttctagattctaacttcacatggttaggaaagatcaagtctattcctagtttgctaagagtttttatcgtgagtagatgttaaaattttca

SEQ ID NO: 4201 - DNA, 2034 bp, Homo sapiens
  SIMILAR (1)..(2031): 1001254mologous to Homo sapiens PL776_6 secreted protein,accession number AAY28815,Smith-Waterman Score=3553.
atggatcctgaagtgaggcttagtagccccccagggaagccagaagattcatccagtgttgatggtcagtcagtggggactccagttgggccagaaactggaggagagaagaatgggccmgaagaagaggaagaagaggactttgatgacctcacccaagatgaggaagatgaaatgtcatcagcttctgaggaatctgtgctttctgtcccagaactccaggaaacaatggagaaactgacttggctggcatctgaaaggcgcatgagtcaggagggtgagtctgaagaagagaattctcaggaggagaactctgagccagaagaagaggaggaagaagaagcagaaggaatggaaagcctgcagaaagaggatgaaatgacggatgaagcagttggagactctgctgagaagcctcctacttttgcttcacctgagactgctccagaagtggagaccagcagaactccaccaggagagagcatcaaagctgctggaaaaggccggaacaatcatcgagctcgcaacaagcggggaagtcgggctcgggccagcaaggacacctccaagctgctgttgctgtatgatgaggacattctcgagcgagatccactcagggagcagaaggacttggcctttgcccaagcttatctgaccagggtgcgagaagccctacaacatatccctggcaagtatgaagacttccttcaagtcatctatgaatttgagtcaagtacccagagacggacggctgtagatctctacaaaagcctgcaaattctgctccaagactggcctcagctgttgaaagactttgctgctttcctgttacctgagcaagctctggcctgtggattatttgaggagcagcaggcttttgagaagagccgcaagttccttcggcagctggagatttgctttgcagagaacccctcacaccaccagaagattatcaaggtcctccaaggctgtgcagactgccttccccaggagatcaccgagctcaagacacagatgtggcagctcctcaagggccacgaccacctgcaggatgagttttctatcttctttgaccacttgcgcccagcagctagccggatgggtgactttgaagagatcaattggactgaggaaaaggagtatgagtttgatggctttgaagaagtggccctgcctgatgtggaagaagaggaggagcctcccaagatacccacagcctcaaagaacaagaggaaaaaagagatcggggtccaaaatcatgataaggagactgaatggccagatggggccaaggactgtgcctgctcctgccatgaaggaggtccagattccaagctgaagaagagcaaaaggcggagctgtagccactgtagcagcaaggtctgtgacagcaaatcctacaagagcaaggagccccatgagttggtgggcagcagcccccaccgagaggctagtcctatgcctggtgctaaggaagctgggcagggcaaggatatgatggaagaggaagccccagaggagcgggagagcactgaggccacccagagcaggactgtcaggaccaccagaaagggagagatgcctgtttcaggattggcagtggggagcactttgccatcccctcgagaagtgactgttacagaacggctcctcctggatggcccaccacctcattcaccagagactcctcaatttccccccacaactggagctgtactgtacactgttaagagaaaccaggttgggcctgaggttcgctcctgccccaaggcatcccccagacttcagaaagagagggagggccaaaaggcagtgagtgagtcagaggctttgatgctggtctgggatgcatcagaaactgagaaattgcctggtaccgtgggaaccccctgcttccttcctgagtcctgtttcctcaaagaccagagatgcagggagaagacatgtgtccgggaaaccagacactcaagagagatggctgccctcaagcagagctcgggtgaagacaagagacaggacgtgccctgtccatga

SEQ ID NO: 4202 - DNA, 923 bp, Homo sapiens
  SIMILAR (764)..(543): 981254mologous to Homo sapiens PL776_6 secreted protein,accession number AAY28815,Smith-Waterman Score=377.
gattcagagccttgctctgttgcccaggctggagagcaatgacgtgatctcggctcactgcaacctctgtctctcgggctcaagcaattctcctgcctctgcctcccaagcagcagggattacaggcgtccgccaccatgcctggctaatttttgttatttttaatatagatggggttttaccacgtcggccaggccagtctgaaactcctggccttgtgatccacccacctcagcctcccaaagtgctgggactacaggagtgagccaccaagcccagcctattactattttttaaggcatttaaagtatggtcaggtgattcaatttaatgtgtaaacgagtttaatataataagtaaaatttcatcctttccatctcatttcacctcaactccacaatcatgtcccataatgcattcacaaatcaaatacaaatgattttaggactatccatagtgcagcaagcaagcaggtggcatatcaataagtgatacatattactgagtccacgaaatacttgagaatattctccagctctcacctggagttctgggacagaaagcacagattcctcagaagctgatgacatttcatcttcctcatcttgggtgaggtcatcaaagtcctcttcttcctcttcttctggcccattcttctctcctccagtttctggcccaactggagtccccactgactgaccatcaacactggatgaatcttctggcttccctggggggctactaagcctcacttcaggatccactgaggacaaagcattctttgatgatcctttgttcacatctgtccctgaggttccttcatcagggggctcttgagaagatgaaggggttttagttggctgactcctctcctcttccttctgtaagactgtatgtttcgttacttctccagcactgctcaa

SEQ ID NO: 4203 - DNA, 487 bp, Homo sapiens
  SIMILAR (169)..(336): 571254mologous to Homo sapiens Human secreted protein sequence encoded by gene 112 SEQ ID NO:282,accession number AAB56188,Smith-Waterman Score=132.
  misc_feature (1)...(487): n = a,t,c or g
taagcaaggaatcatcatgacctatgttttaagaaggccattctttttttcgagatggagtcttgctctgtctcccaggctggagtgcagtggcgcgtttttggctcactgcaagctccgcctcctgggttcctgccattctcctgtacaggtgccagccaccaagcccggctaatttttttttgtattttttagtagagacagggtttcttttttagtagagacagggtttcaccgtgttagacaggatggtctccatctcctgacctcgtgatccgcctgccttggcctcccaaagtgctgggattacaggcgtgagcccccgcacccggcaagaaggccattcttagcgctaagaggagaatggaataggataataagtagtaaggggataaagatcggacgcgtggctcgacccgggccttccggnccggtngctcgtgcgtacgctatcantanggngttctatgggggggggcctcccctc

SEQ ID NO: 4204 - DNA, 1050 bp, Homo sapiens; identical to SEQ ID NO: 1658
  SIMILAR (514)..(1047): 1001254mologous to Homo sapiens hexokinase IR,accession number AF016365,Smith-Waterman Score=887.

SEQ ID NO: 4205 - DNA, 794 bp, Homo sapiens
  SIMILAR (421)..(501): 701254mologous to Homo sapiens Human myelin oligodendrocyte glycoprotein gene,accession number AAZ29204,Smith-Waterman Score= 113.
cagcccgttaaatttcaaaaaattaaattgaaccagagtcccctggccccgttgaaggaaaaataaataaaaatgtgttagtgccaagtagtaatttttggcattaggggattgatacaattttgcccttaaatcagaattgaagtttaaaaaccaggccatagtttcccttaataaattttttttttttttttttttaagatggagtctccgccctgtcgcccaggctggagtgcagtggcgcgatctcggctcactgcaaacctccgcctcccgggctcacaccatcctcctgcctcagcctcccgagtagctggaaccgcaggcgtccgccaccatgcccggccaaatccttttggatttttagtagagacggggtttcaccgtgttagccaggatggtctcgatctcctgacctcgtgatctgcctgcctcggcttcccaaagtgctgggattacaggcgtgagccaccgcacccggcaagaaggccattcttagcgctaagaggagaatggcttaggataatgggtagtaaggggataaagatactttatgaaacttgtgcaatattctagatttttaaaaagtgttggtggccaggagctattgcagtagcagtgaatgtaacttaaactcaaggccaaaataatgggggctggaggggacaccacaagcaaaaggagagaaaagataactcttaggttcctctagagaaattgggaaagacagcatttattgaaatgcggagaaagactaggaaagaaaaggggaacaggtctgaggaagaaaccaa

SEQ ID NO: 4206 - DNA, 543 bp, Homo sapiens
  SIMILAR (75)..(212): 381254mologous to Plasmodium vivax pva1,accession number X92485,Smith-Waterman Score=59.
cgggcatttaccacacattgagaactggccaggaagggaggggctcaattaaacaacagcggttattacaacggccactgccatactttttcctgttcatttttccttcgtttctttacatgattgagattaaacactagctatcattttacattttactttttgcatttaacattgtatcataacctttctcatattttatttttttttttccttttgagacagtgtcttactttgtggcccaggctggagtacagtggcatgatcatagctcactgcagcctcgacctcccaagatcaaggcgattctcccacatcgggccccctgaaggtaactgatagggtgtgtggtcaccacacctaggctaatttttacattttttgtgggggatgggggggtctcactatattgctcaggcggatcccaaactcctgggctcaagggattttcccaccttggcctcccaaagtgctgggattacaggcatgaggtaatttaattttctatgatcatcatttctactttttttggccctcatctta

SEQ ID NO: 4207 - DNA, 604 bp, Homo sapiens
gaaaaggaagcataaaagttttactaccactgaatctgctaggactttttattgggtttagtgatgcagttttcaatgaaacatgctgctttcggattaatgcctctagttaaaggaaaatctacaagtacttaaaaatcaaatcaaaattattggatccccggagtggcctacaaggcccctttaaataaatcccagtcttcctttatgggaatttggttaaccccctttatttaagcccctctcttggcttaatgtggtccttgtattggatatttggaccctgtatacacaatactataactcaaattgtttcttctcatctagaagcaatcaaactccaaatggtgctgtaaacagaaccacacatagacacatcattcttctgaggacccttagattgaccccaggaggagccctagctgctcttccccattcgacgcccttttgcaacaagaagtagccagaaggagtcgtcgcccaaaactccctaacagcagttagtgtggcatctccacaggggggaatgttgtaggagttattaagaaattattttaggcagatagagaggaaaatgggtccttgggtccttggggaagttttt

SEQ ID NO: 4208 - DNA, 1300 bp, Homo sapiens
  SIMILAR (691)..(1299): 781254mologous to Mus musculus putative,accession number AK009247,Smith-Waterman Score=847.
ggataaacatctgtagcacgcttacgccaagcttggcacgaggggagattgacgcggcagtgcacacctgctggtacgagcataagtagccgacaggccagagtttccagtttcgggggcttcgtaggcttttagcttctgaaatccgctaaaagcggcgggttcattcatcttcaagtacctagcctgactggtagggctgctcagcattccgaaacatttcgacctggggaggggggcggcggtgaaagaatactttctgtagagagtgcccctcgcgtcgcccctgctttgaaggctttatgtattaacggaatgccgaacatttgtgtcctacttgctgacagcgcacaggatccttctaacagtatttcttcaagtactttaacaaaaagattgaaaaacttggaagtcccaagccgtgctgctggattccgtctcacagttttaaagacttgtccagaaacttttaaggttttcaaaactgttacatttttaaattcccgtggcgttttatcttcatttttgctgggggagaaagccaaagtactggactgcctggttcagggctgaacgcctagtacacctgctaacttggagcttcagagccatggcaaccaaggagtcaagagacgccaaagcacagttggccctctcctcatcggccaatcagagcaaggaagtgcctgaaaacccaaactatgctctcaaatgtactcttgtgggacacacggaagcagtgtcatcagttaagtttagtcctaattggagaatggcttagcaagttcttctgctgataggctaatcataatttggggagcatatgatggaaaatatgagaaaacactctatggtcataatttggaaatatcggatgttgcctggtcatcagattccagtcgtcttgtttctgcctcagatgataaaactctaaaattatgggatgtgagatctggaaaatgtttgaaaacactgaaggggcacagtaattatgtcttttgttgtaacttcaatccgccatccaaccttataatctcgggatcttttgatgagactgtaaaaatatgggaggtgaaaacaggaaagtgtctcaagactttgtctgctcattctgacccagtttctgctgttcattttaattgtagtgggtccttgatagtgtcaggtagctatgatggcctctgtagaatctgggatgctgcatcaggtcagtgtttaaaaacgctcgttgatgacgataaccctcctgtctcttttgtaaaattttctccaaatggtaaatacattctcactgcaactt

SEQ ID NO: 4209 - DNA, 1586 bp, Homo sapiens
  SIMILAR (150)..(278): 741254mologous to Homo sapiens PRO1722,accession number AF119851,Smith-Waterman Score=165.
  misc_feature (1)...(1586): n = a,t,c or g
ttttgacagagtcttgctgtcgcccaggctggagtgcaatgatgcaatctcagctcactgcaacctctgcctcctgggttcaagcagttctcctgcctcagcctcccaagtagctgggattacagacacacagcagcacacctggctagttttttgtgtttttattagaggcggggtttcaccatgttggccaggctggtctcgaactcctgacctcaggtgatccacctgcctaggcttcccaaagtgttgggattacaggcgtgagccaccacacctgggcctgggtggacccagtttctaagggcttgcatttgcatatcaaaggttgcctgcttggcactaagggcctgggctttccttcttgacaagaaacttttctggagctgctttaaaagaaatgaaaacttcccaaggaccccttttcctctctatctgcctaaaataatttcttagtaactcctacaacattacttcctgtggagatgccacactnnnnnnnnnnnnnnnnnnnnnnnnnnnnnnnnnnnnnnnnnnnnnnnnnnnnaaaaggggcgttgaatggggaatagcagctagggctccccctgggatcaatctaagggtcctcggaagaatggcctgtccatgtgtggttcagtttacagcaccatttggagtttgattgcttctaggcgagaagaaacaattcgagttatagtattgtatatacagagtccaaatatcaatacaagacatataagcaagagagggcttaataaaggcgttaaccaattccataaagaagactggaatttattaaagagggtttgtagccactcaggggctgaagctggcattttttcctgagcctatcaataattttgatttgatttttaagtatctgtaaattttcctttactagaggtattaatccaaaagcggcatgtttcatttaaaaactgcatccactaaacccaataaaaagtcctacccaggctccagtggatagtaaaactttcatgcttcctttttgttagtaactattatccctgctataaggataatgattaagcaaaatatgaccagcaatggaaactctctgtttaatacttcagttagaaggtgcctaccctgtaataatccctattgccaaataatagagtgaagtatagcctatttcccataagtgtggtgtggtagataatttcccatcctaaacttttaccctgtcaagatatagaattcccctttgggggggtctatgaagttccttggttttattttcctaaacgaagaaacctctgggttatgggcaccctactcacttttattacctggtagaatttgcagaataattgcccagaactaatatattgattcagattttatattacccatcccttaatttttcttccaagctgcaggagatcactgcttgattcacaggaataagcagggttagtctaaaatgtaggcgaaaagcttgaaaacaaaaacaaaaaacaaaaaaatgtatgataagctttggagcacaatttttctctctagtcctcgttcttggtaaaaacaagttatgaataaactgtagtcttataaaaaaaaaa

SEQ ID NO: 4210 - DNA, 812 bp, Homo sapiens
  SIMILAR (53)..(271): 501254mologous to Homo sapiens PRO1722,accession number AF119851,Smith-Waterman Score=184.
  misc_feature (1)...(812): n = a,t,c or g
gacatttgccaggtgtggtggctcacacctataaacctagcattttgggatcaagtaattctcctgccccagcctccaatgtagctgggactacaggtgcatgacaccatgtctggctaatttgtttttttttaaactagagggagggttttgccatgttgcccagactagtctcaaactcctaggttcaagcagtcctttcatcttggcctccagaagtactgggattacaggcatgaaccaccatgcccagccaacttctaaactgatcaataagggagtagcattcaatcacccacaggttaactcactctagagagaaatcttgtgagtgtaatctgtatggtaaaactttgagctcaaactttccccctaccaaaaaaaaagtatctactggggagctgcccaggtaatgccagtagctgtaggaaagccctccagtgaatggcctccagggagtcacatggacaactcacaaataaggggaaaccctgtgtgtggcatcaaaaatggaaancccaggggacactcattcccttaagtcacatttcggagatcatacaacagaggaatatgttgagtatacacagtgttgaaaagcctgtgacacaaacagtcatattaccaagcacaagacagtatagtttggtatgctataaaagccttgaatattctctccatttttaagaagtgagattcatactagaaaaaccattgaattccatcagtattagaatgtcatttttccacatttttaggaacctaactcagtgtaagataacaatttatacaatttattttttgagacaggg

SEQ ID NO: 4211 - DNA, 363 bp, Homo sapiens
  SIMILAR (9)..(290): 701254mologous to Homo sapiens Unknown (protein for MGC:4693),accession number BC003646,Smith-Waterman Score=331.
ggcacgagaggaaggctcagcctgccggggagggccgaacccacatgacaaagagtgactccctgccctccttccgggtctccaccctgcctctggagtcacaccaccccgacccaaacaccatgggcggggccagccaccgggacagggctctctcggggactgccaccgtacgggacaccagagggatagaccctgccccagtccatgcttccccaactaggaaccgcgaacgagggcagacacgtgttcaagagattcccagacacactcactgaccgttccatctctatttatacggaccatcactctctacaaattcggacactgagggctctttctcaattataaactacatccgcg

SEQ ID NO: 4212 - DNA, 976 bp, Homo sapiens
  SIMILAR (119)..(649): 451254mologous to Caenorhabditis elegans LET 858,accession number U19615,Smith-Waterman Score=399.
ggcacgaggaaattacagttaaaaaagatgatttaaaaccattattaaagtaagattcttgtgtataagagtgtacagtctatgttgcaagcttttaacctattgtgatcatttccacagtttagattttgaagaatgtgctcacaaattgctgaaaatggagtttcctgaaagccaaacaaaagaactctgcaacatgatacttgattgctgtgcccaacagaggacatacgaaaaattttttggcttattagctgggcgattttgcatgctaaagaaagagtacatggaatcctttgaaggtatattcaaagaacagtatgataccatccatcgcttggaaacaaacaagttgcgaaatgttgctaagatgtttgctcaccttttatacactgattcacttccatggagtgttcttgaatgtataaaactgagtgaagaaaccactacatcatccagtagaaatttttgtcaaaatatttttccaggaactgtgtgaatacatgggtctgttctaaaccttattgctagattaaaggatggaaactctggcaccatttttttgacgaatattaccccagagatgatcctagaatcactcgtgttgccattatctttttttccttctatagcgtctggatgccttacctactgtcctgtatcggcgctctctagtatccctctaaggcctctcgtagttgcgctcctcttgcctatccccatatttcaccatgatcttctgctggagctttttagactgcccttcttctacaacgatactctcgtcctcccgttcgtctaacctctaccactatgtagatagctcttctcctccatatctatctccgcctctcctctctcacctctctttctattcacgcggtgttctgccccgttgccactagttctccagatacacagtgtatagagcctcttctgagtcttctcgcagtcgtgtctaattcaatcattcttc

SEQ ID NO: 4213 - DNA, 1615 bp, Homo sapiens
  SIMILAR (235)..(729): 411254mologous to Mus musculus putative,accession number AK003550,Smith-Waterman Score=205.
gaggtgcaattcggcccagcagcagatgaccagctcgcagaaggccctgatgctcgagctgaaatccctgcaggaggaaccggtggagggcttccggatcaccctggtggacgagtccgacctctacaactgggaggtggccatcttcggaccccccaacaccctctacgaaggcggctacttcaaggcgcatattaaatttcctattgactacccctattcaccaccgtaccgttcagattcttgaccaaaatgtggcaccccaacatttatgagaatggagatgtatgcatttcgattcttcatccgcctgtaggatgacccacagagtggacgaactgccttctgaaaggtggaatcctactcagcaatgtgagggactaatcctattaaggtgttaatctcactggcttaatgagccccaacacctttctccccagccaatgtccgatgcttcagttatgttcagggaaatggaggagacagtaaaggaaaagacaaagaatatggcttgaaatttattagggaaaccaagttttcagccacttaaggcccgaaggcaggaaaagggtgggagttgaaggttccccacaaccctgggcgggaatacctgcatcaaaactgaggtgcccctgcaatgacgaacaggtgcagagtttgctttacgacgaacttggtatgatgaccgacattgatgatgaaagatgaggaaggaggaaagatgccgacttgttatgatgatggatgattctggggaatgaggaagccgtgacgttgctccttcagtgcccccctgtaactgcccctggcccatcctccaggcccaaagggagggggagcaaagtggggggacccccctggccatgggcccccctcaggcaaaaaaccccctattccaccaggcggggtgggggggaaaacaccaccacaagctccctgcctgacctccccccttatgggatcctcaggttggcctccctttttaatgggaccctttaatgggagagagagtaacccctcccacagaatgtcctgaattcttgcattcctttaccccttcccatcactatattgattctttttttaaaaaacatgaaccccaaactcccgccctcacttcggtctctaccagaatgttcacaagcaaaaccacgtttgggtctgtttttaagattcttgaagaattcaataagtctttccaagatgtttaaatgtgtttaaaagctgggaaccttgttgggagttcacaagtgctgcatatactgggtagcgaaaagaaaatggaaaaaaaacccacaaaacaaactttaaaaaaaaaaaaaaaagcaaatttgccaaggtttagctgctcatttacattagtgtgtgtgcattcgttcagccccatggtggtgaatatctgtttctttcctcttcctaaggggctgggacatggtgggcatcaagggactttgtgctaagcctgatgaaatgtgctccttcaatctccatgaaaccatcgtaacatggaggcctcagctgctctgaggagagaaatcagactttgttttttgaaatcgattgggatcgaaagcctgaaataaatattcatactttccatagaactgaaaaaaaa

SEQ ID NO: 4214 - DNA, 358 bp, Homo sapiens
  misc_feature (1)...(358): n = a,t,c or g
cggtgagaaggggtataagtgtcaagagactggtagcagtggagtgtataggctcatggcgacatagcatgacagggtcaggagattctctagcatcagccttctgagtgagtgggggtacaggagagagccatcacaaacagctcattgcagtgaacatggtggagatggggagtcaccgtgctggtcaggctggtaatgaactgtcgaccttgtgataggcacaaatcggcnnnnnnnnnnnnnnnnnnnnnnnnnnnnnnnnnnnnnnnnnnnnnnnnnnnnnnnnnnnnnnnnnnnnnnnnnnnnnnnnnnnnnnnnnnnnnnnnnnnnnnnnnnnnnnnnnnnnnctcgtgcc

SEQ ID NO: 4215 - DNA, 915 bp, Homo sapiens
  SIMILAR (32)..(130): 661254mologous to Homo sapiens PRO1722,accession number AF119851,Smith-Waterman Score=125.
  misc_feature (1)...(915): n = a,t,c or g
agatggagtttcactcttgttgtcgcccaggctgcaatggcacaatcttggcttactacaacctccgcctccctagttcaagggattctcctgcctcagcctcccaggtagctgggattacaggcatgtgcaccatgcctggctaattttgtatttttagtagagacggggtttcgccatgttggtcagactggtcttgaactcctgacctcaggtgatccgcccgcctcagcctcccaacgtgctgggattacaggtgtgagccaccgtacctggcagaaaatgtactttctttctcagaaatacttttaaaaaaaattgaagggtgaggagaaaaacatcttggagaagaggacccattaaaactttaaatatctgtgggaaccatttttcctgattttccctttttttaacatcatggcaaagatgggtttttttccaacaaaatttaatttaatatctttccacttgaagattttaggtttgttttcaatacttaatgaatataaaactaaaggagaaaagccaacctggaaataatttaaactttatatgaacatttcgataagagtttgtgggattttttctgtaggataatatatttgatccgggaactcaagtgcatgggaaacatggattttgatttttaaaatctnnnnnnnnnnnnnnttaaaatcatgcttccctctattgcagtatcagttatttagtcacagaatggtattttatgtaaattaaaattaggggaatgcaatgcaggtaactggttttggaatgggaatgggcagggctttatgtttggggagttggagcagggtatcttttcatcaattagaaggaaaggttgaaacttctgaatacctttatggtgggttcccttattaattgccccttgctaaaactgcctaaccaacg

SEQ ID NO: 4216 - DNA, 451 bp, Homo sapiens
  SIMILAR (1)..(102): 731254mologous to Homo sapiens PRO2550,accession number AF130089,Smith-Waterman Score=130.
tcctgcctcagcctcctcagtagctgggatcacaggcgtgtaccagcacacccagcaaattttgtatttttagtagagacagggtttcaccatgttagccaggtagtctagaactcctgacctcaagtaatccacctgcctcagcctcccacagtgctgggattacaggcgtgaaccaccgcgcctggctgcctggcctaaatttaagattttgaaaaatgataatcaggcggctgaggcgtcttctaaaaaacaagttccattctacaatcttacggaaatctgagacatcaaattcctgtgaataaaggtaatttttaaagttttagggttttagtaaactaaactagtaattctgcagtacgattaaaatttcagaaaaatgtttttatctaaaatatagttcaaatactacaatttattaggaattttaaggcggaaacgattatgc

SEQ ID NO: 4217 - DNA, 2093 bp, Homo sapiens
  SIMILAR (2)..(427): 981254mologous to Homo sapiens Human PRO706 protein sequence,accession number AAY41742,Smith-Waterman Score=740.
gacctacggggagatggccaagatcgtggatgtccccaccaagcagcttagagctccagaccccatagactccatgctctgccacttctgccacaatgtcagctttccctgtaccagaaatggctgtgttgacatggagcacttcaaggtaattaagacccatcagatcgaggatgaaagggaaagacgggagaagaaattgtactttgggtattctctcctgggtgcccaccccatcctgaaccaaaccatcggccggatgcagcgtgccaccgagggcaggaaagaagagctctttgccctctactctgctcatgatgtcactctgtcaccagttctcagtgccttgggcctttcagaagccaggttcccaaggtttgcagccaggttgatctttgagctttggcaagacagagaaaagcccagttgaacattccgtccggattctttacaatggcgtcgatgtcacattccacacctctttctgccaagaccaccacaagcgttcttccaagcccatgttcccccttgaaaacttggtccgctttgtgaaaagggacatgtttttagccctgggtggcagttgtacaaattattatgatgcatgtcacagggaaggattctaaaaggtatgcagtacagcagtatagaatccatgccaatacagagcatagggaaaggtccacttctagttttgtctgttactaagggtagaagattattgctttttaaaggcctaatattgcttcgtgggaaccacagattggttggggttgaacagtaagcacattgctgcaatgtggtaccgtgaattgcttggtacaaaaatggccagttcacaagaaggaataagaaggtacttttatcataagccagacttccgcttaagaatgccagaataatatagttccagacctgaagttgccaatccaagtttgcactcctctgggcctggccccatgttactatgtgatggaaccagcacacctcaaccaaaatttttttaatcttagacatttttaccttgtccttgttaagaatttcttgaagtgatttatctaaaataaaggttggcaaactttttctgtaaagggccagattgtaaatatttcagactgtgtggaccaaaaggccacatacagtctctgtcataactactcaactctgtttctgaagcaggaaagccaccacagacagtacataaaggaatatgtgtagctgggttcccaggccggacaaaacagatggtgaccagatttggcccctgggctgtagtttgcctgaccccctcatctaaaaaataggctatacctacaattgcacttcccagcactttgagaacgagttgaataccacgaattattcaatggatactccagtaacttctgctagaaacacagaatttagtctgtatctgacactataacacaacttgaggggaaatatgcattgaattagaatgaatcataaaaaactgattacaagaatacttgatgtttatgatgattgtggtacaagatagttttaagttatgttctatatatttgtctgctgtagtctatttgctgtatatgctgaaatttttgtatgccatttagtatttttataggtttgggaaaatatttcctaaggacccagttttagatgactcttaattccctggtagtaatattccaatttgctgtacctgcttggtggttagaaggaggctagaagatgaattcaggcactttcttcccaataaaactaattatggctcattccctttgacaagctgtagaactggattcatttttaaaccattttcatcagtttcaaatggtaaattctgaatggtttttaaaaggggtttttggaagaactttgctattaggtagtttacagatcttaataaaggtgttttatatattagaagcaattataattacatctgtgatttctgaactaatggtgctaattcagagaaatggaaagtgaaagtgagattctctgttgtcatcggcattccaactttttctctttgtttttgtccagtgttgcatttgaatatgtctgtttctataaataaattttttaagaatacctatactata

SEQ ID NO: 4218 - DNA, 762 bp, Homo sapiens
  SIMILAR (167)..(436): 931254mologous to Homo sapiens Unknown (protein for MGC:2744),accession number BC004172,Smith-Waterman Score=419.
atagagttcgatagcccaagtggaggaattccctaagtgaaatctccccttcactgtttcagagctgaggaacagataggtttctcctgccttcaggttctaggatccgctgtggtttatgcatgtgtacacgtgtgtgtgtgtgttacccccttgcctcatgtaggtcattaagattctgggcactgagaaggggaaaaagaacagaaccaacctgatatttctgtctgggaaccgggtgctgaagtggatggagagaagtcatggaactgaaaaagcactgactgctctgcttaagtgtggagcagaggatcatgtggaagcagtgaaaaagctccagaactccaccaagatcctgcagaagaataacctgaatctgctcagagacctggctgtgcacattccccatagcctcagggaacagtccagactggggaggtgtggtcatattacacaggagaccctcctgttcttaactgtgggcgatgagaaaggtggtggactcttcttactggcagggccacctgcgtctgtggagaccctggggcccagggtggctgaggtcctggaaggcaaaggagcagggaagaaaggccgttttcagggcaaggccaccaagatgagccggcggatggaggcgcaggcgcttctccaggactacatcagcacgcagagtgctaaggagtgagggcttagggcactcacctcctgtttccacaggaatcttttggtcaataaaatagattgactcagaaaaaaaaa

SEQ ID NO: 4219 - DNA, 478 bp, Homo sapiens
  SIMILAR (294)..(410): 581254mologous to Homo sapiens Human secreted protein encoded by gene 44 clone HTDAD22,accession number AAY02693,Smith-Waterman Score=118.
tcgaacatcaggatcctttaccacacagtctcattaagctttctagcttcgtcacagcagctgtcagaaggttaagacacactaccgaaaaaaaaagtcctggaatccagggccaattatgaggccaacttttcccactacaaaacaaaaacaaaacccataggctttctttttcgtatggcagtgacagagaggagtcttactgaaaactgccaatgtactagttcctgaagatctaggcagagaaatgcggatttttttttctgtgaaaacttggaaaaccttcacctgcatatttactaagggtactaatatacatttatttttattttattttttttttgagacagcgtctctctctgaagcccaggctggagcgcaacctcggctcactgcaacctccgcctcctgggggttcaagtgattctccagcctcagcctccccaatagctgggattacaggcgcctgccaccacac

SEQ ID NO: 4220 - DNA, 1356 bp, Homo sapiens
  SIMILAR (339)..(452): 921254mologous to Homo sapiens Human secreted protein, SEQ ID NO: 6036,accession number AAG01955,Smith-Waterman Score=177.
ggcagcgtgacagctatgcccgagagttcaccaccaccgtggtctcttgctgttccgcggagctgcagactgagagggagcaacggcaagaaatatatttctgagcggtttccaagtggtgctggaagacacagtgcttttccctgagggcgggggacagcctgatgaccgtggtacaatcaatgacatctctgtgctgagagtgactcgccgtggggaacaggctgatcatttcacccagacacccctggatccaggaagccaggttctggtccgggtagattgggagcggaggtttgaccacatgcagcagcattcagggcagcatctcatcacgggcagttgctgaccatctatttaagcttgagacaacatcctgggaggtagggagatttcggagtgcgattgagctggacaccccctctatgactgcagagcaagtagctgccattgagcagagcgtccaatgaaaaaatcagagatcggctgcctgtgaatgtccgagaactgagcctggatgatcctgaggtggagcaggtgagtggccggggtttgcctgatgatcatgctgggcccattcgggttgttaacatcgagggcgttgattccaacatgtgctgtgggacccatgtgagcaatctcagtgaccttcaggtagtgtaagattctgggcactgagaaggggaaaaagaacagaaccaacctgatatttctgtctgggaaccgggtgctgaagtggatggagagaagtcatggaactgaaaaagcactgactggtctgcttaagtgtggagcagaggatcatgtggaagcagtgaaaaagctccagaactccaccaagatcctgcagaagaataacctgaaatctgctcagagacctaagctgtgcacattgcccatagcctcaaggaacagtccagactggggaggtgtggtcatattacacaggaaggagggtgattcagagttcatgaatatcattgccaatgaagattgggtcagaggagaccctccttgttcttaacttgtgggcgatgagaaaggtggtggactcttctctactggcagggccacctgcgtctgtggagaccctggggcccagggtggctgaggtcctgggaaggcaaaggagcagggaagaaaggccgttttcagggcaaggccaccaagttgagccggcggatggaggcgcaggcgctttctccaggactacatcagcacgcagagtgctaaggagtgagggcttagggcactcactctcctgtttccacaggaatcttttggtcaataaaatagatggactcagaaaaaagtaataaaagaagggtcgccgttttaaaaggaccctttgggggc

SEQ ID NO: 4221 - DNA, 569 bp, Homo sapiens
cttcgaggcagtggaccctgtttgctgatggtcaacactctggccctgctgccccatgtccctgtggagaagtgtgaaggacgggtgccttaaaccccaaaactttccagggaccccttcagcaccaggtccctgccctgttccccatggtgcttctcacccctgaacccctcagaagctacagcccgggaataagagccagatgaagccagtgaagcctggtttcccaccctctggggcaggaggggcttgggcttccctttgaccctcttccttacctttcccagatcttcaatatttgttgtgatgtaacagccataagagctgtaagaggaactgtgggctttgggagctattcttgggttgaaaggaggggtggggggagggaatgcatgcaggggtatgaaggcagcccaaggtctcccagaggctcgggaggaaacccttttggaatacatagtgttatttgttgccattactgtgtttgtgaagataagaagctgctctgtatgctaaagctttctctcctcaataaaaatataaagggtgtgtaaaaaaaaaaaaaaaaa

SEQ ID NO: 4222 - DNA, 728 bp, Homo sapiens
  SIMILAR (20)..(283): 701254mologous to Homo sapiens Human secreted protein, SEQ ID NO: 7870,accession number AAG03789,Smith-Waterman Score=291.
tttttttttttttttttgtaaagacagtcttgctctgtcgcccaggctggagtgcagtggtatgatcccggctcacagaaacctccacctcccaggttcgagcgattctcctgcctcaacctcccgagtagctaagactacaggcgcccaccatccctcccagctaatttttgtatttttagtagagacggggtttcatcacattggtcaggatagtctcaaactcctggcctcaagtgatctgcctatctcggcctcccaaagtgctgggataacaggcatgagccactgcacctggcctgtatagtatactttaatacaacttgtttttaatcctataggcttaaaaccttgctttaagtctttaaaatgaagcatatgctcaagaggaactcacataactcatgaagaagaactataaagaataaccactggaggtttattcagtagagagagacacagagatcaaagttcggggaagaaccagggtgtctctgtgccttggtttcctcaaatgaaacagggattgataagtatcttagaggtcatagttaaaagtaattaagacaacctagctcacaataagcatccaataaggccattccctctcctcgccccatccccatgctttctttctcatttgtctagaacaacactccccaagggaacctcccaagctgaagttctccatctgcaatgtccaagctgcagccactcaccctcgtgcc

SEQ ID NO: 4223 - DNA, 714 bp, Homo sapiens
  SIMILAR (523)..(654): 751254mologous to Homo sapiens PRO1722,accession number AF119851,Smith-Waterman Score=163.
ccctgaggccggacaaggcttggtatgtgtgaggggtatcatgaaagtcaccatgactgaaatggagagagtgagagtagacagcagagaagggtggggaagagaccaaatcaggagagctgggcaggagtcagaggaccttgagccaggtgggagccacaagagggaccagtgaggaaattactctaatagtccagatgagagatgctggtggctcagccctttgcagtggtattggtggtggtgagaagtggtcagttctgggtgtcattttgaaaaaagatgataggattgtgctggcatattgtatggggcacgaaataaagagaggaattgaggatgactccaaggttttcttttttttttttcttgagatgaagtcttgctctgttgtccaggctggagtgcaatggcatgatctcagctcactgcaacctgcgcttcccaggtacaagtgattctcctgcctcagcctcccgggtagctgggattacagacacgtgctactacgcctggttaatttttgtatttttagtagagatagggtttcaccatgttgtccaggctggtctcaaactcctgacctcaagtgatctgccccactcagcctctcgaagtgctggaattacaggcgtgagccaccgtgcccggccgggctgaatatcctcaacaactttttacaaatatatctaacaaaatttcaaatacatgtgc

SEQ ID NO: 4224 - DNA, 1159 bp, Homo sapiens
  SIMILAR (56)..(268): 541254mologous to Homo sapiens PRO1722,accession number AF119851,Smith-Waterman Score=143.
ccgagacagaagatcttgctctgtcaccccaggctggagtgcactgggcacgattctcagctcactgcaacctccacctcctggggtttttaagcaaattctctgcctcagcctcctgagtagctgggattacagggggcatgccacccacacccagctaaatttttggcattttaagtagagacgggggtttcaccatcttgggccagggctgttcttgaactcctgacctcgtgatccacctgcctcggcctcccaaagtgctggggagccaccgcgctgggcctctgtttgcaattcggtaaaaatgctgtcatcagcctttaattggtgtgtgtgcagactgcacaaagaaaagtggatgagaagacagaaaacacacacggtgatgataccccacagcaacaggtgctcctccaggcacttcagccgcattccgagttccattgaaacttacaacaaccttaggcacacactacttgcaggccgattttagagatgtggaaactgaggcttggagaggagaaagcaattagcccaagggtcccctcctcagaatgagctgaagatgggatttggtactcaacaccctaactgaccccagaacattagtgccttaaaacactgtgagacactaggcaccccaaacttcaaaactctgaataacctctggtgcccagtaaagttcttgaaaagcttccttaagagacacaaccatgagattcccatttttaaaatgtacagcagccgagcaaccagcatctgaaaaagccacgctgctattattaacaatgagacaacagttctctggagaaaaagagaggactattgaaacaaaacctcaatgacaggattctcttctgagagcacgattcatccccataatggacaaaatgcctcgcctcattgagacctccgcgccagtcttgaataagggaggagggtttcttcacaaccattcatttgggcctgtgagggacccagccaagatcttggcgtgcctgttctgacagcgacaccggcctcagcaaagccagacccagcagctccgatctctgctacttacagaccttggggtaatgcttggctgagatttggcaaggaaatgaattgcagaagtgatcaaggagaattccacaacgaattccagcagctggca

SEQ ID NO: 4225 - DNA, 741 bp, Homo sapiens
  SIMILAR (19)..(135): 691254mologous to Homo sapiens Human secreted protein, SEQ ID NO: 6444,accession number AAG02363,Smith-Waterman Score=136.
aagagtctgggtcgcactcttttgcccaagctgtagtgtagtggtgcgatcacagctcactgcaacctcaaactcctaggttcaagggatcctcccacttcagcctccggagtagctgggacctagtgtgtgcctccatgcctggctaagtttttaaaaattgttttagagaaagggtctcactatgctgctcaggttcccgaccatttttattagttgcctagtgtgtattctttcagggtttctatatgcagattctttctgtccctctctaatagccaacaggcaggctcccctgtaaaacatggacaaaagccactccaattttgctggccaaaaaggaaaagtgtccccggggcacaagggctgaagttaatggagagcaaagtggtaattatctgctctattagatcccctcttccctcccagcccaatttcatgggaggcttggtttataaaacactggctgtctgactaaacctcaacaacagattaaccataaatgcattcctggaatttacgttcttcccgcctcagtgttgtgtaaaattatcagggaacacagacccacaggggtcaggacaggaagcagcatcaactccgattctgttagggcagcataacatttcatttaacacagataaacgcatcttcaaagtcatcggcacagtgctacaatcttaaaatgcacaagctgatcctgttattctagtgcctgtatgaggttaatgcagctttatg

SEQ ID NO: 4226 - DNA, 1698 bp, Homo sapiens
  SIMILAR (2)..(277): 631254mologous to Homo sapiens Human secreted protein, SEQ ID NO: 7867,accession number AAG03786,Smith-Waterman Score=277.
ggagacagagactcactctgtcacccattctggagtgcagtggcgcaatcctggctcactgcaacctctgcctcccgggttcaagcatttctcctgcctcagcctcctgagtagctgggattacaggcacacgccacaatgcccggctaatttttgtatttttagtagagacggggtttcgccatgctaggctggtctcgaactcctgacctcataatctgcctgtctcagcctcccaaatgcttggattacaggcttgagccaccacgcccggccatgtgtgtccttttaagggaagtaccatatgtgactgctgatgggtaacatttcttgtatgcaggcaggaaaacctgcaggctatacgcaaggtatgtggaataaaagactgtggattgaagggggaaaagttgataatacatacccatgataagaattcatattttctctttctttggctcttcatacagaagcaagttccagcagagaaggttagcagttactgcacttaaaagtttacgattgagggtttttggttggtttttttgtttttttgttttttcatatttcactgttgctgaacattgatttagtcttccaaaatggacatcactagtaagtgcactgaatactgaaatacgctgattggcaagcatatatctgtagctagaatttttttaaccgtaattccagaatttaaaaaggtaagagatctgctttttgatagaggccttttaaaaagactatataacatttctatttggctgtttatgtgaatgctcagggaatttggacatgtgttttatacagaagtggctttttatatttcttcaagtgataaattagcattaggacatatcagatagaacaggccagtttcctgatgagattggtagagatgttacggtaggttcatccttcctttttccatgttatatgtggagaagtgttaaacttgctcaagcaaatgggagtaggagataggctgaaaatagagattgctacaccattctattttgttttcatgcctgttttttctccaatcctatatggacatttgagaaatggaccacaaatctgagagggatagagtaaaaagaggcattaatgtatgtactcacaagttagacctattttgctgttaaaataggtctggtcttgtcataggtcataggaattgtgtagtttgagttgctgcgagaaagagtcaagaacttagacttgaatgggaaggccaactggtgagggaagtggggtattatctactcaaatgttctaagctaatacaaaagaattacctggcaagcatccccctctgcccttcttgagattctgaatgaacttagaatcagatcaatggtgagacccagttatgtaactttcctttgaagttctaaaggataattgaaaataaaagtagtctggcatgtttaacagtaaggagtgacactaaaaattttgaatataacagtaatgtggcaactatttataatagacctatttatgttttgagaactaagtaaaacgcctatgaaaaattcacatagagcacgtaggcaccaaatgagaatcatttcgtgctttctaattaatgatactaggctcgtatcattgcttacaactatgtcgaaccagaactcccaatattcgcattctgaaatgtctatggccctatggctacggatggacttggtatattcc

SEQ ID NO: 4227 - DNA, 1411 bp, Homo sapiens
  SIMILAR (2)..(205): 751254mologous to Homo sapiens PRO2550,accession number AF130089,Smith-Waterman Score=262.
ttttttgggatggagtttcactcttgttgtccaggctggagtgcaatggcgtgatctcggctcaccacaccctctgcctcctgggttcaagcaattcttctgcctcagcctcccaagtagctgagattacaggcatgcaccaccacacttggctaattttgtatttttaggagagatggattttctccatgcctggcaggctgggtcttgaactcctgacctcaggtgatccacccaccttggcctcccagagtgctgggattacaggtgtgagacactgctcccggccagtttctgaataagtttaatcagatgcttgctaattagtttttcctaaaatagttggctgtatttccaattcacatttctgctttttcttcctactttccaggaaggtgttgttttgttgttttcacaattgtaaacctgaaagggacttgaacttcttgtccaaggaccagagtgggcacacactgcacacactgggcggctggtacctgcctatcctgtggtaaacttggcttccaggagtttccaagcttcagcttccactagaaaacccctccttgtgtggaacaggtctttcttcattccattcctcttgggcctggggcctcacagctctggactggcttgcctggtccttcaacttcacctacagctctcgggaagtcagttctctacctgcagagccacccaccccctactcagccccacccagcttctttgatcagacccttggaccctcaaagcccctgccagaaaccacagctgcaatgctgacctggaatgctcatggccaggcctctgctcctgacagaatgggaaacaaagacttgctggtaggcagccactgcaccacctcagccagtaatccaacacgtgtttcaatgagcaccaattgtgtaccgaggccacagagctgacttaagacagagcccctgtgctgagggttcacagtctgcccaggaagggaagatccaagttcattttacacacgtagggcttaagtgctgaagtccgcaatgcatgcgagtcgcggagtgagcaggggatggcagcacagcagcagggaagaggagcctgcttcagaacaccaggcacgattagagctacagtgttaacacacaaagggcgaatgctggcagctgagcctgggcaaggggcttgcatcccaccttcctgcatccaaaccttcaagctgcccagaactgctgggtaattcccacagggaaacatcattcttttgccaagatgctatcccactcatcccccagaatcaaactggccacttcctccaggcagccttcctcacattccagctgggacagaagtcacagggagcagagagggtgagacccttggaccctcaaagcccctgccagaaaccacagctgcaatgctgacctgg

SEQ ID NO: 4228 - DNA, 1303 bp, Homo sapiens
  SIMILAR (424)..(627): 881254mologous to Mus musculus putative,accession number AK015014,Smith-Waterman Score=324.
cccacgcgtccgaacgtatcggtttggttccgtgggccatgacacacagctctgtttatgggaccttacagaagatatccttttccctcaccaacccctctcaagagcaaggacacacacaaatgtcatgaatgccacgagtcctcctgctggaagcaatgggaacagtgttacaacacccgggaactctgtgccgcctcctctgccacggtccaacagccttccacattcagcagtctcaaatgctggcagcaaaagcagtgtcatggacggggccattgcttctggggtcagcaaatttgcaacactttcactacatgaccggaaggagaaggcaccacgagaaagatcacaaagccgaaatcatagcatgggacacaatttctagcaagaagcaagtgacaaacttgaatctagttaccaaaaccaaaaccggaccctgctaaaactctgggaacgcccctgtgtcctcgaatggaagatgttcccttgttagagccgctgatatgtaaaaagatagcacatgagagactgactgtactaatatttcttgaagactgtatagtcactgcttgtcaggagggatttatttgcacatggggaaggcctgggtaaagtggtaagttttaatccttaatgctgcaccagatctaggaacttgaataggtagtgacttttttctttttcgtgggaggggtggggtgtacaatggaattgtgaatgacacttcttattctttaatgtaaatctccaatggcatcagagccataattttggatactgcatgccatgtaattctgaatcatttgataatttaccttagagcatttaaaaaaatataatcaaactaattgcccagccaagtcagtcatcctcctgggagtatatagagtcccaaggttagcgctcctgtattagactatttcaattttaggaaaatcatgaccatgtggggaaacaatgactttaaaatgctgaaattaaaatttatgctttaactggaatattttttgcttaactactcaattagaatattgtacacctgatcaatgtgtgttcagcacagatggccatgaattgtcatttatagtccaattttttatcttaatcataaaatgtttaggaatctatgaaatttaactttaggaacaaaacgtttagcagggttgattgatattatttttacattgttctggcaatccacagaaagagaagagccttaatttttaaaacccattttagtcattttatgacaattaaagttgtttaataaacatcttttttcaaagaaaaaaaaaaaaaa

SEQ ID NO: 4229 - DNA, 393 bp, Homo sapiens
  SIMILAR (258)..(341): 531254mologous to Homo sapiens endonuclease G-like protein- 1,accession number AB020523,Smith-Waterman Score=69.
catcggcttccagccccagttaactgaattccaagtgagcctccaggacctagagaagttgtcaggactggtgttttttcctcatttggatagaactagtgatatccggaatatctgctctgtggacacctgtaagctcctggatttccaggagttcaccttgtacttgagtacgagaaagattgaaggagcccgatcagtgctcagactggacaagatcatggaccacttgaagaatgtctagaatgaactcatatgattaccctatgaggcgctactacaagaaacttcaagaacttactgctatagatcttacctctactcatatttcacagccttccttactctcatacacgacgtgcctcatctctggagcgacgcctcccttcaccg

SEQ ID NO: 4230 - DNA, 722 bp, Homo sapiens
  SIMILAR (488)..(604): 941254mologous to Homo sapiens activating transcription factor 3,accession number L19871,Smith-Waterman Score=190.
tgatgctccaggtgaagtcaaaggtgaatggggttgcccttgggtcttgaattgaaaaaaaggccgggagtgggtggctaggtaatgatcctgagatcattcctggttttcaaaaaaaggagatgtttaccagacagaatctgtttcggctttaaatgattatagttaataccaatagttatcaatttgcatattatcctcatctcaaaatccaaatgcatttttaaaattggctaacttttaatttactaatatattgccggtataattttaactttgatttttgttgttcactcacgtgtgtgtgtgtgcgtgtgtgtgtgtgtgtgtaggggttttcacacaaaagtctagagctttagtatttcggggtcttttagcgctagcattgcccttgtctgccagcttttgctggcagtaaaaggcagtgtatttgaggtaggtggcatttcttactgccctttaaatgtgtttcttttggattttacaggtagcccctgaagaagatgaaaggaaaaagaggcgacgagaaagaaataagattgcagctgcaaagtgccgaaacaagaagaaggagaagacggagtgcctgcagaaagtgagtgccttctagccttacccttcctctcgctcacgcctgtcttcaccagcttcatgtggctatcagaagaagagttagaaaaccccctacttggttatagtttcccaagaagggccttgta

SEQ ID NO: 4231 - DNA, 1041 bp, Homo sapiens
  SIMILAR (758)..(898): 821254mologous to Homo sapiens PRO2550,accession number AF130089,Smith-Waterman Score=225.
ttttttttttttttttttctgcccaagtaactttattcgtgtcttctcaaacatttcagatcaaataatgccattttctaatcttgaaaccagcaagattagaaagagaatgaggccatcctttcactcagactttcccagtgtactcaagattgtattccaggaacgaagtcaaaccctggcctcacttcttaatttagaattaaactagaatccaggtcccattgcataactgcctaattgttttgcaacccagggagccacaaacggaagctaaaacttagcctttctaaagttatcctaagtttttactatctaaccaggcactttctcgatttttttttccccttaaaactcctaaaagtacaggtgttggtatgtcctggccggcatctggaagggctggccccgggaaatcaggggcctatctagcggggaatggtctggggcagtcacccccatcctggggggcagataggcaaaggggctgctgggcagggtgtcaagacaacacgggtacccgcaacagcagtcccgagggtctgagatttctcaatggtcagcagggtgggctggaagagtatcaccagagccactcaggaaccagccaatgcggaatggctgggtttcttattgaacatgaaatgcttcctctttggcctggactgttttgctaaaattgttagtgggttttggggcaggccagtgtatgggaaacttttttttttgttgggggggggcgatggagtctccctctgttgcccaggctggagtgcagtggcgcaatcttgggtcactgcaacctccacctcccgggttcaagcgattctcctgcctcagcttcccaagtagctgggactacaggcacgtgccaccacacccggctaattttttgtatttttagtagggatggggtttcacgatgttggccaggctggtcttgaactcctgacctcaggtgatccacacgcctcggcctcccaaagtgctgggattacaggcgtgagcgactgtgcctggccagcagctccagtttcttaa

SEQ ID NO: 4232 - DNA, 1719 bp, Homo sapiens
  SIMILAR (3)..(101): 931254mologous to Mus musculus putative,accession number AK010512,Smith-Waterman Score=170.
tacgaagatgtctttgtgcgggctatttcaaaaatgtagctcgaagatcctgttggagaacgttttgcacaatggatggtcgtggaagcccagttcacatttcatccttcctcagcacttcatgaacaggaaaccaaacttgaatggatcatttttcatgaggtattggttaccaccaaagtctacgcaagaattgtatgcccaatccgttatgaatgggtaagagacttgttacccaagttgcatgaatttaatgcacatggatttgagcagtgtggcccgacgtgaagtgagagaagatgcaagaaggagatggacaaataaggaaaatgtaaagcagctaaaggatggaatatcgaaagacgtcttaaagaaaatgcaaagaagaaatgatgacaaatccatatctgatgcacgggctcgtttccttgagagaaagcagcagaggacccagggaccacagtgacacacgaaagggaaacaggctaaggtggtgaacccctcccaattcaggaagtggggaaaaggatccccgggaaatgtgcctccctacctttgcccagttatttcagaccagcacctacccaagaggaggtggtcagcacttgttattggccctatgaacctaaaagcaaatcaaagcctcataaatcaaagcctcatcagttcccataaatgccagttgtccaaagaaaagatttgggttgccatagtccataagccatgatacatgaaaccaatgaaagacagtacatgtaataatattttcctcagtacaatttttgctggccttaactggtatcaaacgctgtcattgagatgttttcacagaacatcgacttgtatttaatcagcgtgtactccatttgcattgaagcattaacaaattacctctcttaaaatctctttaaggccttcttgttgctgttagaatagtgctatatatcaggtatgtgaccatttatttcagaaggctgaacataagaggtttctactcagcaatacttagatgtctaactgtttaattgctacagagctttatagatatttagagaaaagacttaatcaattagtaaataaaattgcctatggcgtggattctttcttgaattaatattaatccttaaattgatttttctggggattataccaaattccctttttatataaaagtatattgtttaaaacagtagctatagccattaaccaaaggacagatgatatatatatatatgatatatatatatatataagttcttttttagctgtaccctacgtacttatatcagcaccatgtatgtaggtgtgatagtactttcaaaacagcgcctccaacctggcctactctgttatttccaacctgtttgggtaggggcattttaactttcaattatggccaaacttgggatgggatttttcgaagccagacaacactatttcatcggtgtttcaaaattggaaccttgaggcttagttagtatcacactcaggccacactcagcacttgcccactcttgtttactgccttgtattctagttatttgtgtatttgtcctcccctcactagattatacgctccttgtgggcagggactgtgtcttttttcatctttgtatctttcatgcacctagcatagtgctttgcacatagtagtcactcagtgtttgttaaataaagctattagtgtcattaaaattcaaaaaaaaaaaaaaaaaagtt

SEQ ID NO: 4233 - DNA, 689 bp, Homo sapiens
  SIMILAR (621)..(674): 551254mologous to Homo sapiens PRO2852,accession number AF130079,Smith-Waterman Score=52.
  misc_feature (1)...(689): n = a,t,c or g
tttcgtggcggagtaaggcgtgccgctgcaaactggtttctggttcgggggcgagcagcccccgggaggccgagtgcatctgttggaccgtgcgaggagaagaaaaaaaatatcggccagaggagaggaactaaccgaacattcttcctccctaccttatagaggggagtggtcatctacactaaagcaaagtgttagnnnnnnnnnnnnnnnnnnnnnnnnnnnnnnnnnnnnnnctccttatcacaggaagacaatattccttgacctttaggcgcttttatattcatctcagaaacaaaattctgaactcaggacttggcaaaccaccgctgaaacttcacttctacacagaggctttctttgccagaaacccagaccagatggagtttcactctgtcgcccaggctggagtgcagtggcacgatctcggctgactgcagcctctacctgctgggttcaagcaattcttctgcctcaggttcctgagtagctgggattacaaggtgcacaccaccatgcctggctggtttttgtatttttagtagagacgaggtttcaccacgttggcgaggctggtcttgaactcctgacctcaagtgatccactgcctcggcctccgaaaatctggaattatagatgtgagccactgcgccaggcctgtaattttatgtatctttatgtgatta

SEQ ID NO: 4234 - DNA, 419 bp, Homo sapiens
  misc_feature (1)...(419): n = a,t,c or g
nnnnnnnnnnnnnnnnnnnnncagttggcccactctttattaaagccaggccctcctgctgacagctgcaggacagctgttggggcccaggagggacggaaacagcaaatcctgtcccgcagggagaggaaaaacccagggccgaggtcattacccagcaccccaatgcctccctgggacccctgttttcctaaccaccccgccccgaaacctcaccaacctcacccagccaggctaactgaccgccaccacccanggccttttcccacccaccaactaccgtgcctcctacccgcccccagccctggcagcctggttgttgcgctcagcccccaaggccatgtttacactaacgtggagggaactaggtctattagggaatgcagctgcaccaaaaatccgtttcctggccccattca

SEQ ID NO: 4235 - DNA, 1787 bp, Homo sapiens
  misc_feature (1)...(1787): n = a,t,c or g
ctggagtaggtgagccctggatgagccacatggtgctggggcctctgaagaaagggctggggatgtgtttggaccaccacgaagggtacctggcccctcactctggcctctggaagcctggccaacatcttcacaaaaagtaatgccccaagtcaggtgtttacactacatcaagtgtggggcagcgtgggggccaccaaggaatacggtgggcatgggcagcacggggccacactggcctggggccaactcctcatgggccatcctaggacccattctaatttcttaaaagagaaaatcttttaaaaaatgtttgcagaaacaagttggacctgaggccaaacagagcctccccaacgggttcccaggagtggcgacagcatggagtccagtcagaagttcagtttgtccactctttattaaagccaggccctcctgctgacagctgcaggacagctgctgggacccaggagggacggagacagcagatcctggccatacagggctagagctgagattcccagagccccccaagcccaccttgcccttggccctttctgaggctcctgtcccgcagagagaggagaaaacacagggccgaggtcattacccagcaccccaatgccttcctggggacccttgctctcctcaccaccccgccccgcaacctcaccaacctcacccagccaggctaactgaccgccaccacccaggccttcttcccacccaccaactaccgtgcctcctacccgcccccagccctggcagcctggctgctgcgctcagcccccaaggccatgtctacactaacgtggagggaactaggtctattagggaatgcagctgcaccaaaaatccgtttcctggccccattcacagtggcctcaaaagcgtgaggggaatgggtcttcacatgaaatacaccccagctgcccgcccagtggcttccatgggcccagtccagagggtaggatgcccaccnaggcaggggccttgcatagttgggtgcctggtttgtcactgagccacggctcaggtccacaccnccccccgaggtggacagccactgtgcaagctgccaggccacgggtgcctccactaaccaatttgtgaaatgggactctaaacagaaacactacttgttctaatgttaatgaacaaaaaccaaattaaaaggaacctgcgagtgtcctaggcccctgattaatgggatgtggggaaaagatccttcgacccaacctcaagtcgctctaagtgaagcgctgggctccgagaacgggccgtctgcctgctcccggagaggggcagcccagggaagtgaaagctggggctcagggctgcgagggcctcgggcgcccgtagatgtctgagtttgcccactccggctgagggagacgaaagtaccaaggactgagaggacaagcagagaccaaaaccgaaccggtgcggagggtgccggggtgacctcggtgcaagtgtgggtagagaagaggaggcggctcgagaataaggcttcaaactccctcaggaccctgtcaacacccgcgagacccgtctgcctggccgtaagtttggtatctggctttttctcctcctagattcttcaggccatacaagaagtggaaataaatatccgcagacgacaagtttcaagttttcccactggagctccgccctttggaaacctacaaggcctcccctcgccgcgcgcagttaaaccttcgggacagactcggatgaccgggagggcccaagtctctcactgaggaatgggaagaagtggtcag

SEQ ID NO: 4236 - DNA, 816 bp, Homo sapiens
  SIMILAR (88)..(804): 851254mologous to Mus musculus putative,accession number AK005739,Smith-Waterman Score=1162.
ccatggcgacgcgggacgcggcggtggaggcggttgctacccacttgctagaggcgctgcgggtgtgatccaggctggggcgagaccatgtcggacctgggctcggaggagttggaggaggagggagagaatgatattggggaatatgaggggggtcggaatgaggcaggcgaaaggcacggacgtgggagggcacggctacccaacggggacacctacgaagggagctacgaattcggtaaaagacatggccaggggatctacaaatttaaaaatggtgctcgatatatcggagaatatgttagaaataaaaagcacggtcaaggcacttttatatatccagatggatccagatatgaaggagagtgggcaaatgacctgcggcacggccatggcgtatactactacatcaataatgacacctacactggagagtggtttgctcatcaaaggcatgggcaaggcacctatttatacgcggagacgggcagtaagtatgttggcacctgggtgaacggacagcaggagggcacggccgagctcattcacctgaaccacaggtaccagggcaagttcttgaacaaaaatcctgttggccctggaaagtatgtatttgatgttgggtgtgaacaacatggtgaatatcgtttaacagatatggaaagaggagaagaggaagaggaggaagaattagtaactgttgttccaaaatggaaagctacccaaatcactgaattggccctgtggacaccaactctccccaaaaagccgacctctacggatggacctggccaagacgctccaggagctgagagg

SEQ ID NO: 4237 - DNA, 774 bp, Homo sapiens
tagggggtacaacgggggcacttccaggaggctaaaggatctgggagatgcctttcttcgctaaacgtcccccatccatctcctccttcagctggcatggacccatcttctccagtgccaaacccagaggaggcgggcggccctcttgcccaggtaccctctgcagcgcttgcccaggtcgcaccaggaccggttcccatctcttctctccttgagggacccactcgcatcgttgcccttttaagaaagaggaaattcttctcataaacaagcgtccggacctgagcgcggagccaggccgcctgccctgctgggtccccaggaaatcggggggtcttccaagttccaccacccggcccaggttcaactctagggaaaggcctgttggcctctcctcgctgcggccctccgcaggtcctgggctggggtctgagggacccgacgaggctggaggagggaccttgggggagcctagaaacacgcctagggaaccgtctataaagtgcagcccctgaatggggcgaatgggtgcccagccgctccctaaggcagagggggctcccccgcccacacagcttcctcccacccactctccccgaaggattctggggcccctgggcgcgagccccgagcgcccgcctccccgcgtcgttccgcctggcggggaggggtgaggccggggcgggatggcgggcgtcgggaccgtctctgcccctagggggagcagtcagcagtaagggagcggtaacggcgcggcgtgggagtcgcggccgc

SEQ ID NO: 4238 - DNA, 830 bp, Homo sapiens
  SIMILAR (33)..(179): 631254mologous to Homo sapiens neuronal thread protein AD7c- NTP,accession number AF010144,Smith-Waterman Score=144.
taaattttttttttttgagacagagtttcactctgtcacccaggctggagtgcagtggcgtgacctcggctcactacaacctctgccttccgggttcacgccattctcctgcctcagcctcctgagtagctgggactacaggcacccaccaccacacccagctaactttttatatttttagtagagacggggtttcaccctgttagccaggatggtcttgatctcctgacctcatgatccacccacctcagcctctcaaagtgcagggattacaggtgtgagccacggcgcctggcctaaaagcatctttttccttaatgcagaggttatgttgtattattagcataaatgttttttttctgggaatgctttatttccaccacagcaccaatacctggaatccttcccctggaatggtggatcgatttccagatggatgactatttaaaatgtgtatatttgcagattatccttaaagggccacctcatgccttctaatttatgtcttacggataaaaaattcaaaatgaagcataaagtaaaaactgtgtccagctttacaagtggacgcttagtaatggctgaggcaatatgtttaatgtagccaaattttacttatttgtccatgatccagtttttcacagtgcttgttaagtgctggtaattaggaaggtgggacatggtttaggtcaaaacttggaccagaaaccaacttcctttgaaacagctctaccagttataagagcaatatgctgttaggtgaagaactgtttaacagaaatatattatgtttttgcaaacaggcagctgatccaaaattgtgttgaaac

SEQ ID NO: 4239 - DNA, 698 bp, Homo sapiens
  SIMILAR (32)..(313): 731254mologous to Homo sapiens Human secreted protein, SEQ ID NO: 6953,accession number AAG02872,Smith-Waterman Score=339.
gtatgtgtgtgtggcttttgttttgttttggagacagagtctcgctctgtcacccaggctggactgcagcggcaccatctctgctcactgcaacctccgcctcctgggttcaagggattctcctgcctcagcctcccaagtagctgggattacaggtgcccaccaccacgcctggctaatttttgtatttttagtagagatggggtttcaccacgttggtcaggctggtctcaaactcgtggcctcaagtgatccaccagcctcagtctcccaaagtgctgagatgacaggcgtgagccaccacgccttgcctgggtgatccaagttttaagaaccaaggtagtcgtcctgagcaggcaatgattctagcctctgaccctcaggcggaaatctaggtgttctcagaaagtgtttagggagtggtttatgagctgctcgcagtcctagcagaggcaagaatagacaaagtgtggtgttagtagctgaaagcgctaaaattccgcccccgcaacgggtatttatgagtgacaggggtggggcctggacataagcaattttcccctggatctagccacaggattactgatgggtgatgatctgttaggccgcgtagctaagcagctaaggagacaggaggccagggctttaaaagttagagcatgctcaacagcaagagctaagcattagcattctgtgat

SEQ ID NO: 4240 - DNA, 467 bp, Homo sapiens
  misc_feature (1)...(467): n = a,t,c or g
catccctggttttaaaacattaaatggggattacggtttttcgccnnnnnnnnnnnnnnnnnatgannnnnnnnnnnnnnnnnnnnnnnnnnnnnnnnnnnnnnnnnnnnnnnnnnnnnnnnnnnnnnnnnnnnnnnnnnnnnnnnnnnnnnnnnnnnnnnnnnnnnnnnnnnnnnnnnnnnnnnnnnnnnnnnnnnnnnnnnnnnnnnnnnnnnnnnnnnnnnnnnnnnnnnnnnnnnnnnnnnnnnnnnnnnnnnnnnnnnnnnnnnnnnnnnnnnnnnnnnnnnnnnnnnnnnnnnnnnnnnnnnnnnnnnnnnnnnnnnnnnnnnnnnnnnnnnnnnnnnnnnnnnnnnnnntcctgactttttattttcagctataaaacaattatgagagccaaaggagccaggatcaccttccaaaacattttgttttgtacttctctaatttatgagcgnacgcgtggg

SEQ ID NO: 4241 - DNA, 2059 bp, Homo sapiens
  SIMILAR (165)..(509): 801254mologous to Homo sapiens activating transcription factor 3,accession number L19871,Smith-Waterman Score=460.
gcagccaggcgcgcactgcacagctctcttctctcgccgccgcccgagcgcacccttcagcccgcgcgccggccgtgagtcctcggtgctcgcccgccggccagacaaacagcccgcccgaccccgtcccgaccctggccgccccgagcggagcctggagcaaaatgatgcttcaacacccaggccaggtctctgcctcggaagtgagtgcttctgccatcgtcccctgcctgtcccctcctgggtcactggtgtttgaggattttgctaacctgacgccctttgtcaaggaagagctgaggtttgccatccagaacaagcacctctgccaccggatgtcctctgcgctggaatcagtcactgtcagcgacagacccctcggggtgtccatcacaaaagccgaggtagcccctgaagaagatgaaaggaaaaaagaggcgacgagaaagaaataagattgcagcctgcaaagtgccgaaacaagaagaaggagaagacggagtgcctgcagcttcagtattagcagagccacaggccgcctctgtggcatcaccagggtttctctgaagaagagggtctgcattttcctaaacccagtgctgctctcccatctcccatcttcctctcgcagcttgatgagccccggtgtgtcccaggagtcggagaagctggaaagtgtgaatgctgaactgaaggctcagattgaggagctcaagaacgagaagcagcatttgatatacatgctcaacctttcatcggcccacgtgtattgtccgggctcagaatgggaggactccagaagatgagagaaacctctttatccaacagataaaagaaggaacattgcagagctaagcagtcgtggtatgggggcgactggggagtcctcattgaatcctcattttatacccaaaaccctgaagccattggagagctgtcttcctgtgtacctctagaatcccagcagcagagaaccatcaaggcgggagggcctgcagtgattcagcaggcccttcccattctgccccagagtgggtcttggaccagggcaagtgcatctttgcctcaactccaggatttaggccttaacacactggccattcttatgttccagatggcccccagctggtgtcctgcccgcctttcatctggattctacaaaaaaccaggatgcccaccgttagattcaggcagcagtgtctgtacctcgggtgggagggatggggccatctccttcaccgtggctaccattgtcactcgtaggggatgtggagtgagaacagcatttagtgaagttgtgcaacggccagggttgtgctttctagcaaatatgctgttatgtccagaaattgtgtgtgcaagaaaactaggcaatgtactcttccgatgtttgtgtcacacaacactgatgtgacttttatatgctttttctcagatctggtttctaagagttttggggggcggggctgtcaccacgtgcagtatctcaagatattcaggtggccagaagagcttgtcagcaagaggaggaacagaattctcccagcgttaacacaaaatccatgggcagcatgatggcaggtcctctgttgcaaactcagttccaaagtcacaggaagaaagcagaaagttcaacttccaaagggttaggactctccactcaatgtcttaggtcaggagttgtgtctaggctggaagagccaaagaaatattccattttcctttccttgtggttgaaaccacagtcagtggagagatgtttggaacacagtcagtggagctggtggtaccaggtttagcattattggatgtcaaaagcattttttttgtcatgtagctgttttaagaaatctggcccagggtgtttgcagctgtgagaagtcactcacactggccacaaggacgctggctactgtctattaaaattctgatgtttctgtgaaattctcagagtgtttaattgtactcaatggtatcattacaattttctgtaagagaaaatattacttatttatcctagtattcctaacctgtcagaataataaatattgtggtaaaa

SEQ ID NO: 4242 - DNA, 2096 bp, Homo sapiens
  SIMILAR (195)..(311): 641254mologous to Homo sapiens Human secreted protein, SEQ ID NO: 7870,accession number AAG03789,Smith-Waterman Score=120.
ttttttttttttttgagatataagagtctcggctcagtcgcccaggctggagtgcagtggggcaatcttggctcactgcaacctctgccttccgggttcaagcgattcttgcgcctcaacctccccagtggctgggattacaggcatgtgccaccacacccagctaattttttttgtatttttagtagagacaggggttcaccatgttggccagggctgggctcgaactcctgacttcaggtgatccacccacctcagcctcccaaagtgctgggattacaggcatgagccaccgcaccgggccagtttcctgactttttattttcagctataaaacaattatgagagccaaaggagccaggatcaccttccaaaacattttgttttgtacttctctaatttatgaggcattctttcttctcaaagcaggatattacagtgcagattaaaactggatattaaagttaatggtgacaaattattaagtagtttgaagaaatccttagaatatcagataaagagagacttaatggcagaagaagaagtctactggggttcaaagcttaggttttatatttctgccatggtatctcaacactttctctgggatagtacgatgccctaaaaaatacctgtgttaggcagacaagtctaaatctcctttctcaggacaataggacaaaactgaacttgaggcaatagttgaagaattttaccccgtttttcaagtttaattttcttgagatcagaaaagtaaaattagaaagtagaatccttcatgtaaaaaaatatatgcgtatcacaatttattaaactctaacatctaagagcaaaaacaccaggattaagtaagaacatgcatgaactaaaatttacatagatattcaaagtaagttaaatttaccagagtcctgcatctggcctctcccatgccattatcgctattttcgcaatttgttttgttcaggaagcctctgattttaatatttaaagtgtcacctgagaagagtaacctcaattcttcatgttttctcaacaatcttagaggtgttggacatcattaataaaatatactaaattatcagagaacttaagaacgctaagattctgatgagttcctttaccattttcagtcactttctaaaagggatttaacttcacattatcaaataacattttacactaaaaacacaatttatatagccctaaaataatattacttgagagatctaaatgaattccaccaatgcaaacgaagtttatatactgtattagtaatttgataccacggtattccatggagaaaaaggcaaagagaatctaaatatttagatctgtgaaagatactagaaaaaaatagatttttaaatgcttctgatcctctcaaaatactcttgattttgactctatagtctatagaacacacaaaaaactgtaaaatgcatttgggaagagatcatgccatactcaaagaaaattctacaaattttgacagcattaaaaaaactgacttaagatatattttgttattgagaaaaaagtgtgcacattcaagaacataggatgtgtaatatttgtgataaattaagtcatactttgtgcttatactatgccctttattcaggagtgcaaaacacttaatcaaaaagagcatccttcacatatttaaagagtacattgaggcacagaaagtttgcccaaggcaagatagaaagtcgggtttatagacacaaaatgatctagaattcttcatgtccaattccttaaaatacaaactgtagaatatttgtaatgcctccatcttattttatcaaacattagtaattttactattataagtttatgcataagtactgtgtgataggtaatgcccataaggtttttatcatgttttaaggtaacttgtgcatggaataggaaaagttaatcaaatgtaatcaattcgcttttgctttttaacaaaacttaaataaatgagctatttgaggacagttctggaaattcttgccttgatttttctccaagattttagatatgtagttcacatgtgaacattaatatatgaccaattattttatttattggcctctagttct

SEQ ID NO: 4243 - DNA, 6126 bp, Homo sapiens
  SIMILAR (1)..(126): 1001254mologous to Mus musculus nuclear body associated kinase 2a,accession number AF170303,Smith-Waterman Score=213.
caaactggactacaagcaacaacaaagcattctggattccctgtgaggatggataatgctgtaccgattgtaccccaggcaccagctgctcagccactacagattcagtcaggagttctcacgcagggaagctgtacaccactaatggtagcaactctccaccctcaagtagccaccatcacaccgcagtatgcggtgccctttactctgagctgcgcagccggccggccggcgctggttgaacaagactgccgctgtactgcaggcgtggcctggaagggactcaagcaaattctcctgccttcaaactttgggcaacagttggcctgggggtaagctctacacaactcttgtccagcccacagcaatgattccagaggccatggggagtggacagcagctagctgactggaggaatgcccactctcatggcaaccagtacagcactatcatgcagcagccatccttgctgactaaccatgtgacattggccactgctcagcctctgaatgttggtgttgcccatgttgtcagacaacaacaatccagttccctcccttcgaagaggaataaagcagtcagctccagtctcttccaagtcctctctagatgttctgccttcccaagtctattctctggttggggagcagtcccctccgcaccacatcttcttataattccttgggtccctgtccaagatcagcatcagcccatcatcattccagatactcccagccctcctgtgagtgtcatcactatccgaagtgacactgatgaggaagaggacaacaaatacaagcccagtagctctggactgaagccaaggtctaatgtcatcagttatgtcactgtcaatgattctccagactctgactcttctttgagcagcccttattccactgataccctgagtgctctccgaggcaatagtggatccgttttggaggggcctggcagagttgtggcagatggcactggcacccgcactatcattgtgcctccactgaaaactcagcttggtgactgcactgtagcaacccaggcctcaggtctcctgagcaataagactaagccagtcgcttcagtgagtgggcagtcatctggatgctgtatcacccccacagggtatcgagctcaacgcggggggaccagtgcagcacaaccactcaatcttagccagaaccagcagtcatcggcggctccaacctcacaggagagaagcagcaacccagccccccgcaggcagcaggcgtttgtggcccctctctcccaagccccctacaccttccagcatggcagcccgctacactcgacagggcacccacaccttgccccggcccctgctcacctgccaagccaggctcatctgtatacgtatgctgccccgacttctgctgctgcactgggctcaaccagctccattgctcatcttttctccccacagggttcctcaaggcatgctgcagcctataccactcaccctagcactttggtgcaccaggtccctgtcagtgttgggcccagcctcctcacttctgccagcgtggcccctggctcagtaccaaacaacaagttgccacccaaatcttacattgggtctttccgaggctcaacaatttacactggatacccgctgagtcctaccaagatcagccagtattgctacttatagctggtgagcatgagggaggaggaatcatggctaccttctcctggccctgcgttcttaatattgggctatgggagagatcctcctttaccctcttgaaaatttccttagcccagcaacttgttcctgccaggggccccactgaagcagaaggtttttcctctgggggaacctgtcctcagtgttgactgcattgttgtagtcttccccaaagtttgcccctatttttaaatttcattatttttgtgacagtaattttggtacttggaagagttcagatgcccatcttctgcagttaccaaggaagagagattgttctgaaagttaccctctgaaaaatattttgtctctctgacttgatttctataaatgcttttaaaaacaagtgaagcccctctttatttcattttgtgttattgtgattgctggtcaggaaaaatgctgatagaaggagttgaaatctgatgacaaaaaaagaaaaattactttttgtttgtttataaactcagacttgcctattttattttaaaagcggcttacacaatctcccttttgtttattggacatttaaacttacagagtttcagttttgttttaatgtcatattatacttaatgggcaattgttatttttgcaaaactggttacgtattactctgtgttactattgagattctctcaattgctcctgtgtttgttataaagtagtgtttaaaaggcagctcaccatttgctggtaacttaatgtgagagaatccatatctgcgtgaaaacaccaagtattctttttaaatgaagcaccatggattctttttttaaattattttttaaaagtctttctctctctgattcagcttaaatttttttatcgaaaaagccattaaggtggttattattacatggtggtggtggttttattatatgcaaaatctctgtctattatgagatactggcattgatgagctttgcctaaagattagtatgaattttcagtaatacacctctgttttgctcatctctcccttctgttttatgtgatttgtttggggagaaagctaaaaaaacctgaaaccagataagaacatttcttgtgtatagcttttatacttcaaagtagcttcctttgtatgccagcagcaaattgaatgctctcttattaagacttatataataagtgcatgtaggaattgcaaaaaatattttaaaaatttattactgaatttaaaaatattttagaagttttgtaatggtggtgttttaatattttacataattaaatatgtacatattgattagaaaaatataacaagcaatttttcctgctaacccaaaatgttatttgtaatcaaatgtgtagtgattacacttgaattgtgtacttagtgtgtatgtgatcctccagtgttatcccggagatggattgatgtctccattgtatttaaaccaaaatgaactgatacttgttggaatgtatgtgaactaattgcaattatattagagcatattactgtagtgctgaatgagcaggggcattgcctgcaaggagaggagacccttggaattgttttgcacaggtgctggctggtgaggagtttttcagtgtgtgtctcttccttccctttcttcctccttcccttattgtagtgccttatatgataatgtagtggttaatagagtttacagtgagcttgccttaggatggaccagcaagcccccgtggaccctaagttgttcaccgggatttatcagaacaggattagtagctgtattgtgtaatgcattgttctcagtttccctgccaacattgaaaaataaaaacagcagcttttctcctttaccaccacctctacccctttccattttggattctcggctgagttctcacagaagcattttccccatgtggctctctcactgtgcgttgctaccttgcttctgtgagaattcaggaagcaggtgagaggagtcaagccaatattaaatatgcattcttttaaagtatgtgcaatcacttttagaatgaatttttttttccttttcccatggggcagtccttcctgcacatagttgacattcctagtaaaatatttgcttgttgaaaaaaacatgttaacagatgtgtttataccaaagagcctgttgtattgcttaccatgtccccatactatgaggagaagttttgtggtgccgctggtgacaaggaactcacagaaaggtttcttagctggtgaagaatatagagaaggaaccaaagcctgttgagtcattgaggcttttgaggtttcttttttaacagcttgtatagtcttggggcccttcaagctgtgaaattgtccttgtactctcagctcctgcatggttctgggtcaagtagaaggtactggggatggggacattcctgcccataaaggatttggggaaagaagattaatcctaaaatacaggtgtgttccatctgaattgaaaatgatatatttgagatataattttaggactggttctgtgtagatagagattgtgtcaaaggaggtgcaggatggagattgggagatttcatggagcctggtcagccagctctgtaccaggttgaacaccgaggagctgtcaaagtatttggagtttcttcattgtaaggagtaagggcttccaagatggggcaggtagtccgtacagcctaccaggaacatgttgtgttttctttatttttttaaaatcattattattgagttgtgtttttcagcactatattggtccaagatagcccaagcagtttgtataatttctgtcactagtgtcatacagttttctggtcaacatgtgtgatctttgtgtctcctttttgccaagcacattctgattttcttgttggaacacaggtctagtttctaaaggacaaattttttgttccttgtcttttttctgtaagggacaagatttgttgtttttgtaagaaatgagatgcaggaaagaaaaccaaatcccattcctgcaccccagtccaataagcagataccacttaagataggagtctaaactccacagaaaaggataataccaagagcttgtattgttaccttagtcacttgcctagcagtgtgtgggctttaaaaactaggagatttttcagtcttaggtctgcaaactgggcatttccgattttccaggcataaaaatccacctgtgtctggctggaatgtgtatggtatgtggctcactgtgggctttaggattctgtcccgggggtttaggccctgttgggccctgacaaggaagggaaggaagcctgggttgaatttagtgaggcagctggcctggggtcacagtgaacctgaaccttcaaaccagccttaagggcttaaagtcctctctcagaacttgggcatttccaacttttttcctttccgggtgagagaataagcggagaagggttcagcggagccgctctgggctcatagggacacttggtcactccagagttcttaatatctcccaggaggacgatattattctcagtgctcagctgaaataccaaccccaggaataagaactccatttcaaacagttctggccattctgagcctgcttttgtgattgctcatccattgtcctccactagaggggctaagcttgactggcccttaagccaggcaagcacaagtaatgtgtgttttgttcagcattattatgcaaaaattcactagttgagatggtttgttttaggataggaaatgaaattgcctctcagtgacaggagtggcccgagcctgcttcctattttgattttttttttttttaactgatagatggtccagcatgtctacatggttgtttgtgcttaaactttttaatttaatgtgtggtttcaattcaaggcttgaaaaattaatctccacctccatgtagccagtaccattatatgtacattaatatgtaatgttagtatttctgcctttgaatcctttgatattgccaatggaatttcctacttttaataaatgtatttggatatgcccagttattgtgtgccgatttaaaactttttttggccttcccccccttttttgggttgtgccgccttccctttaaccaacaagccctcctagaaacagatagtttcctgagaattacctgagcctatgtttgtaatgccagatgtaccttagggagtatgtaaaataatcattttaacaaaagaaatagatattttaaattttaatactaactatgggaaaagggtcccattgtgtaaaacatagtttatctttggattcaatgtttgtctttggttttacaaagtagcttgtattttcagtattttctacataatatggtaaaatgtagacgcaattgcaatgcatcaataaaatgggtcaattttctgaggagaacgcgggatttcccattgttttcattttgtaacaaaaataaatggtgtgggcccttttttattaaaccaaa

SEQ ID NO: 4244 - DNA, 434 bp, Homo sapiens
gagttaaggtataaacgttggcctgggtggaaagcagacaccccccaagcgcagaacagtcaaatgggttggtgttggcaagtcaagagagtcgatgatccagctgttttagtcacagactgagctgatcccaacaggccctggcagcgtctggacttgtgtaaacagcagcagtcacgttcctcggccgccacaaccaacaccaaagcaggaaaaccattttctgtacttttatatttctgttcaacctgttggtttctacaatgattttaaacattggaaagccagccttgtgtatatttttaaaaattatattcaaaatgagccaaagtgctcagagaccttctatgacacattagtgtcacatggttgcgtgtccagccgaagcagtgtaataaacatctccaatggccactgaaaaaaaaaaaaaaaaa

SEQ ID NO: 4245 - DNA, 1429 bp, Homo sapiens
  SIMILAR (2)..(907): 781254mologous to Mus musculus adenylosuccinate synthetase,accession number M74495,Smith-Waterman Score=1173.
tgacagagcccatcttgtgtttgattttcaccaggctgtcgacggacttcaggaagtgcagcgccaggcacaagaggggaagaatataggcaccaccaagaagggaatcggaccaacctactcttccaaagctgcccggacaggcctccgcatctgcgacctcctgtcagattttgatgagttttcctccagattcaagaacctggcccaccagcaccagtcgatgttccccaccctggaaatagacattgaaggccaactcaaaaggctcaagggctttgctgagcggatcagacccatggtccgagatggtgtttactttatgtatgaggcactccacggcccccccaagaagatcctggtggagggtgccaacgccgccctcctcgacattgacttcgggacctacccctttgtgacttcatccaactgcaccgtgggcggtgtgtgcacgggcctgggcatccccccgcagaacataggtgacgtgtatggcgtggtgaaagcctataccacacgtgtgggcatcggggccttccccaccgagcagatcaacgagattggaggcctgctgcagacccgcggccacgagtggggagtgaccacaggcaggaagaggcgctgcggctcggctcggctcgatcgattctaagatatgctcacatggtcaacggattcactgcgctggccctgacgaagctggacatcctgggacgtactgggtgaggttaaagtcggtgttctcatacaagctgaacgggaaaaaggattccctatttcccaggctaaccagggagatgcttcaagaaaggtcgaaagttgaagtatgaaacgctgcctgggtggaaaagcagacaccacaggccgcccaggaaggtgggaggacctgcccccacaggcccagaacctacatccgctttgtggagaatcacgtgggcagccgcagtgggtatcattaccagtcttttctgctctctcagtcaaatgggttggtgttggccaagtccaagagagtccgatgatccagctgttttagtcacagacttgagcttgattcccaacagggccctggcagcggtctggacttgtgtaaacagcaagcagtcacgttccttcgggccgccacaaccaaacaccaaagcagggaaaaccattttctgttacttttatatttccggttcaacctgtttggtttctacaatgattttaaacgattggaaagccagccttgtgtatatttttaaaaaattatattcaaaatgagccaaagtgctcagagaccttctacgaagtcaatgtcgaggagggcggcgttggcaccctccaccaggatcttcttgggggggccgtggagtgcctcatacataaagtaaacaccatctcggaccatgggtgtgatccgctcagcaaagcccttgagccttatgag

SEQ ID NO: 4246 - DNA, 381 bp, Homo sapiens
  SIMILAR (177)..(67): 641254mologous to Homo sapiens Human secreted protein, SEQ ID NO: 7437,accession number AAG03356,Smith-Waterman Score=109.
gccttctgagtagccgggaccacaggcatgtaccaccacacccagccaatttcttttgtagagatggggtttagccatgttgcccaggctggccttgaactcctgggcttaagcaatccacccaccttggccccccaaagtgctgtgatcacatgtgtgagccactgtgtccagtcgacagtagcctttttactgtgatgtcaataaaccaacatctgaagatgacaggaactggattcagagtctgtgtaaattttctcaatgagtgaccgagcatgtaaatttaactcaaatgaaattactacaataattgctttaaaaacatatttaggaaaatgaggtgaccctagatgagcttatttatatgtctcctctaacaga

SEQ ID NO: 4247 - DNA, 399 bp, Homo sapiens
  SIMILAR (3)..(158): 801254mologous to Homo sapiens GalT2 protein,accession number Y15060,Smith-Waterman Score=212.
  misc_feature (1)...(399): n = a,t,c or g
gttatgttttttctggagatctggcacaccagatccttaacgtttctttaggaatccgccgtttgcacttggcagatgtctctgttgggatctgccttgccaagttgagaattgctcctgtaccccctcacaacgagtctgtgttcaatcgctggcgatgtccctgattcgagctgctcatacctaccacctaattacctctcatcagttccagcctagcgaactgataaaatactggaaccatttacaacataataagcacaatgcctgtgccaacgcagcataagaaaaggcaggcatgtatcgccaccgtagactacattagaaaagacaattttttttcaaatgtgcaatttgtaaatattgctccaagcatgtatagttagaactgattacatn

SEQ ID NO: 4248 - DNA, 1024 bp, Homo sapiens
  SIMILAR (789)..(1013): 621254mologous to Homo sapiens Human myelin oligodendrocyte glycoprotein gene,accession number AAZ29204,Smith-Waterman Score= 201.
catgaggggtagctgcagtttgtcgtgagagacatgcttggcatacagagctgtctaatgggtgggagacatgtaatggtagatttagggctgggagcatgattttgggtctgcccaaaggaacatggggtcacttttgttctttctgacccactaaataaaaagtaccgtaacagggtttcactggaatgtttattagaaagtttacactttttatatttttatgattttaaaaacaaaccataatataaaaacagattttaaggaacttcacagcagtatatattctgtctaaactcactgaatattttaagttgtaaatcaggtgtccaccaacctttattttttgcattgcaggagatgtgactgtaaagtaggggagtttttttttttttgagacagagtttcacccttgttgcctaggctggagtgcaatggtgcgatctcggctcactgcaacctctgcctcccaggttcaagcaattctcctgcctcagcctccctagtaagctgggattacaggcatgcaccaccacacccggctaatttttttatatttttagtagaagacaaaggtttctccatgttggtcaggcttggtctcgaactcccaacctcgggtgatctgcccgcctcggcctcccaaagtcctgggattacaggtgtgagccaccatgcccggccgtaaatgattttattcatttttatgttttcttttgggcggcgggatggagtctctgtcacccaggctggagtgcaatggcacgatcttggctcactgcaagcttccccttccgggttcatgccattctcctgcctcagcctcccgagtagctgggactacaggcacgtgtgaccatgccaggctaattttttatatttttagtaggctaatctcagcagggtttcaccatgttggtcaggctggtctcgaactcctaacctcaagtgatccacctgcctcggcctcccaaagtgttgggattacaggcgtgagccaccacgccaggccactaccatgctt

SEQ ID NO: 4249 - DNA, 1648 bp, Homo sapiens
  SIMILAR (2)..(184): 651254mologous to Homo sapiens PRO2550,accession number AF130089,Smith-Waterman Score=192.
ggtgagacacagattcactcttgtcccccaggctggagtacaatagtgtagtctcggctaacagcaatctccccctccttggttcaagcaattctcctgcctcagtctcccaagaagctgggattatagacacctgccaccacatccagctaatttttttgtgttttagaaaagacagggtttcaccatgttggccaggctggtctcgaactcctgacctcagttgatccgcctgcctcagcctcccaaagtgctgggcttacaggcctgagccaccacgctcagctcagcttcaacctgtctgcaaagaaaagttttaccaagaccagaagttaaatatgacatttccctagggtagttgtaactctaaacatagtttaaaaagtatgtggcttcagattgcctatactttgttcacaaacgtgtgatttagatatgactgatttagaagtgaacaacttggtaacatccctagactccactcatgaacgcagaattattacctgctgtttgctttctgaaagaatttcaggaaatcaggaacaaatgtgtctttagggcaggattcagctccttttaatatttttctcttgggcccactctctttgctttcccctggaatctgtgtgggtactataggcaggctctactctgtggcaccatggctaggaagcttcctttttggcagaatatgtttggcagcaaagctatagagacaggtgcattcagaacatcctgggcaccagtcatgagtcttactgtgtcaaaaatctgaaaacacttgctgagaaccaaatttattccattggaaaaaccctctgtggagctataagcctcttgggactcttcttcctagattaaggcttgcatttccctccctgtttcagtaaaagatgatgaaagccactattcaatcctcactgctgagtgggcagggagaaggcaggcaccactctcagctcttttctaatcttggtaacttagtgctagaagtctctccaggctattaccatgggcatttgttctctgttggagctgtaagcagatgaacccaagtagagaagatagatcttggaaggagagatccattgacgtccagaagcccagatcagcaaatggaggaacctcggaggtgaccagaaagatctccatcggttgcccaaggcttgtaaagtagtggatggttttagcgatgaataaccgtaaattgggctatggaagtacctgtggccagagctgcctgttttctgaaggtggagaagccccatttttagctccagagccaacccttaagagaacttttggcagattttgttggcattattgaaatatatatagaaaagttgcctgattgccaatggttatgggaatggaatttaatgccatttgtaatttatcacactcattgggtttttattgattatagtattgtcctgactttttattttcctactatggttcctttagcgagaaaagtaacttttgtgcatatattgaagtggtttttcagctatgaattctttagggtagaaatttatttagcaaatgtgaattcttttgagaaagtatgaagttttgcagaaattgactgtgaaatgtcagagaaaaataaaagtcacttacttgaaacctaaaaaaaaaaaaaaaa

SEQ ID NO: 4250 - DNA, 437 bp, Homo sapiens
  SIMILAR (239)..(436): 951254mologous to Homo sapiens Human secreted protein encoded by gene 75 clone HHGAU81,accession number AAW78200,Smith-Waterman Score=332.
  misc_feature (1)...(437): n = a,t,c or g
caggacaactagagctctcgcanccgcgaggnggaattcggaagctgctcaggcattcctgtgcaaaaatggggacccgcagacttctatatttgaccacctggtggccatagagcgcgccggaagagctgctgatggcaattactacaatgcaaggaagatgaacatcaagcacttggttgaccccattgacgatctttttcttgctgcgaagaagattcctggaatctcatcaactggtgtttctaactggggaggctatgccctggcctgcgcactctacatcctgtactcatgtgctgtccacagtcagtacctgaggaaagcagtcggaccctccagggcacctggagatcaggcctggactcatgccctcccgtcggtcattaaggaagaaaaaatgctgggcatcttggtgcagcacaatagccggagtg

SEQ ID NO: 4251 - DNA, 1848 bp, Homo sapiens
  SIMILAR (991)..(1383): 891254mologous to Homo sapiens Human secreted protein encoded by gene 75 clone HHGAU81,accession number AAW78200,Smith-Waterman Score=579.
atggctggagagctccgaccagccagcctggtggtcctgcccaggtcccttgctccagcttttgaaagattctgccaggtcaacactggtcctctacccctgctgggccagagtgagccagaaaagtggatgctgccccctcaaggtgctatctcagagaccaggatgggccatccccagttctggaaatacgagttcggtgcctgcaccggcagcctggcttcgctggagcagtactcggagcagctgaaggacatggtggccttcttcctgggctgcagcttctccctggaggaggccttggagaaagcggggctccccagaagagacccagcaggtcacagccaggcgggtgcatacaagacaacagtgccttgtgttacccatgctggcttctgctgccctctggtggtcacgatgaggcccattcccaaggacaagctggaagggctggtgcgggcctgctgctccctcggaggggtctccaggggcaaaggccctgaacaaggctcaaaggctctggcagctgtatcagggctgggcttacagatgcccctcaggtttaaagaactgttgggaatcaaagagctttccaaacctgcctacggggatgccatggtgtgtcccccaggggaggttccagtgttctggccttctccgctgaccagtctcggagctgtcagcagctgtgagaccccactggcttttgccagcatcccaggctgcacagttatgactgacctgaaggatgcaaaggctccacctggttgtctcaccccagagagaattccagaggtccatcacatttcccaagatcctctgcactacagcatcgcgtcagtctctgcttctcagaagatcagagaactagagtctatgatcggcatagacccagctaaattagaatctcaatggaaacgatttgaccacctggtggccatagagcgtgccggaagagctgctgatggcaattactacaatgcaaggaagatgaacatcaagcacttggttgaccccattgacgatctttttcttgctgcgaagaagattcctggaatctcatcaactggagtcggtgatggaggcaacgagcttgggatgggtaaagtcaaggaggctgtgaggaggcacatacggcacggggatgtcatcgcctgcgacgtggaggctgactttgccgtcattgctggtgagcactcggatggccgcccagtccggccggctacccagggtgtttctaactggggaggctatgccctggcctgcgcactctacatcctgtactcatgtgctgtccacagtcagtacctgaggaaagcagtcggaccctccagggcacctggagatcaggcctggactcaggccctcccgtcggtcattaaggtaacaaaccccagccagccgctcgcctggaagcagcttttaccctggatgagcagcaggcctgaggtcccaagccagcaagctccgcccccaacaccaattccaggctctaacccgcctcctctggggctcctcaaggagatgggacctgcccctcttggaggagaagctggtggaccagacttgcgggacattcacaatgcctcagtgcttaacgggacacctacttggggaatattcccagggcaggtactgagcacccatggtgacatggatgtggaatatgccatcagcccagggcatagcagccatgtggaagaaaaaatgctgggcatcttggtgcagcacaaagtccggagtggcgtctcgggcatcgtgggcatggaggtggatgggctgcccttccacaacacccacgccgagatgatccagaagctggtggacgtcaccacggcacaggtgtaa

SEQ ID NO: 4252 - DNA, 527 bp, Homo sapiens
  SIMILAR (4)..(183): 981254mologous to Homo sapiens Human secreted protein encoded by gene 75 clone HHGAU81,accession number AAW78200,Smith-Waterman Score=304.
ctcagggcacctggagatcaggcctggactcaggccctcccgtcggtcattaaggaagaaaaaatgctgggcatcttggtgcagcacaaagtccggagtggcgtctcgggcatcgtgggcatggaggtggatgggctgcccttccacaacacccacgccgagatgatccagaagctggtggacaaaggacaacatttctctggggctttttaacttttattcctaagactctaaaggcgttgatttcaaccctccttcactctggcttcttcaggcaacccacgtggtctcctgtgagaatcttctcgacagttacttatggggacacttgtgaacaattaactgccaggcagagcatgagaacaaacattcccaggccatgtaggataggatactccagactccagtcatcctcccccatccatggtttctgttactcatggtttcagttactcatagccaactgcagaccgaaaatactaaatgaaaaatttcagaaataaacaactcttaagttttaaaaaaaa

SEQ ID NO: 4253 - DNA, 935 bp, Homo sapiens
  SIMILAR (552)..(430): 951254mologous to Homo sapiens Fragment of human secreted protein encoded by gene 75,accession number AAW78320,Smith-Waterman Score=220.
gaggaaagcagtcggaccctccagggcacctggagatcaggcctggactcaggccctcccgtcggtcattaaggtaacaaaccccagccagttgctcgcctggaagcagcttttaccctggatgagcagcaggcctgaggtcccaagccgtaagccgagggctggcaccctgctgcccctcaaaagccagaggcagagccagccttgaagcagaggtctcctggattgggtgccctttaagctactcgcagttctgaatcgtgtggcaggcctgatccaagtgaccattttccttctagtttgactttggcaggagagcaaagggagaaagctctatggctaaggccagaagacctagccctgccaataaaatcaacctcattttgtgaatgcctgttgtgtgccaaggaccctgctaagtgctttgcttgaagaaaaaatgctgggcatcttggtgcagcacaaagtccggagtggcgtctcgggcatcgtgggcatggaggtggatgggctgcccttccacaacacccacgccgagatgatccaaaaagctggtggacgtcaccacggcacaggtgtaaccgtccatgttccgtgtgagcagagtccctaccaacgggcaggtctgcatccggggagaatgcagctgcttctggcgacaatcctgctagtaaacactggtcttcggcaacccacgtggtctcctgtgagaatcttctcgacagttacttatggggacacttgtgaacaattaactgccaggcagagcatgagaacaaacattcccaggccatgtaggataagatactccagactccagtcatcctcccccatccatggtttctgttactcatggtttcagttactcatagccaactgcagaccgaaaatactaaatgaaaaatttcagaaataaacaactcttaagttttaaa

SEQ ID NO: 4254 - DNA, 2463 bp, Homo sapiens; identical to SEQ ID NO: 3214
  SIMILAR (1606)..(1998): 891254mologous to Homo sapiens Human secreted protein encoded by gene 75 clone HHGAU81,accession number AAW78200,Smith-Waterman Score=579.

SEQ ID NO: 4255 - DNA, 1531 bp, Homo sapiens
  SIMILAR (785)..(967): 981254mologous to Homo sapiens Human secreted protein encoded by gene 75 clone HHGAU81,accession number AAW78200,Smith-Waterman Score=303.
  misc_feature (1)...(1531): n = a,t,c or g
ctagagtctatgatcggcatagacccagggaaccgggggattgggcacctgctctgtaaagatgagctgctgaaggcctctctctcgctgtcccatgcccgctcagtgctcatcaccactgggttccccacacatttcaatcatgagcctccagaagagacagatggcccaccaggagctgttgctctggttgccttcctgcaggccttggagaaggaggtcgccataatcgttgaccagagagcctgttatcttgcaccagaagattgttgaagatgctgttgagcaaggtgttctgaagacgcagatcccgatattaacttaccaaggtggatcagtggaagctgctcaggcattcctgtgcaaaaataggggacccgcagacacttagatttgaccacctggtggccatagagcgtgccggaagagctgctgatggcaattactacaatgcaaggaagatggaacatcaagcacttggttgaccccatttgacgatctttttctttgctgcgaagaagattcctggaatctcatcaacttggagtcggtgatggaggcaacgagcttgggatgggtaaagtcaaggaggctgtgaggaggcacatacggcacggggatgtcatcgccttgcgacgtggaaggctgagtttgccgtcattgctggtgtttctaactggggaggctatgccctggcctgcgcactctacatcctgtactcatgtgctgtccacagtcagtacctgaggaaagcagtcggaccctccagggcacctgggagattcaggcctggactcaggccctcccgtcggtcattaaggaagaaaaaatgctgggcatcttggtgcagcacaaagtccggagtggcgtctcgggcatcgtgggcatggaggtggatgggctgcccttccacaacacccacgccgagatgatccagaagctggtggacgtcaccacggcacaggtgtaaccgtgccatgttcccgtgtgagcagagtccctaccaaacgggcaggtctgcatccggggagaatgcagctgccttctggcgaaaaaccctgctagtaaaacactggtccttcgggtgaagcaaacggaaaactcgccctggccctgggaaaactgcatgccccacttttctgggaggggttaagtgcaggtgcccgtggacaaaggacaacatttcctctgggggctttttaacttttattccctaagacntcctaaaggcgttgatttcaaccctccttcactctggcttcttcaggcaaccccacgtggtctcctggtgaagaatcttctcgacagttacttatggggacacttgtgaacaatttaactgccagggcagagcatgagaacaaaccattcccagggccatgtagggtagggatactccagactccagtcatcctcccccatccatgggtttctgttactcatgggttttcagttactcatagccaacttgcagaccgaaaatacctaaatgaaaaatttcagaaataaaaagattcttaagttttaacaa

SEQ ID NO: 4256 - DNA, 439 bp, Homo sapiens
  SIMILAR (1)..(375): 741254mologous to Homo sapiens HT028,accession number AF248966,Smith-Waterman Score=452.
gggaacgagtttagtatattaaaatcaccagggtctgttgttttccgaaatggaaattggcctataccaggagagcggatcccagacgtggctgcattgtccatgggcttctctgtgaaagaagacctttcttggccaggactcgcagtgggtaacctgtttcatcgtcctcgggctaccgtcatggtgatggtgaagggagtgaacaaactggctctacccccaggcagtgtcatttcgtaccctttggagaatgttgacctgctctttctttctgaactgcaagtgctacatgatatttcaagcttgctgtctcgtcataagcatctagccaaggatcattctcctgatttatattcactggagctggcaggtttggatgaaattgggaagcgttatggggaagactctgaacaattcagagatgcttctaagatcc

SEQ ID NO: 4257 - DNA, 552 bp, Homo sapiens
  SIMILAR (1)..(330): 581254mologous to Homo sapiens HT028,accession number AF248966,Smith-Waterman Score=261.
gggaacgagtttagtatattaaaatcaccagggtctgttgttttccgaaatggaaattggcctataccaggagagcggatcccagacgtggctgcattgtccatgggcttctctgtgaaagaagacctttcttggccaggacttcgcagtgggtaacctgtttcatcgtcctcggggctacccgtcatgggtgatgggtgaagggaagtggaaccaaactggctctaaccccgcaggcagttgtcatttcgtacccctttggagaatagagtgtatatggtagggaaggcaaactcagtgtttggaagacctttcagtcaccttgcgccagctccgtaatcgcctgtttcaagaaaactctgttctcagttcactccccctcaattctctgagtaggaacaatgaagttgacctgctctttctttctgaactgcaagtgctacatgatatttcaagcttgctgtctcgtcataagcatctagccaaggatcattctcctgatttatattcactggagctggcaggtttggatgaaattgggaagcgttatgg

SEQ ID NO: 4258 - DNA, 2016 bp, Homo sapiens
  SIMILAR (464)..(1039): 451254mologous to Homo sapiens Human epidermoid carcinoma cell line KB clone HP10034 protein,accession number AAW64539,Smith- Waterman Score=267.
gtatattaaaatcacccagggtctgttgttttccgaaatggaagattggcctatacccagggagagcggatcccccagacgtggctgccattgtcccatgggcttcctctgtgaaagaaagacctttcttggccaggactcgcagtgggtaacctgtttcatcgtcctcgggctacccgtcatggtgaatgtgaatggagtgaacaaactggatctaccccccaggcagtggcatttcggtaccctctggagaatgcagttccttttagtcttgacagtgttgcaaattcccattcactccttatttttctgaggaaacctcctgttgttttgcagttggctcccagtgaggaaagagtgtatatggtaagggaagggcaaactcagtgtttgaagacctttcacgtcaccttgcgccactcccgtaatcgcctggttttcaagaaaactctgttcctcagtttcactccccctcaaattctcctgagtaggaacaatgaagttgacctgctctttctttctgaactgcaagtgcgtacatgatatttcaagcttgccgtctcgtccaaagcatctaggcaagggatcattctcctgatttatatttcactgggagctgggcaggtttgggatgaaattggggaaggcgttattgggggaagactctgaacaattcagagatgcttctaagatccttgttgaccgctctgcaaaagtttgcagatgaccatgtaccagtctttatggtgggaaatccagtggtagagttagtccactgtccaagtcatttgaacacctcccctccattagggaagacaagggacctacccctgaggccaaaacaagcgcaggaaccccagcaagtcccctataaccttgccatataagtataattttgaatattcccgtggttttcaacatggtactttggataatgatccgccttggccttggctggtgattatcacctcttacaatatttggaacatggatccctggatatgatagcatcatttataggatgacaaaccagaagatttccgaatggattgaatgttacctgtggcccagaattagaaaaagggggtttggaaattggctgttttgttaaaatactatcttttagtgtgctttaaagtagatagtatactttacatttataaaaaaaaatcaaattttgttctttattttgtgtgtgcctgtgatgtttttctagagtgaattatagtattgaggtgaatccccattgtggtatagattccataatatgcttgaatattatgatatagccatttaataacattgatttcattctgtttaatgaatttggaaatatgcactgaaagaaatgtaaaacatttagaatagctcgtgttatggaaaaaaagtgcaccggattttattggacaaacttacgaatgctaaccttctttacaccggcatagggtgaaaatcatatttggggctatggtatacctatgaaccaatttggaaatggccttaatttgatgtaaataacctctgaaaccaaggaggaaaaggtttttaaacttaggagtagcccctaaaatatggatgtgcctaaaataaaccgccttagttttggaacctgtaccctgagtaaccagaggaccagcctgtttttttaacccctccttcctgccaagtttgttggcccctacatgggcctaatatggatacctaaaaatacctacattgatcctaagaagaaacttagccttgtggagtatatagatgccttttcattatacacacaaaaaatccctgagggacattttgaggcaaggaatataaaacgatttttatttcagtaacttttccccctgtgtaagttactatggtttgtggtacaacttcattctatagaatattaagtggaagtgggtgaattctactttttatgttggagtggaccaatgtctatcaagagtgacaaaaaaactccaatgatgattccaaaaaaaaaaaaaaaaaaaaaaaaaaagggcggccgct

SEQ ID NO: 4259 - DNA, 849 bp, Homo sapiens
  SIMILAR (11)..(133): 751254mologous to Caenorhabditis elegans similar to RD tandem repeat region of RD protein (nuclear rna-binding protein),accession number U28971,Smith-Waterman Score=140.
  misc_feature (1)...(849): n = a,t,c or g
gnaattcggccacgagaagnagcagagagagagagagagagagagagagagagagagagagagagagagagagagagagagagagagagagagagagagagagactcgtgccgaattcggcacgagtatggagctggagctgaagtttagcccaattgtttactagttgagtgaatgtggatgattggatgatcatttctcatctctgagcctcaggttccccatccataaaatgggatacacagtatgatctataaagtgggatatagtatgatctacttcactgggttatttgaaggntgaattgagataatttatttcaggtgcctagaacaatgcccagattagtacatttggtggaactgagaaatggcataacaccaaatttaatatatgtcagatgttactatgattatcattcaatctcatagttttgtcatggcccaatttatcctcacttgtgcctcaacaaattgaactgttaacaaaggaatctctgggtcctggggnaatggctgagcaccactgggcatttcccattcccagttnggcttcttnggggtttgcaagnctgcaaccaaccaaggcaaccttaaaaaaaatngaaggttttaaacncttttnaaaaaaaaaaaaaaaaaaaaaaacccccgaggggggggccncggggaccnaaattcgnnccccaanagggggggccgggnaaaacaaaatncccacngggngcgngcgnggttaaaaaacgggccggannccngggaaanccccgggggtnccncaacttaacccccctngnannaaaccccccctttnncaaaggggggaaaaacngaaagggncccccnngnt

SEQ ID NO: 4260 - DNA, 594 bp, Homo sapiens
  SIMILAR (516)..(277): 561254mologous to Homo sapiens unnamed protein product,accession number AK023726,Smith-Waterman Score=143.
tcacagtttcttcctaaaacgtagctggtaccgccatttgttcatttgcaccaggacgcaggcaaacaccctgccacacacgagaaccacaggacggcagaccgagagcgcgcctgacagcttggacccgagcaagagggacgtgcagggtggctcatactcatactggaaggcagaaccatccgatgcctctttgggggttctcaaggcatcatagagctttttctgaacatctaagtcttggttgcgcgccgccctcagcgacctggacatgaacccgcagtcctgcagcagcagcagccggccctctgtcccgcggaagccgaatccttctcctccctcgcgctctcctgccggactccgacctccaggccgcgcggggcctctcaccagtccgaggtgtccagggcctcccgcgtcccaggcatcggacactgtgggtcccgtcagacacaagcagcgtggccccacgtcggacgtatcaggggcgtgggatgggcccgcgaccgcggcctcgggtcctgtagtacgcctgtatcccagcactttgggaggccgaggcagacagatcacgaggtcagcagacaagaccat

SEQ ID NO: 4261 - DNA, 446 bp, Homo sapiens
  SIMILAR (152)..(75): 961254mologous to Homo sapiens unnamed protein product,accession number AK023726,Smith-Waterman Score=138.
cgcatgagattattttattaaaaaactcaaaggaagcagagtgtggagcggtatctgtcctgcgtgacgtctcacatcggagttggctcaaaccctggctgtgcatccatcaaaaagtgcaaggcccaggccatgagctggggaggaagcctggaaagaaaccaccgctgcaggtcaatggagcctgggactagtgaccaagagttggggcagacccagggcactcacctgacagcttggacccgagcacagagggacgtgcagggtggctcatactcatactgggaaggcagaaccatcacgatgcctctttgggggttcccagacagagcagggctcctgggctcccctggtagctccggtcctgggaaaaggcggccgattcttgcagggcaaccctacaaactccttgaactccaggctaggtttctggggcctggtcacaa

SEQ ID NO: 4262 - DNA, 512 bp, Homo sapiens
  SIMILAR (512)..(363): 921254mologous to Homo sapiens unnamed protein product,accession number AK023726,Smith-Waterman Score=242.
cgcgccgccctcagcgacctggacatgaacccgcagtcctgcagcagcagcagccggccctctgtcccgcggaagccgaatccttctcctccctcgcgctctcctgccggactccgacctccaggccgcgcggggcctctcaccagtccgaggtgtccagggcctcccgcgtcaccaggcatcggacactgtgggtgccgtcagacacaagcagcgtggccccgacgtcgtacgtatcaggggcgtgggatgggcccgcgaccgcggcctcggcgtcctgtagtacctgtcggcggcgagcggagtcattcccacccctccgggcctccgcttcggtctccgggccctgaatgggggctcacctcaagcagctgcccggctcgtggactggagggtgtctctgcccccagaatcagctcccgaatccagggccgtaggaccagcctccccgaacctgccatccccacggctacacccaacggatacatcgggtccgggtttcccgcgggcgc

SEQ ID NO: 4263 - DNA, 1665 bp, Homo sapiens
  SIMILAR (950)..(1387): 341254mologous to Chlamydomonas reinhardtii vegetative cell wall protein gp1,accession number AF309494,Smith-Waterman Score= 158.
ttaacgtttgtgaaggaacttcccggatcgacccacgcgtccgcggacgcgtggtcggacgcgtgggcggacgcgtgttcggacttttgggcccgggcccgttgcatccgctgggtgtagccgtggggatggcaggttcggggaggctggtcctacggccctggattcgggagctgattctggggtcagagacaccctaccagtccacgagccgggcagctgcttgaggtactacaggacgccgaggccgcggtcgcgggcccatcccacgcccctgatacgtccgacgtcggggccacgctgctttgggtctgacgggacccacagtgtccgatgccctgtgaacgcgggaaggcctggacacctcggactgggaggagaaagagttcgggtttcgcgggacaaaagggccggctgctgcttgctgcagggacttgcggggttcatgtccaaggtccgctgagggcggcgcgcccgcaagaagttcttatcttccagggtggaccgcttcagcctgctgcccacggagcagcccccggctacgggtgcctggttgcaaccaagacttagatgttcagaaaaagctctatgactgccttgaggagcacctttcagagtccacctcgtccaatgcaggcctatcactgtcccagcttctggatgaaatgcgggaggaccaggagcatcagggggcactcgtgtgcctggctgaaagctgcctgacactggagggcccttgcacagcaccccctgtcacccactgggctgcctcacgatgcaaggccacgagttcatgtcccacagggagaagctgtgtacactgtccccagctcaatgctgtgcatctctgagaatgaccagctaattctgagctctctaggcccctgtcagaggacacagggccctgagctgcccccaccagacccggctctgcaggacctatctctgaccctcatagcctctcctccttcctcacccagttcctcaggaaccccggccttacccggccacatgtcatccgaggaaagtggtaccagcatcagccttctgcctgccctgtccttgggctgctccagacccaggggcagagaaggcaggctcccagccctcaccaggccatctggttcaggcccctggccaccctggacccccaggtccccacacgccagccgttaccccaagcttcccaaattccagagctgcactcccaagtttctcaccccggtagccatgtccccaaagtccaaaaccccaaggctcttgtgaccccaggcccccaagaaaacctaagccctggaagttccaaggaagtttgtaagggttgcccctgcaaaaaaatcggccgcccttttcccccaggaccggagctaccccaggggagcccccaggagccctgctctgtctgggaaccccccaaagagtcatcgtgatggttctgcccttcccagtatgagtatgagccaccctgcacgtccctctgtgctcgggtccaagctgtcaggcttcctccccagctcatggcctgggccttgcactttctgatggatgcacagccagggtctgagccaactccgatgtgagacgtcacgcaggacagataccgctccaacactctgcttcctttgagtttttttaataaaataatctcatgcggcaaaaaaaaca

SEQ ID NO: 4264 - DNA, 2248 bp, Homo sapiens
  SIMILAR (272)..(898): 321254mologous to Latrodectus geometricus major ampullate spidroin 2,accession number AF350274,Smith-Waterman Score=133.
tcggagaagtcgggattccgggtaccgagcgccacctgccagccattcacgcccaggacaggcagcccgagctccagcgcctcggcctgctcgccgggaggtatgctgtcctcggccgggggtgccccggagggcaaggacgacaagaaagacaccgacgtgggcggcggtggcaacgggcacccggggcgcctcggccgaagggggacccacggggctggcacacggcccggattagctgcggcggcgggattaatgtggatgtgaaccagcatccggatgggggcccgggaggcaaggctctggggctcggactgcggccggttcatcgggctccagctccggctccggccccagcgcgcccacctcctcctcagtgttgggctctgggctggtggctcccgtgtcaccctacaagccgggccagacagtgttccctctgcctcccgcgggtatgacctacccaggcagcctggccggggcctacgccggctacccgccccagttcctgccacacggcgtggcacttgaccccaccaagccgggcagcctggtgggggcgcagctggcggcggccgcggccgggtctctgggctgcagtaagccggccggctccagccctttggccggagcgtctccgccgtccgtgatgacagccagtttgtgccgggacccttactgcctcagctaccactgcgctagccacctggcaggggcggcggccgccagcgcttcttgcgcacatgatccggctgctgcggctgcggcgctgaagtccggatacccgctggtgtaccccacgcacccgctgcacggtgtgcactcctcgctaacggccgccgcggctgctggcgccacaccgccctccctggccggccaccccctctacccctacggctttatgctccctaacgacccactcccccacatctgcaactgggtgtcggccaacgggccgtgcgacaagcgcttcgccacgtccgaagagctgctgagccacttgcggacccatacggcatttcccgggacagacaaactgctgtcgggctaccccagctcgtcgtctctggccagcgctgccgcggccgccatggcttgccacatgcacatccccacctcgggcgccaccgggcagccctgggacgctggcgctgcgcagcccccaccacgcggctgggactcagcagccgctaccacccctactccaagagcccgcttcccacgcctggcgcccccgtgccggtgcccgccgccaccggaccgtactactccccctacgccctctacggacagagactgaccaccgcctcggcggctggggtatcagtgaggggcggccgggagggcgagcgagggataggaaggaagagggggaggggaggagtccagggagaggcggcatcacggaccaggctgctgacacccgcgcgtggggaaggactcgggccacgaaaggaaagaaatgtattaccgtatatatcttacccgacagcagcgaccgagacccggtgggacactccccttctccccactttcacctcccatacccaaactttataaaagttgaaaaaatatcatttgactttttatagaaaaaaaaaaggaaaaaataattgagaaagtgttcatctgaggactgcatcagtgtccaccgatgcagtcctcagatgaacactggtatttatttatgttagctccaagcggaccggtggttcaaaagtgcattatttagtttgagctctgtagggaaaaaggaggggggaaaaattttaaaacttgagggtaaaaatgtggaaaacaaaccctcccatcccttgtagattataaataaaagccaaaccgccacagaactagaggtcttctctttaatgttactttaaaattgctatgattgtattgtacgttatttaatgtctgattgaaacacaaatttacatgcatgtttgttacaaaaaaaatgataaaaaaagtcacaatttgtcagctctgatttcaaattgcaattatttttaaggtgtataccatcgaagagaatgggtatttttttgtatgtattctggaagaaaacaacaaaaaaaaaaagaaaaagaaaaaattctattccaaaacctcatttgccttattttgttctttaaaaggaacacttaactatttttaatttttaagtccacccgctgagaaggggacaaggtttacgtcatgtactaaaataatagacaatgtatcgctttaaagattaaaattccgt

SEQ ID NO: 4265 - DNA, 1670 bp, Homo sapiens
  SIMILAR (403)..(828): 981254mologous to Homo sapiens putative serine-rich protein,accession number AF246705,Smith-Waterman Score=705.
attgagtcgttgcctggcggggatcagacagcttcagtgggttaacttccaaactagttcagaggcaagtgtttcatcatcagttgctaaaaacagttcctcatcaggcacatccttactgactcccaagagcagctcttcaacaaatacatcgctgctaacttccaagagcacttcccaggtagctgcatcactactagcttccaagagcagctcccagaccagtggatctctggtttccaaaagcacttccttagcaagtgtgtcccagttggcttctaagagtagttctcagactagcacctcacagttgccttctaaaagtacttcacagtcaagtgagagttctgtcaaattctcttgcaagttaaccaatgaagatgtgaaacacgaagcaaccttttttcaatacgactatataaaacggtggcatggaagttggtagctgttggtggctttagtcccaatgtgaatcatggagagctcctaaatgcagctattgaggctctgaaagcaacactggatgtattttttgtcccactaaaagaattggcagatctgcctcaaaataagagctctcaagaaagtattgtttgtgaattgaggtgcaagtctgtgtatttgggcactggctgtggaaaaagcaaagaaaatgcaaaagcagttgcatcaagagaagcattgaagttatttctcaagaaaaaggtggtggtaaaaatatgtaaaaggaaatacagaggcagtgaaatagaagatctagtactccttgatgaagaatcgaggcctgtaaacttacctccagcactaaaacatcctcaagaattactataatgtgtccaaaatatcactgcatacaatatctggtatttgaagagaaaaactgacttttgtatagtataaaacacaggctttcacaaattttgtattgctttttttcccagttttggcagaaaatttacattctagttctcttcacacagtagccagttgtaaataatttatgaatgaccagtaccacattaaaaggtatgccattagccagccatattagtatgcctgttttatttgctgaagaaaatactgtcttcctatttttaatgatacattaggtacgatgtgtagttcggtagagtcctaaaatttttgtactactttcaaatttggtgaaaatgtattaagttgtctaccatgttttcttttctagctgaataaaccacatcaaaggaaagggaccccagtatttgaatgtttgaaagtctgtaaagcttaaggttttaaaaatgttgcccgtaatgttgaacgtgtctgttaaaaaataaaagaacaaatagttgcttcaaacctatttttatgagaagttgtaagcattttttagatataaagcagtataaagtacttgttattttactctgaagttgtttaaaattcaccatgactttgaccgtctgaagattctttaagcgggttaatttatgttttgaggtggaatacaatttacacttttttcttaaaaacatgaatgtgggtttctatattaagcatattttgtgactactattaacagattgatttgtttagatattaaatgctttaagctattttaccttttcaagaagttgtgttttttttctccaagtcagaaccaattcctgcaaataggcttcccatga

SEQ ID NO: 4266 - DNA, 366 bp, Homo sapiens
  SIMILAR (133)..(207): 881254mologous to Homo sapiens Unknown (protein for MGC:10946),accession number BC004336,Smith-Waterman Score=121.
cgcactgtgtgtccactctgctctttctttcttccttcttgttttattctcttctttttcctttattgtgctgtaatagaggactgagctgcaatgtgttattaactgctcttcccttcccccgggctatagagactgtcggagagaaggaactggactcctcaagctatgctctacctgaaaggggcacagggtcgccgctatcttctccgaccagagccggcaaatggacctctacgacctgcccactgccggatagaccatgcacctatttcgacctactacatattacggaggcctgaaccatcttaccggagctcttcatacttcccagatgatgattagggtaccatgcagcaagccgcg

SEQ ID NO: 4267 - DNA, 2170 bp, Homo sapiens
  SIMILAR (29)..(2167): 921254mologous to Homo sapiens human liver glycogen synthase,accession number D29685,Smith-Waterman Score=3438.
aaaggagtctcggaggactgtaagaagaatgcttcgaggccgatccctctctgtaacatccctgggtgggcttccccagtgggaagtcgaagaacttcctgtggaggagttactgctctttgaagttgcttgggaagtgaccaataaagttggaggcatctatactgtgattcagacaaaggccaaaacaacagcagatgaatggggagagaactattttctgataggtccatattttgagcataatatgaagactcaggtggaacagtgtgaacctgtaaatgatgctgtcagaagagcagtggacgcaatgaataagcatggctgccaggtgcattttggaagatggctgatagaaggaagtccttatgtggtactttttgacataggctattcagcttggaatctggacaggtggaagggtgacctctgggaagcatgcagtgtcggcattccttatcatgaccgagaagccaatgatatgctgatatttggatctttaactgcctggttcttaaaagaggtgacagatcatgcagatggtaaatatgtcgttgcccaattccatgaatggcaggctggaattggactgatcctttctcgagccaggaaacttcctattgccacaatatttacaacccacgctacactacttgggaggtatctctgtgcagcaaatattgatttctacaaccatcttgataagtttaacattgacaaagaggctggggaaaggcagatttaccaccggtactgcatggagcgagcttccgttcattgcgctcacgtgttcaccacggtttctgaaataacagcaatagaagctgaacatatgctgaagagaaagcctgatgtagttactccaaacggcttgaatgttaagaaattttcagcagtgcatgagtttcaaaatctacatgccatgtacaaggccagaatccaagattttgttcgaggtcatttctatggtcatctcgactttgatcttgaaaagactttgttccttttcattgctgggaggtatgagtttttcaaaacaaaaggagctgacatcttcctagattccttatccaggctaaatttcctgctgaggatgcataaaagtgacatcacagtggtggtgtttttcattatgcctgccaagacaaataatttcaacgtggaaaccctgaaaggacaagcagtgcgaaaacagctgtgggatgttgcacattctgtgaaggaaaagtttggaaaaaaactctatgatgcattattaagaggagaaattcctgacctgaacgatattttagatcgagatgatctaacaattatgaaaagagccatcttttcaactcagcgacagtcattagccccagtgaccacgcacaacatgattgatgactccaccgaccccatcctcagcaccattagacggattggacttttcaacaaccgcacagatagagtcaaggtgattttgcacccagagtttctatcctccaccagtcccttactacccatggactatgaagagtttgttagaggttgtcatcttggagtatttccatcatactatgaaccctggggttatactccagctgaatgcactgtgatgggtatccccagtgtgaccacgaatctctccgggtttggctgtttcatgcaggagcacgtggctgatcctactgcttacggtatttacatcgttgacaggcggttccgttctccagatgattcttgcaatcagctgactaagtttctctatggattttgcaacatgtcacgccgccaaaggtttatccagaggaacagaactgagagggctctcagaatcttctggattggaagatacttagggcagatattaccaggcatgccaggacacctgacattaaggcagagcttttccaagataaatttccatgtgggaacttaacatgcaccaccaacggacaggaaggatttcaaatatcccagggccttcctgcagttacccacctttctcctttcaggggtcttcagggccttccagtccttcagaggcagtgatgtggaagatgaagtggaggatgagagatacgatgaggaagaggaggctgaaagggatcggttaaatatcaagtcaccattttcactgagccacgttcctcatgggaagaaaaagctgcatggtgaatataagaactga

SEQ ID NO: 4268 - DNA, 1350 bp, Homo sapiens
  SIMILAR (832)..(1128): 771254mologous to Homo sapiens UDP glucose:glycogen 4-alpha-D - glycosytransferase,accession number U32573,Smith-Waterman Score= 422.
atgaagagactgttggagagaaggaactggactcctcaagctatgctctacctgaaaggggcacagggtcgccgcttcatctccgaccagagccggagaaaggacctctccgaccggccactgccggaaagcgtctcctcaccggaaagacgcggctctgaggcgccctcagatacagtccgcccgagggcagcccgggttggcagcagcagcagctggatgccgagcgccggagctgggagctcgcgcgtccagccccgcgccaatggtggcaagggcggcccaggctggcgctgcggctccccaagccttattggcttgcggctgttcagccagccctctggctgccaggaaagacgaagcccaaatccccaactactaactattccggaggcagcaaccatcttactggcgtcccttcagaaatcaccagaagaacaattcagttctaaagccatttgggagggtgctgtggaagtccagagaaaggcatcagagtccaagcagtttgagaaatgtctacacaaagaggagcagcctaaagcagtgtcagagccagaatggagagaggagggcatccgtgcatgtgagggagtgtatggagaaagattagttacacagaagaagattgacccaatatgtagcaaattaaaggtgattttgcacccagagtttctatcctccaccagtcccttactacccatggactatgaagagtttgttagaggttgtcatcttggagtatttccatcatactatgaaccctggggttatactccaggaggactagggccttttcctcctctgagtgcatacaaggatataggcgctggtctgaagccaagctttggtctatttcccctggcagctgaatgcactgtgatgggtatccccagtgtgaccacgaatctctccgggtttggctgtttcatgcaggagcacgtggctgatcctactgcttacggtatttacatcgttgacaggcggttccgttctccagatgattcttgcaatcagctgactaagtttctctatggattttgcaaacagtcacgccgccaaaggattatccagaggaacagaactgagaggctctcagatcttctggattggagatacttaggcagaacagaaggatttaaatatcccaggccttcctcagtaccaccttctccttcagggtctcaggcctccagtcctcagagcagtgatgtggaagatgaagtggaggatgagagatacgatgaggaagaggaggctgaaagggatcggttaaatatcaagtcaccattttcactgagccacgttcctcatgggaagaaaaagctgcatggtgaatataagaactga

SEQ ID NO: 4269 - DNA, 645 bp, Homo sapiens
  SIMILAR (4)..(135): 971254mologous to Homo sapiens liver glycogen synthase,accession number AJ003087,Smith-Waterman Score=220.
cagacagaaggatttaaatatcgcaggccttcctcagtaccaccttctccttcagggtctcaggcctccagtcctcagagcagtgatgtggaagatgaagtggaggatgagagatacgatgaggaagaggaggctggctttggcagtatgtgtaggaatcaccttctatcctgtacgcagtcccctattcagacagctgctgccaggtgactccatccctccactgtagtcatttcttcatccttttccccaagaccgacaaaagcagttaagcagactgtcttccaggaatctggtttgatcaaagtttttttcttcatcttctggtgatttctgaagggacgccagtaagatggttgctgcctccggaatagttagtagttggggatttgggcttcgtctttccggcagtggccggtcggagaggtcctttctccggctctggtcggagatgaagcggcgaccctgtgcccctttcaggtagagcatagcttgaggagtccagttccttctctccaacagtctctatagcccgggggaagggaagagcagttaataaaacattgcagctcagtcctctattacagcaaaataaaggaaaaagaagagaataaaacaagaaggaagaaagaaagagcagagtgg

SEQ ID NO: 4270 - DNA, 994 bp, Homo sapiens
  SIMILAR (5)..(673): 541254mologous to Homo sapiens S164,accession number AF109907,Smith-Waterman Score=541.
tggcaaggacaaaaagacagagagagagagagaagggaagaaaaaaagagagaggggagagagacgagaggagacacgagaggggagacgagaggagagacaggagagggagaggagagaacaaagagagagagaggaggagagagagacacgagagaggagagagacgagagagagagagagagagagagagagacgagacacgaacgacgagagagagaagagagagagagagagagagagagagagagagaaagagagagcgagagagagagagaagagcgagagagacagagagagagagagacggagacagagagagagaagaagagagagagagagagagagagagagagagagagagagagagagagagagagagagagagagagagagagagacagagagagagagagagagagagagagagagagagagagagagagaaagagagagagagagcagagagaaagagagagagagagagacagagagagagagagaaagagagagagagagagagagagagagaaagagagagagagagagagagagaaagagagagggagagagagagagagagagagagaagagagagagagagagagagggagaaagagagagagaggagacagaacagagagagagaaagagagagggagagaaagagagagcactcaggccatgttcccgggacaacccaagacgagagctctggcaattgtctttcctgccaatgttcggcaaattaatggcgactaacgcagcagatattttcggtctgcagcaaaaaggccgtatcgccccaggaaaagatgccgacttcgtcttcattcagccgaatagcagctatgttcttaccaatgacgatctggaatatcgccacaaagtcagcccgtatgttggccgtaccattggcgcgcgtacacgtttcacagtgttccaaatctatgcccacaatatacaacgagattttttaaaagcaagaaaatga

SEQ ID NO: 4271 - DNA, 430 bp, Homo sapiens
  SIMILAR (225)..(428): 1001254mologous to Homo sapiens BM-012,accession number AF208854,Smith-Waterman Score=333.
gcagtttgtggaactaaggctaagtgactaataaatatatggaaaattaaataatgcaaatccatatggaaatgcctatcctccctctttgtttctgtactctgaaaatagagagtttgtctatccagacagaaattttagactgacgaaaattggaaatgactgtggttctcaaacttgaccacgtggccaccaaccagaagttacccggagggatcctatagagtaaccaaataaggcaaatggaagaagtaaagatctcaaaaaagagtaaagttggaattcttccatttgttgctgaatttgaagaatttgctggacttgcagaatcaatcttcaaaaatgctgagcgtcgtggagacctggataaagcatacaccaaacttatcagaggagtatttgttaatgtggagaaagtagcaaatgaaag

SEQ ID NO: 4272 - DNA, 2045 bp, Homo sapiens
  SIMILAR (646)..(1044): 661254mologous to Homo sapiens HTRM clone 1880692 protein sequence,accession number AAY73382,Smith-Waterman Score=378.
  misc_feature (1)...(2045): n = a,t,c or g
acttcccggtacgancccagcgtccggagaaatcaaagatttctttgaagttgcaaagattttgattactggcacaactaaagaaagcaagaaggttgctacactgcctcgaaaagaaagtgctgtcaaacaggaaacagagagtcttcatggaagttcggggaaattaactggatctacttctagtctaaataagctcagtgttcagagttcagggaatcgcagatctcagtcatcttccctgttggatatgggaaacatgtctgcctctgatctcgatgttgctgacaggaccaaatttgataagatctttgaacaggtactaagtgaactggagcccctatgtctggcagaacaggacttcataagtaaatttttcaaactacagcaacatcaaagtatgcctggaactatgggctggaagcagaggacctgggatgggagggaccattatcacggcaacataattgttgggcacaccactgcctgtttcatctgagaaagatatgatccgccaaatgatgattaaaatatttcgctgcattgagccagagctgaacaacctaattgcattaggagacaaaattgatagctttaactctctttatatgttagtcaaaatgagtcatcatgtgtggactgcaacaaaatgtggaccctgcttctttcctaagtactacattgggaaatgttttggtgactgtcaaaaggaactttgacaaatgcattagtaaccaaataaggcaaatggaagaagtaaagatctcaaaaaagagtaaagttggaattcttccatttgttgctgaatttgaagaatttgctggacttgcagaatcaatcttcaaaaatgctgagcgtccgtggagacctggataaagcatacaccaaacttatcagaggagtatttgttaatgtggagaaagtagcaaatgaaagcccagaagacccccagggatgtggttatgatggaaaactttcaccatatttttgcgactctttctcggattgaaaatctcatgtctagaagcagaaaaaaaagaagccaaacaaaaatacacagatcaccttcagtcttatgtcatttactctttaggacaacctcttgaaaaactaaatcatttctttgaaggtgttgaagctcgcgtggcacagggcataagggaggaggaagtaagttaccaacttgcatttaaacaaacaagaacttcgtaaagtcattaaggagtaccctggaaaggaagtaaaaaaaggtctagataacctctacaagaaagttgataaacatttatgtgaagaagagaacttacttcaggtggtgtggcactccatgcaagatgaatttatacgccagtataagcactttgaaggtttgatagctcgctgttatccctggatctggtgttacaatggaattcacctaattcaggacatttctgggattatttgttccaagcattgcacaggtcccactaaacccttgtggaaagaaagaaaaagataactgaatgaagcatttgagtataacagacactataccaaaatacccatcaacttgttttgagaacccagacttaaaattttatgtattattaaatgttacgataaatgggtagtacccatacctacaaatatttaaatgccaaaattacccaacctataatagcagttttatttgcccctataaggttgcatactaacttaagcattcatggtcaccataaaatgcctttagcatttctccaatggactgggatggggaaattttccctttattgccctagcctgccttgtgtttgagtgggttgtccctatggagcaatgccatttgggaggttcttcagctttcactacttctctgttgcttggctaatcaggtaacctacttaaaatacagtaccaaaattgtttttttcacactaacaaatgtgtatatagagaagagggctcatgtgatgatcatttgtgaacttagatttttgaggattatgtgactagtaataaatgtgaaatcaattttcaaaaaagttaaaaaaaaaaaaaaaaaa

SEQ ID NO: 4273 - DNA, 1060 bp, Homo sapiens
  SIMILAR (294)..(190): 681254mologous to Homo sapiens Human secreted protein, SEQ ID NO: 7879,accession number AAG03798,Smith-Waterman Score=119.
  misc_feature (1)...(1060): n = a,t,c or g
tttttttttttttttgagatggagtcttgcccggtcaccaggctggagtgcagtggcgcggtctcggctcatggcaacgtccgcctcctgggttcaagtcattctcctgcctcagcctcctgagtagctgggattacaggcgcccaccaccacgcccagctaatttttgtatttttagtagagacaagtttcaccatgttggctgggatggtctcaatctcctgacctcgtgatccgcccgcctcagcctcccaaagtgctgggattacaggcgtgagccaccgcgcccggctgacccttttaatttttaagaggtgttcaatccgagatgaatcatttgaagtatttttatatgtatatctatttaaaactaatatattattaaaggcttaattgccatgccgtttatcttctctgaaaggaactttcaaatctttacctgccaacatattcaccataatttttttattttttaatacctttcatacaataacttttttaaaacaacctcaggattggaaaaggcaaccttaaatttactttcggctctctaaatcaggcatttcaatgtatttatttttttaaaatttttctncaaaaagttaactaaaaaattgtgtcggaccctacttttgagaaaacctacgtttccccaagttttatgggaactgggctattcccttgtcccgggcacaccgtnctcattcccttccctttcagaggcctaaaacctcatttgataaggcactcctaggtctctgggcctgtgggatccagtggctattctgtccaccaacctaaggaatcccaattgcacccttctggtttctggacagtcacagggtgacagctgtggattctataatacagactggtgtcttagaaggtaggaataatacatgatttatggaagcatcaccctgctaatacataataatgtctttttatattataagtgattgagtttagttcattttaatacattgtacatgaaaaaatgaaaagtagaactttgtaatactttaatcaataaaattaattaccaaatgaaaaaaaaaaa

SEQ ID NO: 4274 - DNA, 1050 bp, Homo sapiens
  SIMILAR (33)..(284): 671254mologous to Homo sapiens PRO2852,accession number AF130079,Smith-Waterman Score=271.
  misc_feature (1)...(1050): n = a,t,c or g
gaagacattgcaatctggttgcccaaggctggaagtgcaatggtgcaatctcggctcactgcaacctctgccttccctggttcaaagtgattctcctgcctcagcctccctgggtagctgggattacaggagtgtgccaccacggtcagctaatttttgtatttttagtagagacagcgtttcaccatgttggtcaggctggtctcgaactctccacctcaggtgatccgcctgtctcagcctcccaaagtgctgggattacaggcgtgagccacagtgccaggcagtaacgagctttttaattttctccccacatgatacttattgatgacagaggaaaaaaagtatattgtagaaacctcgctcataccaccttaaccaaggaatcaaggcagtatcaccattaacggaatgaaatgataccatgtccctcctgacactctgagaactcaacatttcttttgaggcaagtcatgccataatgctcaccctatatttaatcatgataaaccgccacaactccaactaatgaacataaaatcagccatcaaaggcccgtacttatttttgaagagtacaaaaacatgaaacagactgaggaaatattcctgattataggttgctaaacgtgttaacagtgtgacatctgggatcaggaaaacacttgtctttcactataaagagtattactggaactaattgatggattttcaacaaagtctacagattcataagagcactatatgttaacttcctttgttaactgtactactgtctttgttttctgttgctnnnnnnnnnnnnnnnnnnnnnnnnnnnnnnnnnnnnnnnnnnnnnnnnnnnnnnnnnnnnnnnnnnnnnnnnnnnnnnnnnnnnnnnnnnnnnnnnnnnnngagaaccttctttgctgctgggtactttcaacagagtcctgaggtggtgcaaggcatcacgtggccagggggctgagcatgctaacctgctagctcaggtctctcttcctcttcttataaagccgctagtcccactcctatgataactcattagtcc

SEQ ID NO: 4275 - DNA, 573 bp, Homo sapiens
  SIMILAR (2)..(385): 821254mologous to Homo sapiens p40,accession number U93564,Smith-Waterman Score=524.
aagagcaactccaagacacataattgtcagattcaccaaagttgaaatgaaggaaaaaatgttaagggcagccagagagaaaggtcgggttaccctcaaagggaagcccatcagactaacaagcagatctctcggcagaaactctacaatccagaagagagtgggggccaaattcaacattcttaaagaaaagaattttcaacctagaatttcatatccagccaaagtaagcttcataagtgaaagataaataaaatactttacagacaagcaaatgctgagagattttctcaccagcaggcctgccctaaaagagctcctgaaggaagcactaaacatggaaaggaacaaccggtaccagccgctgcaaaatcatgccaaaatgtaaagaccattgaggctaggaagaaactgcatcaactaacgagcaaaataaccagctaacttcataatgacaggatcaaattcacacataacaatattaactttaaatgtaaatggactaaatgctccaattaaaagacacagactggcaaattggataaagagtcaagacccatcagtgtgctgtat

SEQ ID NO: 4276 - DNA, 578 bp, Homo sapiens
  SIMILAR (7)..(573): 981254mologous to Homo sapiens suppressor of potassium transport defect 3,accession number BC006404,Smith-Waterman Score= 957.
gttgcagccaaatgtatgcacaaagatgctaaaaagggcttcatcaggctggacatgtcctagttccaggagcgacacgaggtggccaagtttattgggtctccaccaggctacgttggccatgaggagggtggccagctgaccaagaagttgaagcagtgccccaatgctgtggtgctctttgatgaagtagacaaggcccatccagatgtgctcaccatcatgctgcagctgtttgatgagggccggctgacagatggaaaagggaagaccattgattgcaaggacgccatcttcatcatgacctccaatgtggccagcgacgagatcgcacagcacgcgctgcagctgaggcaggaagctttggagatgagccgtaaccgtattgccgaaaacctgggggatgtccagataagtgacaagatcaccatctcaaagaacttcaaggagaatgtgattcgccctatcctgaaagctcacttccggagggatgagtttctgggacggatcaatgagatcgtctacttcctccccttctgccactcggagctcatccaactcgtcaacaaggaatgtat

SEQ ID NO: 4277 - DNA, 1619 bp, Homo sapiens
  SIMILAR (1176)..(1616): 851254mologous to Homo sapiens GAP binding protein p62dok,accession number U70987,Smith-Waterman Score=642.
tgatgaagcttctgaggacttctgaagccaagtaccaagagaagcagcggaagcgtgaggctgaggagcggcgccgcttccccctggagcagcgactaaaggagcacatcattggccaggagagcgccatcgccacagtgggtgctgcgatccggaggaaggagaatggctggtacgatgaagaacaccctctggtcttcctcttcttgggatcatctggaataggaaaaacagagctggccaagcagacagccaaatatatgcacaaagatgctaaaaagggcttcatcaggctggacatgtccgagttccaggagcgacacgaggtggccaagtttattgggtctccaccaggctacgttggccatgaggagggtggccagctgaccaagaagttgaagcagtgccccaatgctgtggtgctctttgatgaagtagacaaggcccatccagatgtgctcaccatcatgctgcagctgtttgatgagcctcttgatgggattcaagtgcacagctatgaccagacccgaatgtgccctcttggagctctctgcctggtagacaggtggaaaggagacatggtagtagctggcattttgcattttgtgtgccattcgctgtcttcagaggcttatgtgtatcaatttaaccctttcaacaaccctccaaagctagctattattacggcctccattgaacagatgtggaaactgaagcaaaagtcagcactttgggaccaagaggtggaggaagacctgggccatgctctacccggccagtccccatggctagcgcggctcaagttctttgaccataaggggtcgagctctgggagtggccgagggagctcgtgctgcctggactgcaaggtgatccatctggcgaagtgtcacctgctggctgttgatgtgccgtccagtgcagcctggttgcagacgctgtgccaaaacccccttcggaaaggcagctggactctggaacctaccaataacccacctgagctttctgccctggagatgctggagaactccttgtgcagccccacctgggaaggatcccagttctgggtaacggtgcagaggactgaggcggtcgagcactgtggcctgcatgcctcctacgtgctgagggtggaggctgaaaggctgactctcctgaccatgggagcccagagtcagacggcacagggaaatgacatcttccaggcagatgagactgccatccaccggcagaaggcccagggaaaggccagacaggggcacaatgctctcagagctgattcccatgaaaggaaggtggtagaggggaagttctcttccccacctggaccccaagagctccttgaaagccccccagccctgtatgctgagcccttagactccctgcacattgcttcaggcccatcccagggctccctatactcagacctcttggacggcactcttgctcgggcaggagagggagtacaatggaagaaacctctctattgggacttgtatgagcatgagcagcagcagttgctgaaggccaagctgacggaccccaaagaggatcccatctatgatgaacccgagggcctggccccagcccttccccagggcctttatgatctgccttag

SEQ ID NO: 4278 - DNA, 691 bp, Homo sapiens
  SIMILAR (666)..(319): 601254mologous to Homo sapiens Human EXMAD-16 SEQ ID NO: 16,accession number AAB27238,Smith-Waterman Score=295.
gaaaagcctaaaacctaacttgcaattgccctgaattaaaaaaacatctcctaacaaggtgtaaatgaacttctcatctgcctcaaacagctcaaaattatttattgtcaaaaccatgctgtctaatgcttaggcctttaggactaactagggtccgtgggaaccctcaaagtgtattctgcttggtcccaggccttcttgggcttgatgttcatgcgtttccagacttcagctgtggtgcggtctgctttggtgacccccactgaaggtcgaacgtggtgatacgggacagggtgcacagcacatattgcctataccctttctctttcctccatggggttcccatggaagtgtcagggctacggagccgacggaaggacagccagcttattccacctcccccaggccgctggatgctgttgccgtgaagatagaggacactccaggttgaagaaagttgttaggacagggtcaatggaagtcaaggtcatttaaaaggacagggtcgatccaggccaggttctctgggtgctccaacagctgtgaagccacctggttgaagtctctcagatcattgagaacattgttattcagccacagggactgggtcagtgatttccccgactttgaacgcttcagtggtcgtagtcctgtccttggctccttcatttaccagatcttgaatgacgtg

SEQ ID NO: 4279 - DNA, 1435 bp, Homo sapiens
  SIMILAR (169)..(339): 941254mologous to Homo sapiens Human Protease and associated protein-12 (PPRG-12),accession number AAY70018,Smith-Waterman Score =265.
atgccagagagcaactgcagcctcacctggaggcactcagtagggagagcagttgcagcgcagggcggtgagcacagcagccaaggtgcaagtctagtgctcggagaacccagaggaggaagcagctggctgctggggctggagggagacacagggctctggggaggcctcctgaaggagggccggctgacagatggaaaagggaagaccattgattgcaaggacgccatcttcatcatgacctccaatgtggccagcgacgagatcgcacagcacgcgctgcagctgaggcaggaagctttggagatgagccgtaaccgtattgccgaaaaccctgggggatgtccagataagtgacaagatcaccatctcaaagaacttcaaggagaatgtgattcgccctatcctgaaagtaagaggtctttcttggcacttcctgctggagcctaaggctcacttccggagggatgagtttctgggacgaactcggtgagatcgtctacttcctccccttctgccactcggagctcatccaactcgtcaacaaggaactaaacttctgggcccaagagagccaagcaaaggcacaaccatcacgctgctctgggacccgcgaggtggcagatgtgctggtcgacggcttacaatgtgcactatggcgcccgctcccatcaaacatgaggtagaacgcccgtgtggtgaacccagctggcagcagccctatgaagcaggaccctgctgcccagggggctgtactttgcgcatcacggtggaggactcagacaagcagctactcaaaagcccagaactgccctcaccccaggctgagaagcgcctccccaagctgcgtctggagatcatcgacaaggacagcaagactcgcagactggacatccgggcaccactgcaccctgagaagggccggctgacagatggaaaagggaagaccattgattgcaaggacgccatcttcatcatgacctccaatgtggccagcgacgagatcgcacagcacgcgctgcagctgaggcaggaagctttggagatgagccgtaaccgtattgccgaaaacctgggggatgtccagataagtgacaagatcaccatctcaaagaacttcaaggagaatgtgattcgccctatcctgaaagtaagaggtctttcttggcacttcctgctggagcctaaggtcctaacaactttcttcaacctgagtgtcctctatcttcacggcaacagcatccagcgcctgggggaggtgaataagctggctgtccttcctcggctccgtagcctgacactccatgggaaccccatggaggaagagaaagggtataggagggcccggggacattctcttcaccaaggcattgagaaatatatttgtgagagtgatgatatcttcagaaagtactgtaataaccagtttctgtag

SEQ ID NO: 4280 - DNA, 1256 bp, Homo sapiens
  SIMILAR (560)..(126): 1001254mologous to Homo sapiens malignant melanoma metastasis -suppressor,accession number U43527,Smith-Waterman Score=766.
tgagttacgcaacatttcttttattgcctcgggttggaagctccagcgccccctcccttagccctacgtcccccccaccccgcccccgccccgcatgctctgactcctttggggtctgaagttcactgccccgcacctgcgccccagccccgcccagcgcttctgccgtggttccctggtgccgcctcccgcttgccgaagcgcaggccgaaggagttccagttgtagttcggcaggtccttctcccgctgcaccagcaccgcgccctggggtgcggggatctggcggctgtggggggcggacaggcccggctgctggcggctcccggagctctcggggggcggggacagcgaggtcccccgacggctcagcctggcagtagcagctggcttcctctcggtgcacggcaggctctgctccccgggggccaggaggcccagggattctagctgctggcctgtgggtctagaattccccacagaggccaccttttctaatggctccccaaagtgggtggcacagaggaaaagcagtagctgccaagaaaccagtgagttcatcttggtgagaagagccaggtcctagaagtgccttgaggcttgcctcagtcctggcctgggcaggagtctgcggagcctctgaggtgacgagaccacctggctgggtgaatgtccagagggtgggcagcctcgtgccgaattcggcacgaggagagagagagagagagagagagagagagagagagagagagagagagagagagagagagagccgagcagtgcttgctcctgctcggggcgctgcggccccgggcgtcgccatgaccagtgagctggacatcttcgtggggaacacgacccttatcgacgaggacgtgtatcgcctctggctcgatggttactcggtgaccgacgcggtggccctgcgggtgcgctcgggaatcctggagcagactggcgccacggcagcggtgctgcagagcgacaccatggaccattaccgcaccttccacatgctcgagcggctgctgcatgcgccgcccaagctactgcaccagctcatcttccagattccgccctcccggcaggcactactcatcgagaggtactatgcctttgatgaggcctttgttcgggaggtgctgggcaagaagctgtccaaaggcaccaagaaagacctggatgacatcagcaccaaaacaggcatcaccctcaagagctgccggagacagtttgacaactttaaacgggtcttca

SEQ ID NO: 4281 - DNA, 4983 bp, Homo sapiens
  SIMILAR (2976)..(2230): 1001254mologous to Homo sapiens Human E-cadherin precursor,accession number AAR85487,Smith-Waterman Score=1303.
tctccacgttttgactgaggccatctccatgcatcttttctcttgactggaaatgtggtggaatcaaataaaacaaattcgacaatggtttaacaaaattgtttaataaaatttataaaaatgcatgctttgagaataccttttctcagcttcgcattgttttccttttccacccccaaagaaaataccacaattatacagcacccacacatgtatacactcaaaactacagtgacattcctctacacagaactatattccgatatagcttgaactgccggaaaaatcgaagacaattccaaaaacgtgattgcagggtttgattttttttctccaaaacacttgaggaaacaggtaaaggctattttcaacaaaaggtcttttctttggattgtcaaaaggttggaaattcacatttaaaattaaaagagatcccaaatcaaagaccctcaactacccccctacccccctcaaacttaaccccccttttagggcccacattttttcttcttggctccctaagaaaaaaatttgggaattttgaattttccccgggttttctggggcacacctgggaattggggcaaatgtggttcagctcagccagcattttctggaggacatcatccaaaggcaggccacctgggggaattctggggctttggagtacaaacccaagggatcttggtgtcagaaaacacatgttgagactccttccaattcccttcccagaatttttcagtagatgaggtaagacccacctcgaatcatcctcagacatcagtttgctaaattgcccaggctcaatgacaagctctccctggccatctccgaagcccaactttttcatagttccgcttctgtctttgggctgcaagccactttaggcactattcctaagtccctggagtatatcactcttgcttccagagcttaaataaacatttaatgaaacacacttactcaagaacaagtcactggatagctgccccattgcaaagttacatactcaggagatgaaagagggaagcccattaaaaggtcttcagagtagacaataccctagtcaagatgtggccagacaaagacacgaacttcttaccctaaaagagccccaataatttctgccatcaagagaactccctatcttgggcaaagcaactgaattccaggagtgagagttgatattaaaacatggaggctgggcacagcagctcatgcccacaatccccagcactttggggggccaaggcagaaggattgcttgaggcccaggagtttaagaccagcttggggcaacatagcaagaccccatctgtacaaaaaaataaaaaggaggctggtgggagaactgcttgagccccagagtttgaggttacagtgagctatgatcacatcactgcattcccaggcctgggctgatggagcgaaactgtctcttaaaaaatggcagggagttggggagctgggcaggtgcagtggctcatgtctgtaatcccaatactctgggaggccaagatgggaggaccacctgagcccaggagtttgagaccagcctgggtaacacagggagaccccgtctcaaatatttaaaaaattagtcatgcgtagtggtgcatgcctgtggtcccagctacttgggaggctgaggtgcaaggatagcttgagcctgggaggacaaggctgcagtgagctgtgattgcaccactgcactccagcctggccgatagaatgagaccctgtcttaaaaaaaaaaaaaaaggcagagggacacaccagtgtagtaatgagcagaagcacacaaattttttttaaaaaattatatacacaaaacaacagaactagagtagctgacttctccccttctttttaaaagtgagacaaaattccttaagaaaatctgcaaggtgctgggtgaaccttctgatgctaaagttgttcttctggaatattaaaatttgggtatcttttggacatcaccaccatgtaaagagtgatgggaaaaaaaaaaaagctttaagaaataagtcgaaacttttctaacacaaacttattagagctataaagtggagagagtataaagctatactaactgcatcactaaccagtctcttttttttccccagaaactcatctcaagggaagggagctgaaaaaccaccagcaacgctgatttctgcatttcccagcacatgggtctggggcccgcctctctcgagtcccctagtcgtcctcgccgcctccgtacatgtcagccagcttcttgaagcgattgccccattcgttcaagtagtcatagtcctggtctttgtctgactctgaggagttcagggagctcagactagcagcttcggaaccgcttccttcatagtcaaacacgagcagagaatcataaggcggggctgtggggtcagtatcagccgctttcagattttcatcaataaaatttccaatttcatcgggattggcagggcggggaagataccgggggacactcatgagggttggtgcaacgtcgttacgagtcacttcaggccgagcgtccaggcccctgtgcagctggctcaagtcaaagtcctggtcctcttctccgcctccttcttcatcatagtaataaacgttgtcccgggtgtcatcctctgggggcagtaagggctctttgaccaccgctctcctccgaagaaacagcaagagcagcagaatcagaattagcaaagcaagaattcctccaagaatccccagaatggcaggaatttgcaatcctgcttcgacaggctgtgccttcctacagacgccggcggccccttcacagtcacacacgctgacctctaaggtggtcacttggtctttattctggttatccatgagcttgagattgattttgtagtcacccacctctaaggccatctttggcttcaaaatgatagattcttgggttgggtcgttgtactgaatggtccagttgggcactcgccccgtgtgttagttctgctgtgaagggagatgtattgggaggaaggtctgcatcaatgatgtttatgacctgaggctttggattcctctcacagaagaatatagttcgaggttctggtatgggggcgttgtcattcacatcagacaggatcagcagaagtgtccctgttccagtagcaactggagaaccattgtctgtagctatgattagggctgtgtacgtgctgttcttcacgtgctcaaaatcctccctgtccagctcagcccgagtggaaatggcaccagtgtccggattaatctccagccagttggcagtgtctctccaaatccgatatgttattttctgttccataaatgtgtctggctcctgggcagtgtaggatgtgatttcctggcccacgccaaagtcctcggacacttccactctcttttcaggaggcacaaagatgggggcttcattcacatccagcacatccacggtgacggtggctgtggaggtggtgagagagacctcaaaaggtaccacattcgtcactgctacgtgtagaatgtactgctgcttggcctcaaaatccaagccctttgctgttttcaaaatgccatcgttgttcactggatttgtggtgacgacaaattgtccaccatcatcattcaatatggtgtatacagcctcccacgctggggtattgggggcatcagcatcagtcactttcagtgtggtgattacgacgttagcctcgttctcaggcacctgacccttgtacgtggtgggattgaagatcggaggattatcgttggtgtcagtgactgtgatcacagctgttgctgttgtgcttaacccctcaccttgaaggtcagcagcttgaaccaccagggtatacgtagggaaactctctcggtccagcccagtggtgaccacactgatgactcctgtgttcctgttaatggtgaacatatttttgtcagggagctcaggatcttggctgaggatggtgtaagcgatggcggcattgtaggtgttcacatcatcgtccgcgtctgtggctgtgacctccatcacagaggttcctggaagagcaccttccatgacagaccccttaaagacctcctgggtgaattcgggcttgttgtcattctgatcggttaccgtgatcaaaatctccattggatcctcaactgcattcccgttggatgacacagcgtgagagaagagagtgtatgtggcaatgcgttctctatccagaggctctgtcaccttcagccatcctgtttctctttcaataataaagacaccaacagggggtgtgtcagctccttggccagtgatgctgtagaaaaccttgccttctttgtctttgttggatttgatctgaaccaggtttttaggaaatgggcctttttcattttctgggcagctgatgggaggaataacccagtctctcttctgtcttctgaggccaggagaggagttgggaaatgtgagcaattctgcttggattccagaaacggaggcctgatggggcggggggcggtggtggtgccccactgtattcagcgtgactttggtggaaaactttctgtaggtggagtcccaggcgtagaccaagaaatggatctgttgggttatgaaaccgtagaggccttttgactgtaatcacaccatctgtgcccactttgaatcgggtgtcgagggaaaaataggctgtcctttgtcgaccggtgcaatcttcaaaattcactctgcccaggacgcggcctctctccaggtggcgccggggcaccgtgaacgtgtagctctcggcgtcaaagccagggtggcagggctccggctcctggcagagccaagaggagacctgcagcagcagcagcagcgccgagaggctgcggctccaagggcccatggctggccggggacgccgagcgagggcaggcgccgggtgcggtcgggtcgggccgggctggagcgggctggagctctgaactgacttgccaagctcacaggtgctttcc

SEQ ID NO: 4282 - DNA, 571 bp, Homo sapiens
  SIMILAR (18)..(221): 691254mologous to Homo sapiens PRO2550,accession number AF130089,Smith-Waterman Score=230.
tgaggcagtcttgctctgtcgcctaggctgcagtgcagtggcgcgatctcagctcactgcaacctccacctctcgggttcaagagattctcctgccttagcctcctgagtagctgggactacaggcgcccaccaccacgctcagttaatttttaaaaaatatttttaatagagacggggtttcaccatcttggccaggctggtgttgaacgtctgacctcatgatccacccggctcggcctcccaaagtgcggggattataggcataagccactgcacctggcctgaactttttaaataaacgttagcccattacacatcctgtcatatggcatgtaggcagtgtggtatggatgaaagagatgtggagagaggcagacatagactgaaatcccagctttgtctgttactagatgtggaccttgggcatattacttagcttctcttagcttcagtttcctcatctgtaaaatgggaatattaattacaatgctcatatggttgctctgaggtttaagagaaatagcatatgtatacttcagcattcagtatgtgccttcttgtaacttcct

SEQ ID NO: 4283 - DNA, 572 bp, Homo sapiens
  SIMILAR (3)..(434): 651254mologous to Mus musculus putative,accession number AK014521,Smith-Waterman Score=462.
gcaccgatgccggcggccactatgactgcccgcagcgggccggccgccattagtacgcgctgcccctggcgcccccggagcccgagtacgccacgcccatcgtggagcggcacgtgctgcgcgcccacacgttctctgcgcagagcggctaccgcgtcccagggccccagcccggccacaaacactccctctcctcgggcggcttctcccccgtagcgggtgtgggcgcccaggacggagactatcaaaggccacacagcgcacagcctgcggacaggggctacgaccggcccaaagctgtcagcgccctcgccaccgagagcggacaccctgactctcagaagcccccaacgcatcccgggacgagtgacagctattctgcccccagagactgcctcacacccctcaaccagacggccatgactgcccttttgtgaacacaatgtgaaagaagcctgctgtggtactgagcgtcgggctgtcacaaggcactggaagaacgggagcctgctggtccagagtgtgcgagcgtatcggcgagcgtcgacactctgaatgcgcagacgccaccc

SEQ ID NO: 4284 - DNA, 444 bp, Homo sapiens
  SIMILAR (322)..(438): 481254mologous to Homo sapiens unnamed protein product,accession number AK000385,Smith-Waterman Score=66.
  misc_feature (1)...(444): n = a,t,c or g
gcgtattcataggcacagtcattnnnnnnnnnnnnnnnnnnnnnnnnnnnnnnnnnnnnnnnnnnnnnnnnnnnnnnnnnnnnnnnnnnnnnnnnnnnnntggnnnnnnnnnnnnnnnnnnnaaaagggggttttgttgggtcccccaggttggggggcaggggcacgattttggtttatggcaatctccatttccgggattaaggcaattttcggggtttttcctctggaaaagttgggattacgggcaccccccaccttgttaagtnnnnnnnnnnnnnnnnnnnnnnnnnnnnnnnnnnnnnnnnnnnnnnnnnnnnnttgaaactctggacctgaggggatccccttgcttaagtctcccaaagggtggggattcccggcttgagtcattggccttagcctacgggcaatttgtgactgggaaaattttttttccagagg

SEQ ID NO: 4285 - DNA, 338 bp, Homo sapiens
  SIMILAR (91)..(165): 481254mologous to Peromyscus maniculatus reverse transcriptase,accession number U43360,Smith-Waterman Score=65.
  misc_feature (1)...(338): n = a,t,c or g
nnnnnnnnnnnnnnnnnnnnnnnnnnnnnnnnnnnnnnnnnnnnnnnnnnnnnnnnnnnnnnnnnnnnnnnnnnnnnnnnnnnnnntaaaattaatatgggaatacttctcaaactggtgtacagattcaacataaaccctgtaaaaaccccagctggactgtttnnnnnnnnnnnncatgaaaaacagaaattgacaagcggatcctaaaattcatatggaaatgcacggaacatagaatagccaaacaatctttaaaaagaacgaagctagaggacttccttctcaatttcaaaacttactatgaagccacagaaattaagacatcgtagtaccac

SEQ ID NO: 4286 - DNA, 2174 bp, Homo sapiens
  SIMILAR (182)..(430): 661254mologous to Homo sapiens pre-B cell enhancing factor,accession number U02020,Smith-Waterman Score=243.
  misc_feature (1)...(2174): n = a,t,c or g
caaacgactatccttcaaaacaggctaaagtgttatgtttctgaaagccagatgtggattggttcagttatacctattaagtgcttaaaacttaaatgtaaattatgtatgtgcttttttgtaagggagtgtttagacatttctgatgattagtcttctacttgtctaactttcttaatttggatttcagattaacgtcttcaaggacccagttgctgatcccaacaaaaggtccaaaaagggccgattatctttacataggacgcccagcagggaattttgttacactggagtgaggaaaaggagaccttgaggaatatggtcacggatcttctccatactgtctcaaaagaatggcaaggtgacaaaagcctattcatttgatgaaataagaaaaaatgcacagctgaatattgaactggaagcagcacgatcattaggccttatggactgggtgtgtgttgtgtgtatgtaatacataatgtttattgtacagatgtgtggggtttgtgttttatggatacattacagcccaaattatttgttggtttatggacatactgccctttccattttttttccttttcccagtggtttagggtgatctccaaattagggaaatgcatttaaccatgtaaaaagatgaagtgctaaaagtaagccttttagggccctttgccaataggtagtcattcaatctgggtattgatcttttcacaaataacagaactgaagaaacttttatatataactggatgatcacataaaacagatttgcataaaattaccatgattgctttatgtttatatttaaactggaatttttgtacgaaacaagattgtgtaagatatatttgaagtttcaggtgatttaacccagtctttccaacttttcatgatttttatgaagcacagactttcaagaaaatacttgaaaataaattacattgccttttgtccgattaatcagcaaataaaacatggccttaacaaagttgtttgtgttattgtacaattttgaaaattatgtcgggacataccctatagaattactaacctgactgcccctgtgtagagtaatgtattaatcattgctacattaaagaaaataatgggttccttactgggaantgtctagggcactgtacagcttattatatatcttggttgttgtattgtaccagtgaaatgcccaaatttgaaaggccctgtactgcaattttatatgtccagagattgcctgtggctctaataatgcacctcaagattttaaggagataatgtttttagagagaattttcgccttcccctatagaatatatacataaatgtaaaatacttacaaaagtggaagtagtgtattttaaagtaattacacttctgaatttatttttcatattctatagttggtatgacttaaatgaattactggagtgggtagtgagtgtacttaaatgtttcaattctgttatatttttttattaagtttttaaaaaattaaattgggatattaaattgtatgggacatcatttattaattttaaactggaatgccctcaataaggtaatactgaagcacattcttagatgaagataaattatctccaatgaaaaggcatgacatgtgtttcaataggaggaatcttaagttgggctaaattccaaagtgcttggacatccaaaatgttcctaggagtgattagctactagattctgaatcagacatcacatctgactagagaccagtttctttcgaatgadttcttttatgtatgtagatctgttcttctgaggcagcggttggccaactatagcccaaaggccaaatttggacttctttttataaatgcagattgtctatggctgctttcccactactccagcctaaggtaaacagctgcaatagaagccaaatgagaatcgcaaagcccaaaatgtttattaacctgccctttacacaaaattacacaaaaagtttcctgatctctgttctaagaaaaggagtgtgccttgcatttaaaaggaaatgttggtttctagggaagggaggaggctaaataattgatacggaattttcctcttttgtcttcttttttctcacttaagaatccgatactggaagactgatttagaaaagtttttaacatgacattaaatgtgaaattttaaaaatt

SEQ ID NO: 4287 - DNA, 460 bp, Homo sapiens
  SIMILAR (207)..(347): 1001254mologous to Homo sapiens hypothetical protein,accession number AL080220,Smith-Waterman Score=241.
ttacattccagtgcggcggaattcgaatgatataccccccatatggggttgaggtaagggtcaagcaagataaggtacgtaaagcgctttgtaaaccaggcagctctacataaatattaaccaaaggaccaaaagatgagagaaaccagcgtcatccattggtggtgccatatcctcagtggtaacctagctgacttcttcctctccaggacaagagcgaagccaccaggggagctctctcccaaaggccttgtcgccccagacctaactcgctccccctcaacctgcctgaggaagaaactctcaggattgcacggatattttcttctcagtactcccagaaagactgacgcagcctgaggggctggggggaaggagacacctgcccaccctccgtcagctttgtccagcttgcaggaggcaccaggtctggctccttcagggctgtcacagtcctgaa

SEQ ID NO: 4288 - DNA, 1805 bp, Homo sapiens
  SIMILAR (1)..(174): 1001254mologous to Homo sapiens hypothetical protein,accession number AL080220,Smith-Waterman Score=309.
gaacgatgcacaatgccagatgagccattggtaagagctccagataaaggcacagattccccatcaccccctcctctcgaagagacttcaaatggaggaagaatgctccatgagtccctgaggcatgcagtacccattacaaggatgcagagcagtgaagacactgaggcaggcgccagcctacagtgatgaggactatgaagaagacatcattgagcccaggaccttaaatgagatcaccacggtgacagacaaaactagcccttggtctagtgtcatatcagacacaagtgaggtcatcagccctcagcctgacgaggtgcagagggaaggcccctcttgtccttctccagggcctttctgcagagaggagcttatggtcaaaagtagctttctctccagcccagaaagggctgtcaacccccacctgcctaggcaggatgtctcctagccaaagtcttgttgcttgtgagtgtgaggcctctaaggccagggttggtggcgagtctgcctcagccaaccctcagcccatcccatgcccaacactctcaggagctcaacagagcagcacgtttgttggatggagctcaccacagacagatcagaacaaggagcccaagtcagaggccccagcttgaggaattgaaggttgccaccagttgaggttcggttgactcttgcttgattagctttcaagaagttgccgctaaatctagcctcccagagcagaagggaaaaccataagggaccacccatcgactcctctgacatcaggcagaggcaggtgacaactggatcagagacgtccacaaagcagagcctcctgctcccagggcccattgtggtgcccaacttctttttgcctccccagcagttggaggcttccctgcggatgctttcactctcagcaactttgccaccagcagccacaacagatcaggacaagagcgaagccaccaggggagctctctcccaaaggccttgtcgccccagacctaactcgctccccctcaacctgcctgaggaagaaactctcaggattgcacggatattttcttctcagtactcccagaaagactgacgcagcctgaggggctggggggaaggagacacctgcccaccctccgtcagctttgtccagcttgcaggaggcaccaggtctggctccttcagggctgtcacagtcctgaaaccaccacttgcctaggccacggatgcctcaagagacccggtcagcccagactggagggagtgccccaaaccagtccagtgtccactttgccagaattttagctccttttttctgtgggtgagggcaaaggctaggaaattaaaatggggaattccgcgccccaagttggggaccccaagcagggcatcttttccggtggaaaaaacgccccccccagtgtcccttgaacacagctgacctgctggcaatgaagccccacccctctgccctgaagatgccaggcccatttttgcccttaaaagttggggagaagggaacatgtagattgtgtgcattgtgccatagtcaaggaaatccctagggcccacctccagttcatttgtgtgggaacaaggatattttatagatacaaattatttttatgctgtgttgaattaatcaattaggagaggaaggggaaatcacttccttcaaacttattatctgattgtctaaaattctaaccatgcttataacttattaattttacccagatctgaaggtcattgttcttacatatagtttgaatcaaatcatatagaagtttgtaaaaaaaaaaaaaaaaaaatgaaaa

SEQ ID NO: 4289 - DNA, 2578 bp, Homo sapiens
  SIMILAR (786)..(1136): 991254mologous to Homo sapiens Human SEC8 protein sequence (clone ID 20936375.0.1),accession number AAB48375,Smith-Waterman Score=609.
gcgattgtggaggacaaacacagtggcaggagttatgacataacctcagatcttgggaatgttctcacttctacttcgatcgccaaaaccgttaatggttaagctgaaagcagtgacagtggagccgagtctgatgaagaagatgcccaagaagatttgatgggagcatatcatagtgatattgataagaaaatgatgaagatagtagcagaccataagaatttggaagtcattgttactaatggctatgataaagatggctttgttcatgatatacagaatgacattcatgccagttcttccctgaatggcagaagcactgtacatgtaaagcccattgatgaaaacttggggcaaactggaaaatctgctgtttgcattcaccaagatataaatgatgatcatgttgaagatgttacaggaattcagcatttgacaagcgattcagacagtgaagtttactgtgattctatggaacaatttggacaagaagagtctttagacagctttacgtccaacaatggaccatttcagtattacttgggtgtgcattccagtccacccatggaaaattctggatttcgcgaagatattcaaggacctcctggaaatggcaacattgggaatatgcaggtggttgcagttgaaggaaaaggtgaagtcaagcatggaggagaagatggcaggaataacagcggagcacccacaccgggagaagcgagccggagaaactgacgaattctctaatgttagaagaggaagaggacataggatgcaacacttgagcggaaggaaccaagggccggcaggtgggaagtggaggtgatggggagcgctggggctccgacagagggtcccgaggcagcctcaatgagcagatcgccctcgtgctgatgagactgcaggaggacatgcagaatgtccttcagagactgcagaaactggaaatgctgactgctttgcaggcaaaatcatcaacatcaacattgcagactgctcctcagcccacctcacagagaccatcttggtggcccttcgagatgtctcctggtgtgctaacgtttgccatcatatggccttttattgcacagtggttggtgtatttatactatcaaagaaggagaagaaaactgaactgagggaaaatggtgttttcctcaagaagactactggaactggatgacctcagaatgaactggattgtggtgttcacaagaaaatcttagtttgtgatgattacattgctttttgttgtccagtagtttagtttgtgtacatatatacacatatatattttgcactacacaaacgataacattttaaggactaatattgctgatacttgaataatcaatctctactaggttataagtagtatacacagatttaccctgcccttgaacttgaaggacattaaattattaatgatcatttggtaacatgtttacctgattatcttccatagagtaacataagctgcttttcaaaggtaccattgtgataatgagatcaaatttataagttattatttttaattttctaaattaaataaaagaaagaatgcaaaccaggagtgaatttcaaatgagacgtaatagggctttatatgttagtctcgaagttgccatggcatgtagtaggaaaaccacaggaaggaatggtcatattcactttgtggggctgcccattaatctttcttggggcatttcacaactcttgagtttgggtgttcagggcatccatttatttaaaaagtgggagtccctatggtacccagactggaggttttttaccaatgatttgcaggctagacataacccactgatggaaatggtgaagaatgagcttcatgtaggtttaaaagtgtattctgagcctgtagatgattaatcaggtttttattcaatcatataaatgtattcctttgtaatcatttttgtttaactgaggatatctagtgtctgcttcatagggtgctttgaaatataaaatgaaaacttatttatactgtttttacaacagtcaaaaaggaaacacacgaaaatcacttttctgcaactgatgaactatatagactggactcttaacctcttagtgcctcagtttttccttcggggtatactattttagatacacctacttcacaggagtactggagggatttgcaagctaacgggccaaatgcttccataggaataaggcatgcccagctaacagaaatttaagtccctcttccccacctctctcatctagaccaaaaagaagactacaatttagatccttggagacttttcctgtatgccttccaaaacttcctgctcacttagatgtaccttgtgctttgaagatttctttgatgcagtctttgtaacaaataatttttttttttaaatggagtttctctcttgttgcccaggctggagggcaatggcgtgaacttgggctcactgcaacttccacctcctggggttcaagtgattctcctgccctcactcccaagtagctggggattacaggcatgcaccaccatgcctgggctaaattttgtaattttttagtagagacggggtttctccat

SEQ ID NO: 4290 - DNA, 469 bp, Homo sapiens
  SIMILAR (200)..(328): 1001254mologous to Macaca mulatta thioredoxin,accession number M84643,Smith-Waterman Score=223.
ttcttcattgagaatataaccggtttggcttttgtaatgccattatattcattatattaattttcatatgctgaaaaatgtcctcatgcggaaatgtggggtacatgacagggaaaagtttctggttttggattacttctgtcaaagctcagtactcgcagtcttgtatttaatcctctccctttgctactttccctaccaggatgttgcttcagagtgtgaagtcaaatgcatgccaacattccagttttttaagaagggacaaaaggtgggtgaattttctggagccaataaggaaaagcttgaagccaccattaatgaattagtctaatcatgttttctgaaaatataacccaccattggctatttaaaacttgtaatttttttaatttacaaaaatataaaatatgaagacataaacccagttgccatctgcgtgacaataaaacattaatgctaacacttttta

SEQ ID NO: 4291 - DNA, 427 bp, Homo sapiens
  misc_feature (1)...(427): n = a,t,c or g
ctgtgtgcagggaaagagaacctcaccagaaagtattcaataaaatgccaaagtgatcttacagaacagtgcctgtgacaccggaggggattgttctgtctttgtgagtgaacatacaatgatggggataactggtcctcataccatgcaggtcccatttctgatcaccccactggcaggacaattcacagttcttgagcaaactgagttagggagggtatgctaacgacagaacctatgcaagttcttagaaatattttttgtttgctgaaataaagctcaatcaacacactaccttnnnnnnnnnnnnnnnnnnnnnnnngggggggccgttttaaagaatccttggaggggcccaagtttacccgggcttgcaaggttttagttttttccttatagggagccgaattaaaacctacctggggat

SEQ ID NO: 4292 - DNA, 1113 bp, Homo sapiens
ttttttgggatttggattcaaaattttaataataaattgtgccagtagaagcttttcaaaggtaatgatatatcaataaataatagttaaactgagttcctgagaaagaacctaccacatgaaagtatgtcagagcgctgtgagtaacaacatggcacgactataaaatagcgagaatactgacagtcacgacgacaggcacagcagacttgagtatgccactcacacaaatgtaaaccagtacacaggaatctttatttttttagtttaaacactgataaacttctaagtgttgttgcctagatatatactaagtaatggatacattatgctaagaacttcgaggaaaaatatgtggaataatataatgaaaattatgaagcatccagattttttaaaaagcaaaaaagaattgaccttttgactcagatagtaaatcacttgaagataggaatcatactaatttgaaataaggaatattgtgtttatctctgtgtgtgtgtgtgtgtgtatacacgcacatacatctatacttctaagaaaatacgtatggcttactttttatttcaatgtcattttgaagaatctttgcttttttacaaaggttaggaatatgtattgtttaaaccaagttaagatttgatacttcaaagtacactaaaagaacaaaaaaaaaagtgagagaaccattagatcactcagtttcctgacagtaacagaagaaaacaggactaagaacattcactgaagctttaagtgtgggcagtctgtcagtaaaaaggtaagtagtagggtcagaggtatggcattccacataccagctctaccaagaatgaaagagcatacggtctacagaaacggacgtgtgtccgtgattaaactttttggcatcgctgtattaatcccttttgatgtatataagttcagtatatgacaaatgtttcagttcccccccccaaagaatccaatcacaaccaagacacacacacaaatcacttctcagttacacatctgcatttctttaacaaaacagtaagagatacaatcatagcgaagaggtcacccgcacaatacattatcagcacactgtctagaacacctcatttaaagaca

SEQ ID NO: 4293 - DNA, 3731 bp, Homo sapiens
  SIMILAR (1267)..(3180): 871254mologous to Mus musculus warts/lats-like kinase,accession number AB023958,Smith-Waterman Score=2939.
  misc_feature (1)...(3731): n = a,t,c or g
atgaggccaaagacttttcctgccacgacttattctggaaatagccggcagcgactgcaagagattcgtgaggggttaaagcagccatccaagtcttcggttcaggggctacccgcaggaccaaacagtgacacttccctggatgccaaagtcctggggagcaaagatgccaccaggcagcagcagcagatgagagccaccccaaagttcggaccttatcagaaagccttgagggaaatcagatattccttgttgccttttgctaatgaatcgggcacctctgcagctgcagaagtgaaccggcaaatgctgcaggaactggtgaacgcaggatgcgaccaggagatggctggccgagctctcaagcagactggcagcaggagcatcgaggccgccctggagtacatcagcaagatgggctacctggacccgaggaatgagcagattgtgcgggtcattaagcagacctccccaggaaaggggctcatgccaaccccagtgacgcggaggcccagcttcgaaggaaccggcgattcgtttgcgtcctaccaccagctgagcggtaccccctacgagggcccaagcttcggcgctgacggccccacggcgctggaggagatgccgcggccgtacgtggactaccttttccccggagtcggcccccacgggcccggccaccagcaccagcacccacccaagggctacggtgccagcgtagaggcagcaggggcacacttcccgctgcagggcgcgcactacgggcggccgcacctgctggtgcctggggaacccctgggctacggagtgcagcgcagcccctccttccagagcaagacgccgccggagaccgggggttacgccagcctgcccacgaagggccagggaggaccgccaggcgccggcctcgctttcccaccccctgccgccgggctctacgtgccgcacccacaccacaagcaggccggtcccgcggcccaccagctgcatgtgctgggctcccgcagccaggtgttcgccagcgacagccccccgcagagcctgctcactccctcgcggaacagcctcaacgtggacctgtatgaattgggcagcacctccgtccagcagtggccggctgccaccctggcccgccgggactccctgcagaagccgggcctggaggcgccgccgcgcgcgcacgtggccttccggcctgactgcccagtgcccagcaggaccaactccttcaacagccaccagccgcggcccggtccgcctggcaaggccgagccctccctgcccgcccccaacaccgtgacggctgtcacggccgcgcacatcttgcacccggtgaagagcgtgcgtgtgctgaggccggagccgcagacggctgtggggccctcgcaccccgcctgggtgcccgcgcctgccccggcccccgcccccgcccccgccccggctgcggagggcttggacgccaaggaggagcatgccctggcgctgggcggcgcaggcgccttcccgctggacgtggagtacggaggcccagaccggaggtgcccgcctccgccctacccgaagcacctgctgctgcgcagcaagtcggagcagtacgacctggacagcctgtgcgcaggcatggagcagagcctccgtgcgggccccaacgagcccgagggcggcgacaagagccgcaaaagcgccaagggggacaaaggcggaaaggataaaaagcagattcagacctctcccgttcccgtccgcaaaaacagcagagacgaagagaagagagagtcacgcatcaagagctactcgccatacgcctttaagttcttcatggagcagcacgtggagaatgtcatcaaaacctaccagcagaaggttaaccggaggctgcagctggagcaagaaatggccaaagctggactctgtgaagctgagcaggagcagatgcggaagatcctctaccagaaagagtctaattacaacaggttaaagagggccaagatggacaagtctatgtttgtcaagatcaaaaccctggggatcggtgcctttggagaagtgtgccttgcttgtaaggtggacactcacgccctgtacgccatgaagaccctaaggaaaaaggatgtcctgaaccggaatcaggtggcccacgtcaaggccgagagggacatcctggccgaggcagacaatgagtgggtggtcaaactctactactccttccaagacaaagacagcctgtactttgtgatggactacatccctggtggggacatgatgagcctgctgatccggatggaggtcttccctgagcacctggcccggttctacatcgcagagctgactttggccattgagagtgtccacaagatgggcttcatccaccgagacatcaagcctgataacattttgatagatctggatggtcacattaaactcacagatttcggcctctgcactgggttcaggtggactcacaattccaaatattaccagaaagggagccatgtcagacaggacagcatggagcccagcgacctctgggatgatgtgtctaactgtcggtgtggggacaggctgaagaccctagagcagagggcgcggaagcagcaccagaggtgcctggcacattcactggtggggactccaaactacatcgcacccgaggtgctcctccgcaaagggtacactcaactctgtgactggtggagtgttggagtgattctcttcgagatgctggtggggcagccgccctttttggcacctactcccacagaaacccagctgaaggtgatcaactgggagaacacgctccacattccagcccaggtgaagctgagccctgaggccagggacctcatcaccaagctgtgctgctccgcagaccaccgcctggggcggaatggggccgatgacctgaaggcccaccccttcttcagcgccattgacttctccagtgacatccggaagcagccagccccctacgttcccaccatcagccaccccatggacaccttcgaatttcgaccccgtagatgaagaaagcccttggaacgattgccagcgaaggttagcaccaaggcctgggacacactcacctcgcccaataacaagcatcctgagcacgcattttacgaattcaccttccgaaggttctttgatgacaatggctacccctttcgatgcccaaagccttcaggagcagaagcttcacaaggctgagagctcagatttagaaagctctgatctggtggatcagactgaaggctgccagcctgtgtacgtgtagatgggggccaggcaccccccaaccactcggctggccntcccaggtccagggtccccggaagccggttgcccttcacaggcccaattaggggaagccgagggctgttttgttttaaatttagtccgtcggattacttcacttgaaattctgctcttcaccaaggaaaccccaaaccaggacacttttgaaaaccaggactcagcatcgctttcaataggcttttcaggaccttcactgccatttaaaaccaatatttttggaaaatttagtacagtttagaaagagcacttattttgtttatatccattttttcttactaaattatagggattaactttgacaaatcatgctgctgttattttctacatttgtattttatccatagcacttattcacatttaggaaaagacataaaaactgaagaacattgatgagaaatctctgtgcaataatgtaaaaa

SEQ ID NO: 4294 - DNA, 824 bp, Homo sapiens
  misc_feature (1)...(824): n = a,t,c or g
ccctagagcgtttaatttttgtaggggggttgggccaattttttccccccccaaaattaaggttctttcccaaaattccccaattggtttttttttcgcccccttttaggaaaaaaatttttccttgccctccccggttaagtttgggccccccaagggttcttttaaagggcccccccccnnnnnnnnnnnnnnnnnnnnnnnnnaaaaagtgttagccattaatgttttattgtcaccgcagatggccaactggggtttatgtccttccataatttaatatttttgtaaattaaaaaaaattaccaagttttaaattagccaatggctggattatgttttcagaaaaacatgattaagactaattccattaatggttggcttcaaagcttttcccttaattggctcccagaaaattcacccgaccttttgtcccttcttaaaaaactgggaatgttgggcatgcatttgacttcacacttctgaagcaacatccctgacaggtcatccacatctaacttcaagggaatatcacgttgggaatactttttcagagaggggaatgaaaggaaagggcttgatcattttggcaaagcccacaccacgtgggctggagaagtccaactacttacaagttttatcacctggcagcgtccaaaggcttcctggaaaagcagtcttggctcctccgatctggcttcaccatcttgggctgctggaagtctgacgagcggctggtaagggaccgacgggaaatgggatccaaagctccaaacagcagcttcaagacgtcgctgcttgctctctccctttataaactggca

SEQ ID NO: 4295 - DNA, 1372 bp, Homo sapiens
tgtactcttagtacagtgtggtggaattcgagtctttccttcattaggccacagcagggctcaagatcccagtataccctcttgttttcagctttgatccttctgaatgaggggcaggggagtgtgcctgtttgcttttctaggagcctctgcttgtactgtcagtctttatacctccatgtgagtatgtacacgcctgcatttgggttcatgcacgtgcttattttttaagatgctttggcatttccctttgtaatgtatacattacaaagggaatacattgcctttgtaatgtatctgtgaagcagacaaagcaaacgatagcatgtccaagtgtctaggcagaaactgcatcctgttgttctaaagaagtagacccaagtttccatagcaagtggttagcagggtcctgaccacttctccttgttctggcacctcctgcaagctcctgggctctctccttgcttgaaatgggcaactgcccttgaaactcctccaagccccaatgggctgcccattgtccctgtgttcccaggatcaagtcgcatggcaggcatgatagaatacgcatatcatctcagagattgggtttcttcctaacaaagaaaagaagaaagggggctgcccccccctttttccaagaaattttgggttcaaattcgcgccctcgggcctcaaggtgggctaacttgaaggtgtttgaaccgaagctgaactacagcgaccatgatgtcatcaaatgggtgcgctaaaattggccgcaagtggcatttattgaaactcgcctgctagctgccactaggcagctagcccaacttccccagccacccttccttcaacaggtccagggtgccggctcccttcccccaccacacattcagtgtctccctcccctccctgctttgcctgcccttcccctttgcaaccaagccccgaagtcttaggtctcgggccaaagcaacattaccaagtggggaccggttggaagcaacccctggggttcccctggggcaggggagttctgaaggctcctgctctccccatccaccgtgtcgtgtcctggccttaatgcccaggctctgagttctgtgacccaaagcccaggtgggttccctttccttccccacccctgtggccacagctctggagtgggagggttggttgcccctcaacttcagagctcccccaaaggccagtgaatggatccccggcctcagtccctactctgctttgggatagtgtgagcttcattttgtaacaagtgtgacttcgtccagttacaaacccatataaactctgtagagtggaaaaaaaaaaaaaaaaaaaaaaaaaaaaaaaaaaaggaaaaaaaaaaaaaaaaaaggcggccgtt

SEQ ID NO: 4296 - DNA, 439 bp, Homo sapiens
  SIMILAR (293)..(436): 771254mologous to Homo sapiens neutral protease large subunit,accession number M27826,Smith-Waterman Score=186.
  misc_feature (1)...(439): n = a,t,c or g
ctgnnnnnnnnnnnnnnnnnnnnnnnnnnnnnnnnnnnnnnnnnnnnnnnnnnnnnnnnnnnnnnnnnnnnnnnnnnnnnnnnnnnnnnnnnnnnnnnnnnnnnnnnnnnnnnnnnnnnnnnnnnnnnnnnnnnnnnnnnnnnnnnnnnnnnnnnnnnnnnnnnccacctaggcaagctaagatgcagaatctcgccgctcctggcagccactcccagagcccctggaactccggcccaaggctctctgactgactccttcccagatcttctcggcttagcggctgaagactgacactgcccgatcgcctcggaagccgccttcttttcaagggcctgtttcccttgcctccataactgttgtgggtattgacggccaggcttctaaacctcttaaaactccccaactctggtgccaacttagacaatactcttttaag

SEQ ID NO: 4297 - DNA, 556 bp, Homo sapiens
  SIMILAR (60)..(428): 761254mologous to Homo sapiens neutral protease large subunit,accession number M27826,Smith-Waterman Score=465.
agcggctgaagactgacactgcccgatcgcctcggaaacctacaagaccatcacagatgctttgggtaactctaccagtggagggtaagtccgtccccttcctaatcaatacagaggctacccactccacattaccttcttttcaagggcctgtttcccttgcctccataactgttgtaggcattgacagccaggcttataaacctcttaaaagttcccaactctggtgccaacttggacaatattcttttatgcactcctttttagttatccccacctgcccagttcccttattaggtcaagacattttaactaaattatctgcttccctgactattcctgggctacagccacaccttattgccacccttttccccagtttaaagcctccttcacatcctccccttgtatctccccaccttaatccacacatatgggacatgtctactccctccttggtgactgatcatgcaccccttaccatcccattaaaacctaatcacccttaccctgttcaatgctaatatcccatcccccagcatgctttaaaaagact

SEQ ID NO: 4298 - DNA, 425 bp, Homo sapiens
  SIMILAR (21)..(275): 981254mologous to Homo sapiens tat interactive protein,accession number U40989,Smith-Waterman Score=464.
ccaggcaatgagatttaccgcaaggcaccatctccttctttgagattgatggacgtaagaacaagagttattcccagaacctgtgtcttttggccaagtgtttccttgaccataagacactgtactatgacacagaccctttcctcttctacgtcatgacagagtatgactgtaagggcttccacatcgtgggctacttctccaaggagaaagaatcaacggaagactacaatgtggcctgcatcctaaccctgcctccctaccagcgccggggtacggaagctgctgatcgagttcagctatgaactctccaaagtggaagggaaaacagggacccctgagaagcccctctcagaccttggcctcctatcctatcgaagctactggtcccagaccatcaatgagattagtgaaatcaccagcat

SEQ ID NO: 4299 - DNA, 379 bp, Homo sapiens
tgctgtaagacttgagtggcctgactgggtggttgtgaggattcaaggagaaaaggtgcaccaaggtgcttcctaagtcggggagaccattcctgggagccacgtgactgacccccaccatggctctttccctccaactcgtgctgatagctggccgctgggaggccgtccccagtgagatcctcaccctcataatggaccttagccccttgctggtcccactcacatcccgtctccattgctgtctgagttccaagactgagtttcttcaagcatccacttgtgctaccaggctgagaagttctgaggatgtgaccccatctgggcatcatttaaccaataaaatttctcgaatggcccttaaaaaaaaaaaaaaaaa

SEQ ID NO: 4300 - DNA, 1386 bp, Homo sapiens
  SIMILAR (1)..(1383): 991254mologous to Homo sapiens cPLA2 interacting protein,accession number U67734,Smith-Waterman Score=2450.
atggcggaggtgggggagataatcgagggctgccgcctacccgtgctgcggcggaaccaggacaacgaagatgagtggcccctggccgagaycctgagcgtgaaggacatcagtggccggaagcttttctacgtccattacattgacttcaacaaacgtctggatgaatgggtgacgcatgagcggctggacctaaagaagatccagttccccaagaaagaggccaagacccccactaagaacggacttcctgggtcccgtcctggctctccagagagagaggtgaaacggaaggtggaggtggtttcaccagcaactccagtgcccagcgagacagccccggcctcggtttttccccagaatggagccgcccgtagggcagtggcagcccagccaggacggaagcgaaaatcgaattgtttgggcactgatgaggactcccaggacagctctgatggaataccgtcagcaccacgcatgactggcagcctggtgtctgatcgaagccacgacgacatcgtcacccggatgaagaacattgagtgcattgagctgggccggcaccgcctcaagccgtggtacttctccccgtacccacaggaactcaccacattgcctgtcctctacctgtgcgagttctgcctcaagtacggccgtagtctcaagtgtcttcagcgtcatttgaccaagtgtgacctacgacatcctccaggcaatgagatttaccgcaagggcaccatctccttctttgagattgatggacgtaagaacaagagttattcccagaacctgtgtcttttggccaagtgtttccttgaccataagacactgtactatgacacagaccctttcctcttctacgtcatgacagagtatgactgtaagggcttccacatcgtgggctacttctccaaggagaaagaatcaacggaagactacaatgtggcctgcatcctaaccctgcctccctaccagcgccggggctacggcaagctgctgatcgagttcagctatgaactctccaaagtggaagggaaaacagggacccctgagaagcccctctcagaccttggcctcctatcctatcgaagctactggtcccagaccatcctggagatcctgatggggctgaagtcggagagcggggagaggccacagatcaccatcaatgagattagtgaaatcaccagcatcaagaaggaggatgtcatctccactctgcagtacctcaatctcatcaactactacaagggccagtacatcctcacactgtcagaggacatcgtggatggccatgagcgggccatgctcaagcggctcctgcggatcgactccaagtgtctgcacttcactcccaaggactggagcaagagggggaagtggtga

SEQ ID NO: 4301 - DNA, 2025 bp, Homo sapiens
  SIMILAR (1)..(1539): 871254mologous to Homo sapiens tat interactive protein,accession number U74667,Smith-Waterman Score=2291.
  misc_feature (1)...(2025): n = a,t,c or g
atggcggaggtgggggagataatcgagggctgccgcctacccgtgctgcggcggaaccaggacaacgaagatgagtggcccctggccgagatcctgagcgtgaaggacatcagtggccggaagcttttctacgtccattacattgacttcaacaaacgtctggatgaatgggtgacgcatgagcggctggacctaaagaagatccagttccccaagaaagaggccaagacccccactaagaacggacttcctgggtcccgtcctggctctccagagagagaggtgccggcctcggcgcaggccagcgggaagaccttgccaatcccggtccagatcacactccgcttcaacctgcccaaggagcgggaggccattcccggtggcgagcctgaccagccgctctcctccagctcctgcctgcagcccaaccaccgctcaacgaaacggaaggtggaggtggtttcaccagcaactccagtgcccagcgagacagccccggcctcggtttttccccagaatggagccgcccgtagggcagtggcagcccagccaggacggaagcgaaaatcgaattgtttgggcactgatgaggactcccaggacagctctgatggaataccgtcagcaccacgcatgactggcagcctggtgtctgatcgaagccacgacgacatcgtcacccggatgaagaacattgagtgcattgagctgggccggcaccgcctcaagccgtggtacttctccccgtacccacaggaactcaccacattgcctgtcctctacctgtgcgagttctgcctcaagtacggccgtagtctcaagtgtcttcagcgtcatttgaccaagtgtgacctacgacatcctccaggcaatgagatttaccgcaagggcaccatctccttctttgagattgatggacgtaagaacaagagttattcccagaacctgtgtcttttggccaagtgtttccttgaccataagacactgtactatgacacagaccctttcctcttctacgtcatgacagagtatgactgtaagggcttccacatcgtgggctacttctccaaggagaaagaatcaacggaagactacaatgtggcctgcatcctaaccctgcctccctaccagcgccggggctaccggaagctgctgatcgagttcagtgagctatgaactctccaaagtggaagggaaaacagggacccctgagaagcccctctcagaccttggcctcctatcctatcgaagctactggtccccagaccatcctggagattctgattggggctgaagtcgaagagcggggagaggccacagatcacatcaaatgacattagtgaaatcaccagcatcaagaaggaggatgtcatctccactctgcagtacctcaatctcatcaactactacaagggccagtacatcctcacacctgtcagaggacatcgtggatggcaatgagcggcccatgctcaaagcggcttctgcggatcgactcccaagtgtctgcactttcactcccaaaggacctggagccaagaggtggatagtggtgaccaggacacctgcccacactgcaagtgccaaagaccggccagtcaggatcttggggctgattagccccaccaccgcacctcactgtcagctcaccacataagcacttctaaggggagatgggggctgaggacagcttcaaaaagggagagggacaggcctgggcagggggccccacttgggtgcccagcaccaagggcgnagcttccgggctcagaccaactccaaggtcagcctcgcaacaggcccaggcctcctctgaagcagggaccagagggagccaggcagctgtgtacagtgagaagggatccggatgggggagctctgtacagagggctggtgattgtaaaaatttcttttgtaaagtagaagttgggggtggggtgggtgctggctgcaaaaatttctggcttctcttacccctattgcccccggcaataaattgtttctatatgccaaaaaaaaaaaaaa

SEQ ID NO: 4302 - DNA, 542 bp, Homo sapiens
  misc_feature (1)...(542): n = a,t,c or g
cttgttaaacgccggcccgggcccagcttttaatacggccccccataaggaaaaaactaaaaccttgcaagcccgcgttaacttgggcccccccaaggattctttaaaacggccccccccccccnnnnnnnnnnnnngtcttctaagtcttcatgtctacagtgttattttttgctattattttttgtttcttcgacagtgacataaactgaggtaaacatctgtgaccaacacctctcctaaggggcaaagggtcccagcccgaccagcagaggaggtggcagcaccagggccccaacctggtgttccggttctgctctggggtcaggctggaggctggccctctgggtgcctctgggaatgagggggctgggctacataactatggtcccctcccaactctaacatactagatactacaacggctggggaaactcccgaacaggatcttaacagagagagggagagagagaaagagaggagagagagagagagagagagagagagagagagagagagagagagagggagagagagagcgc

SEQ ID NO: 4303 - DNA, 1651 bp, Homo sapiens
  SIMILAR (938)..(1105): 941254mologous to Homo sapiens cPLA2 interacting protein,accession number U67734,Smith-Waterman Score=267.
ttttttttttttttttttatggtccattcgagaaattttattgggtaaatgatgcccagatggggtcacatcctcagaacttctcagcctggtagcacaagtggatgcttgaagaaactcagtcttggaactcagacagcaatggagacgggatgtgagtgggaccagcaaggggctaaggtccattatgagggtgaggaagggcttctagaagtaacaaacatcccaggtccctgactggggagaatgaagacactgaccaagagatgtgaagccactcagggctgtgcagggtctgaggatctcactggggacggcctcccagcggccagctattcagcacgagttggagggaaagagccatggtgggggtcagtcacgtggctcccaggaatggtctccccgacttaggaagcaccttggtgcaccttttctccttgcatccttacaaccacccagtcaggccactcaagtcttacagcaggtgacactcccaaggtcccagctaggaggactttgagaattcaagcattctcagggtctgggattagagacagggaatctgtctccacttcctttacatgggcttagacacagagcccgggagggcaaaggaaaattggaggccccttcttcccatgagccattttctctgcatcccctgcccataagccttcactggcctctgatcaccctcatggttgactgcagctgctcctctcrrgtgccctcatcccctccacgtgtgctcagcgcacgggaaagagtgaaatactcaagttccttcctgagggaactgaggcacagagaagtggagggcatagaactgccaagtggcagggccatggataggaactaggcagcctgccttggcaacctgtgtttttaaatgttgcttatgttcatctgtgacctcttactcaccctctcctgctccattgctttaggctatgaactctccaaagtggaagggaaaacagggacccctgagaagcccctctcagaccttggcctcctatcctatcgaagctactggtcccagaccatcctggagatcctgatggggctgaagtcggagagcggggagaggccacagatcaccatcaagtgagcctggcgctgtctacctgggggtacatggcatggcttgtctgttcctgggctttctctctcagggctcctggggacagataaaggtcctcagggaacctgacctgtgctctcccacagtgagattagtgaaatcaccagcatcaagaaggaggatgtcatctccactctgcagtacctcaatctcatcaactactacaaggtagggaggcaggcaggggagacaggtgtgtgggatgcagagtgcagtcctctgtgggctgaccacctgctgaacccatctcctctgcccagggccagtacatcctcacactgtcagaggacatcgtggatggccatgagcgggccatgctcaagcggctcctgcggatcgactccaagtgtttgcacttcactcccaaggactggagcaagagggggaagtggtgaccagaccctgccccctgcagtgccaagacggcagcaggactggggctgatagcccaccccgcccccactgcagctcccacaaagcactctaagggagatggggctgaggaca

SEQ ID NO: 4304 - DNA, 434 bp, Homo sapiens
  SIMILAR (37)..(258): 441254mologous to Homo sapiens PRO2852,accession number AF130079,Smith-Waterman Score=133.
gttgagagatggggtcttgctttgtcacccaggctggagtacagtggcacaatcatagctcactgctgccttgaacttctgggctcaggggatcctcctgccttagcctcctataactagtacttagaaactcaccactgcatccagctaacttatttttttatttttgtagagtaagcatctcactatcttaaccaggctggtattaaacttctgggctcaagtgatcctccggccttggttgcccaaaggtttggggattacaggcatgagccactgcactcagcctaactttaaaaatcagagaaaaggatattgccaagttaactttaacaatcaaacaaaaaccctaagccttgcaggaaatacatatttcacaccaattttattttttggtaataaacatgtaaccagttataatttcccatctatgg

SEQ ID NO: 4305 - DNA, 671 bp, Homo sapiens
  SIMILAR (100)..(32): 651254mologous to Homo sapiens PRO0657,accession number AF090942,Smith-Waterman Score=80.
gcgtggtcgcggccgaggtaccttcttttttttttttttttttgagaacggagtcttgctttgtcacccaggctggactgcagtggcatgatctcggctctgcaacctccatctcccaggttcaagcgattctcctgcctcagcctcccaagtagctgggattacaggcaggcaccactatgccctggcctaattttttgtatttttagtagatatggggattcaccatgttgggtcaggctggtctcgaaactccctgaaccttgtgaatctgccctgcctcggacctccccagtattggggattacagggcatgagcccacccatgccccggcccttaaaatgcccttccttaaagggaaaaatgcccaactcccatccttaaatctcaagggaaatctggattgtcccaaataggattctgttaaatatgtaacatattaataggtaacttgctgtgtaaaattataagccatattttaaaaggttttaaaaatacttattgtgctccatttgtgatataatttctaacatttctgctctgtgatgggggtttatttgtaagaataagaggcaaaggaatgttagcatagcaaaaatgtgtttgaatgagttaaccttttaatcgcaaccctatgtgaataaaattactccactgttaaaaaaaaaaa

SEQ ID NO: 4306 - DNA, 611 bp, Homo sapiens
  SIMILAR (3)..(272): 541254mologous to Homo sapiens Human myelin oligodendrocyte glycoprotein gene,accession number AAZ29204,Smith-Waterman Score= 180.
tctttattttttttcctttgagacagagtcttgctctgtcacccaggctggagtgcagtgtggtgtgatcttggctcacttgcaacctcctcctcccaggttcaagcaattcttgtgcctcagcctcctgagtagctaggattacaggtgtgcaccaccatgcccagctaatgtttgtatttttagtagaaacagggtttcaccattttggccaatctggtctcaaacccttaagtgatccgcccgcctcggcctcccaaagtgctgggattaataggtgtgagccaccagggactggccaccactatattttttctaagtaaatatttttttcccatagtagtagaatctctttctttaaataaagttttaaataaaaatccaatctatggccaaaggtaaaaggcattaacataaatttaaagaaacatttattggatataacaatgaagctattttgaagatggcaaaatattaactacagcattcattaaattatcttcaaatgtttacagataccctgaagctcagagagagtctaaaaactattttcctagttggctttagtctcaaaagtgtcctaagagactaagaagatatagtaggctttg

SEQ ID NO: 4307 - DNA, 3703 bp, Homo sapiens
  SIMILAR (1495)..(1635): 1001254mologous to Mus musculus putative,accession number AK014886,Smith-Waterman Score=250.
atgcagcccctggactttagttcagggggaagtgaccccaacatcagcctctcagaaaagatccgagatcagcttgttgttggacagctgattccagactgctatgtagaacttgaaaaaatcattttatcggagcgtaaaaatgtgccaattgaatttcccgtaattgaccggaaacgattattacaactagtgagagaaaatcagctgcagttagatgaaaatgagcttcctcacgcagttcactttctaaatgaatcaggagtccttcttcattttcaagacccagcactgcagttaagtgacttgtactttgtggaacccaagtggctttgtaaaatcatggcacaggatgttagcagcatttttggcctttatattcgagacattttgacagtgaaagtggaaggttgtccaaaacaccctaagggcattatttcgcgtagagatgtggaaaaatttctttcaaaaaaaaggaaatttccaaagaactacatgtcacagtattttaagctcctagaaaaattccagattgctttgccaataggagaagaatatttgctggttccaagcagtttgtctgaccacaggcctgtgatagagcttccccattgtgagaactctgaaattatcatccgactatatgaaatgccttattttccaatgggattttggtcaagattaatcaatcgattacttgagatttcaccttacatgctttcagggagaggctgtattcttttgggccaagttgtggaccacattgattctctcatggaagaatggtttcctgggttgctggagattgatatttgtggtgaaggagaaactctgttgaagaaatgggcattatatagttttaatgatggtgaagaacatcaaaaaatcttacttgatgacttgatgaagaaagcagaggaaggagatctcttagtaaatccagatcaaccaaggctcaccattccaatatctcagattgcccctgacttgattttggctgacccgcctagaaatattatgttgaataatgatgagttggaatttgaacaagctccagagtttctcctagactgttttgtgtgtattcacttatatccatcaagtgactacatttcaaggcactatatgagaaccataaatattgtacaaacaggatttgctaaatgtcggtggagagtaacagtccacggggctgatcatggtgatggcagttttggatcagtttaccgagcagcctatgaaggagaagaagtggctgtgaagatttttaataaacatacatcactcaggctgttaagacaagagcttgtggtgctttgccacctccaccaccccagtttgatatctttgctggcagctgggattcgtccccggatgttggtgatggagttagcctccaagggttccttggatcgcctgcttcagcaggacaaagccagcctcactagaaccctacagcacaggattgcactccacgtagctgatggtttgagatacctccactcagccatgattatataccgagacctgaaaccccacaatgtgctgcttttcacactgtatcccaatgctgccatcattgcaaagattgctgactacggcattgctcagtactgctgtagaatggggattaaaaaacaattcagaggggcacaccagggtttcgtgcacctgaagttgccagaggaaatgtcatttataaccaacaggctgatgtttattcatttggtttactactctatgacattttgacaactggaggtagaatagtagagggtttgaagtttccaaatgagtttgatgaattagaaatacaaggaaaattacctgatccagttaaagaatatggttgtgccccatggcctatggttgagaaattaattaaacagtgtttgaaagaaaatcctcaagaaaggcctacttctgcccaggtctttgacattttgaattcagctgaattagtctgtctgacgagacgcattttattacctaaaaacgtaattgttgaatgcatggttgctacacatcacaacagcaggaatgcaagcatttggctgggctgtgggcacaccgacagaggacagctctcatttcttgacttaaatactgaaggatacacttctgaggaagttgctgatagtagaatattgtgcttagccttggtgcatcttcctgttgaaaaggaaagctggattgtgtctgggacacagtctggtactctcctggtcatcaataccgaagatgggaaaaagagacataccctagaaaagatgactgattctgtcacttgtttgtattgcaattccttttccaagcaaagcaaacaaaaaaattttcttttggttggaaccgctgatggcaagttagcaatttttgaagataagactgttaagcttaaaggagctgctcctttgaagatactaaatataggaaatgtcagtactccattgatgtgtttgagtgaatccacaaattcaacggaaagaaatgtaatgtgggggaggatgtggcacaaagattttctccttttctaatgatttcaccattcagaaactcatttgagacaagaacaagccaactgttttcttatgcagctttcagtgattccaacatcataacagtggtggtagacactgctctctatattgctaagcaaaatagccctgttgtggaagtgtgggataagaaaactgaaaaactctgtggactaatagactgcgtgcactttttaagggaggtaacggtaaaagaaaacaaggaatcaaaacacaaaatgtcttattctgggagagtgaaaaccctctgccttcagaagaacactgctctttggataggaactggaggaggccatattttactcctggatctttcaactcgtcgacttataccgtgtaattgcaacttttgtaattcgggtcagagttcatgatgacagcacagctaggaagcccttaaaagatgtcatgctgggaattgggctacaaccgggaaaatactggaggttccccaaaagcagaaagagatacaatcttgcttgaccgtttgggacatcaatcttccacatgaagtgcaaaatttagaaaaacacattgaagtgagaaaagaattagctgaaaaaatgagacgaacatctgttgagtaagagagaaataggaattgtctttggataggaaaattattctctcctcttgtaaatatttattttaaaaatgttcacatggaaagggtactcacattttttgaaatagctcgtgtgtatgaaggaatgttattatttttaatttaaatatatgtaaaaatacttaccagtaaatgtgtattttaaagaactatttaaaacacaatggttatatttcttataaataccagttactttcgttcattaattaaatgaaaataaatctgtgaagtaccttaatttaagtactcatactaaaatttataaggccgataatttttttgttttcttgtctgtaatggaggtaaactttattttaaattctgtgcttcagacaggactattgcttgttgatttttctagaaatctgcacggtataatgaaaatattaagacagtttcccatgtaatgtattccttcttagattgcatcgaaatgcactatcatatatgcttgtaaatattcaaatgaatttgcactaataaagtcctttgttggtatgtgaaaaaaaaaaaaaaaacaaaa

SEQ ID NO: 4308 - DNA, 373 bp, Homo sapiens
  misc_feature (1)...(373): n = a,t,c or g
ccttggtgtagcttttcagtgtttcttctgcttttggtttgttgagctttttggatttgtgggtttacagttattatcaaatttggaaaaatttcagcccttatgtcttcaaatattttttctgtctccctgccccatccgtagtctttatatatttgatcatctaaagttgtctcacagctcacagtgacactgcttgtttttccagtctttttttccctctaggtgtttcattttgaacaattgctattgctatgtcttcaagatccttaatcttttcttctgtagtgccacatcttacccagtgaacttttcacctcagacatggtattttttatttctagaaattaggtctttttttacatttcccacn

SEQ ID NO: 4309 - DNA, 2223 bp, Homo sapiens
  SIMILAR (344)..(628): 961254mologous to Homo sapiens isovaleryl-coA dehydrogenase (IVD),accession number M34192,Smith-Waterman Score=473.
tttccgcagttaggggctgctatttcaacgcagggagataaaaagaaaaaaacacttgctcttctaccccgctaaaaacactcatcctagggagcacgccagcatttgcagcgttcggggcagggccactcggcctgcggccgttgcactggctggaagctggcaggcgatcacggttgattggctcgggtgcggtccaagggcagcaacgccttcggcgggccgcctagggtgattggctgctgcagcccaccccctagccggtttggtgggcggcgaagcctggattggtggagctaagagctggctcagtttcagcgctggctcttcgtgcatggcagagatggcgactgcgactcggctgctggggtggcgtgtggcgagctggaggctgcggccgccgcttgccggcttcgtttcccagcgggcccactcgcttttgcccgtggacgatgcaatcaatgggctaagcgaggagcagaggcagcttcgtcagaccatggctaagttccttcaggagcacctggcccccaaggcccaggagatcgatcgcagcaatgagttcaagaacctgcgagaattttggaagcagctggggaacctgggcgtattggggcatcacagcccctgttcagtatggcggctccggcctgggctacctggagcatgtgctggtgatggaggagatatcccgagcttccggagcagtggggctcagttacggtgcccactccaacctctgcatcaaccagcttgtacgcaatgggaatgaggcccagaaagagaagtatctcccgaagctgatcagtggtgagtacatcggagccctggccatgagtgagccccaatgcaggcttctggatggtctctatgaagctcaaagcggaaaagaaaggaaatcactacatcctgaatggcaacaagttctggatcactaatggccctgatgctgacgtcctgattgtctatgccaagacagatctggctgctgtgccagctttctcggggcatcacagccttcattgtggagaagggtatgccctggctttagcacctctaagaagctggacaagctggggatgaggggctctaacacctgtgagctaatctttgaagactgcaagattcctgctgccaacatcctgggccatgagaataagggtgtctacgtgctgatgagtgggctggacctgggagcggctggtgctggccggggggcttcttgggcttcatgcaagcggtcctgggaccacaccattccctaccttgcacgtgagggaagcctttggccagaagatcggccacttccagtttgatgcaggggaagatggctgacatgttacacccgccttcatggcttgttcgggcagtatgtctacaatgtcgccaaagcctgtgacgaggggccacatcattcccaaggactgtgccggtgtgattctgtatgcagccgagtgtgctacacaggtagccctggacggcattcagtgttttggtggcaatggctacatcaatgactttcccatgggccgctttcttcgagatgccaagctgtatgagataggggctgggaccagcgaggtgaggcggctggtcatcggcagagccttcaatgcagactttcactagtcctgagacccttcgcccccttttcctgcacctagtggcctttcttgggaagtagagatgtggcggctttcccaccctgcccacagcaggccctcctgcccagctgctcttgtcagccctctggcctctggatgaggttgagttctccacaacagctcccaagcatcatgggcctcgcagccgggcctgtgccacggctagtgttgtgtgatttaaaatggactcagcaggaagcatattgtctggggattgttgggacaggttttggtgactctgtgcccttgctctctaacttctgagcccacctcccagggtaggcacctgggggcatgcaggtgcccacctcccagggtaggcacctgggggcatgcaggtacccacctctttctcttgggtgaggctctggcaaggagatctctctgctcaagcacagcagaatcatggcccctctccatgaattggaacttggtacaggttaagtatccctaatcctgaaatctgaaacacttgtggttccaagcattttggataaggcaaattcaactttcagtctcttttctgggggaaaaaaataataaacctagcctagccagg

SEQ ID NO: 4310 - DNA, 1457 bp, Homo sapiens
  SIMILAR (533)..(859): 791254mologous to Mus musculus putative,accession number AK017660,Smith-Waterman Score=447.
atggcgactgcgactcggcttgctggggtggcgtgtggcgagctggaggctgcggccgccgcttgccggcttcgtttcccagcgggcccactcgcttttgcccgtggacgatgcaatcaagggggtgttgcgaggagccagaggcagcttcgtcagaccatggctaagttccttcaggagcaaccttgcccccaaggccgcgggagatcgatcgcagcaatgagttcaagaacctgcgagaattttcggaagcagcttggggaaccttgggccgtatttggggcatcacagcccctggttcagtatgggcggcttccggcctggggcttacctggggagcatgttgcttgggtgatgggaggagatatccccgagcttttccggagcagtggggctctagttacggtgcccactccaacctctcgcatcaaccaagcttgttacgcaattgggaatttagggcccagaaagagaagtatctccccgaaggttgattcagtggttgagtacatcggagccctggccatgagttaagccccatgcaggctctgatgttgtctctatgaagctcaaagcggaaaagaaaggtgaggccactctcaacttgggagccaaaatgggcagaggaaatcactacatcctgaatggcaacaagttctggatcactaatggccctgatgctgacgtcctgattgtctatgccaagacagatctggctgctgtgccagcttctcggggcatcacagccttcattgtggagaagggtatgcctggctttagcacctctaagaagctggacaagctggggatgaggggctctaacacctgtgagctaatctttgaagactgcaagattcctggtaagtagcaccgggaatcggggagcccctctcctgacccccttccaggctgatctggctgttctcaagttgagaaagcctctgggttagagaggcttggcattgttagcgcttcagtgacatgtggctaggctgtgagctggggctgctggacagcgctccttcctggccagggccctgcagcggcatgcctaactggcatcacacactccgcatagggtctgtactcagtagccggaggagaagggtcagacctaccctttcccattgatgtccttcagtcttcctgtactttcgcccatccactgcatgtgagtaactcattaactcacgtttttgtaaaatattttaaaaatgagttattcatttttagcattaatgatgctaagaaaaaaaaacaaaacatctgaatccactgatggaatcccgactcagtaaagagaaggcagttctgcttgagtatgagtattttctcccctgaggtggaactgaaatctgacatggtggagcactgtgggagagccagcacagccatcatgtactaaccagaccaggggcatggatttgttgtttggggtttttttttgttttttttgg

SEQ ID NO: 4311 - DNA, 1132 bp, Homo sapiens
  SIMILAR (15)..(542): 771254mologous to Homo sapiens FLJ00106 protein,accession number AK024498,Smith-Waterman Score=642.
  misc_feature (1)...(1132): n = a,t,c or g
cttctcaccaccaccctctagcagctccctcactcggagaggcggccatcagccgcagcttccagagtctggcatgttccccgggcctccccgctgctgaccgcctgtcctactcaggccgccctggaagccgacaggccggcctcggccgcgctggcgactcggcggtgctggtgctgccgccttccccgggccctcgttcctccaggcccagcatggactcggaagggggaagcctcctcctggacgaggactcggaagtcttcaagatgctgcaagaaaatcgcgagggacgggcggccccccgacagtccagctcctttcggctcttgcaggaagccctggaagctgaggagagaggtggcacgccagccttcttggccagctcactgagcccccagtccttccttgcccgcctccagggcgcctggccacccctcccaagctccacacttgtgagaagtgcagtaccagcatcgcgaaccaggctgtgcgcatccaggagggccggtaccgccaccccgggctgctacacctgtgccggactgtgggctgaacctgaagatggcgcgggcacttctgggtgggtgacgagctgtactgtgagaagcatgcccgccagcgctactccgcacctgccaccctcagctctcgggcctgagccccgccatgccctccagcctgcctcaactgctgggccccgggtcatgccctatataaagttggcatggccagggaacaatggtgggcacgttgctcttacatgagcctaagtttggagaccttgaggcccctttgtccctcgctgggtgggcccaaggtctgggaccctgtcttggactgtgggagactcaccctcgaccttncccaggcctctcccctgcaggactggcattgcactaagtctgaggtggccactgcctttgatcaacctttgtgtgcgagggtctaagtagggtcgaacacagaagtgggaaggagaggggtgggccaggggctatatggtgtcactgtgtaaagtttctctgacatgctagctatataaatatatgaatatggacaaaacaaaacacacctaaactgacgaacttgtacttgaaatatgcaaatggggcgcccgtctctcgtgtag

SEQ ID NO: 4312 - DNA, 546 bp, Homo sapiens
  misc_feature (1)...(546): n = a,t,c or g
ctttgttcactttcaatctaagaaaactatgcgtaaaatatgtctttttttttttttttcttcagagacaggatcccgctctgtctcccaggccggagtgcagtggcacgagtcatagctcactgtaacctcaaactcctggactcaagcgatcttcctgccttagccttagcctcctgagtagctaggactgtaggcatgtaccaccgcggcctggcctgtgtctattttatcattcagattaatttaattttgtattttctggctcagatgaacttaaagaagcatcaaacatttcttttttatgaaatgttaaatttaatagcatcacaggccggtaaaatatattcaagtaacagaaatatcaaagtcttttggccacaataaactgaacactttatggaaagcatacttcatcatgggatccactttgaaaatattacgagattcttcaacatttcaaagtggaggaaattaaaaaggccnttnatttaaaagtagtgcttaggggaacagagaaaataaggnttaaaattttaccccttt

SEQ ID NO: 4313 - DNA, 849 bp, Homo sapiens
  SIMILAR (145)..(501): 441254mologous to Xenopus laevis ribsomal protein S19,accession number V01443,Smith-Waterman Score=139.
  misc_feature (1)...(849): n = a,t,c or g
gccacagctaacatcattgcagctcttttcctccttggctgtctgaagatagatcgccatcatgaccgaccaccggaactatccccaactagaaaagttcatgacccaaccgactacttccagaaggaaacaaatgggtcatttgatgtcctttcaccccggggaaggccgacagtgcccctaagcacagaaattccggggaaaaacctagccccaaaatgtaccaagaccccacacccggatgtccatcctttgtatttggattccagaacctcattttggtggtggcaagacaactgggctttggccatgatttatgattccccctggattatgcaaagaaaaatgaaccccaaacatagactttgcaagaccatggcctgtatgagaaagaaaaagaccttcaagaaagcaaccgaaaggaaccgcaagaaccagaatgaaagaaagtccaggggggactggcaaagggccaatgttggtgctgggcaaaaagaagaaatgaagtgtctagcagttgagctggagattggatcacagccgaggagttaaaggtgctgcaatgatgttagctgtggccactgtggatttttcgcaagaacattaataaactaaaaacttcnnnnnnnnnnnnnnnnnnngggggggccgttttaaagaatccttgggggggccaaagttaaccgggcgtgtgcaaggattagttttttccttatagggagccgtattaaaacctacttgggaatttttggaaagaaactttatttttggggggggacttattgggccaacctccctacaaaaatttaaggctttagggaaaataaaaaattttaaagggtataaggg

SEQ ID NO: 4314 - DNA, 441 bp, Homo sapiens
  misc_feature (1)...(441): n = a,t,c or g
gccaagcttggcacgaggnnnnnnnnnnnnnnnnnnnnnnnnnnnnnnnnnnnnnnnnnnnnnnnnnnnnnnnnnnnnnnnnnnnnnnnnnnnnnnnnnnnnnnnnnnnnnnnnnnnnnnnnnnnnnnnnnnnnnnnnnnnnnnnnnnnnnnnnnnnnnnnnnnnnnnnnnnnnnnnnnnnnnnnnnnnnnnnnnnnnnnntgttaagcctgactacatctttttnnnnnnnnnnnnnnnnnnnnnnnnnnnnnnnnnnnnnnnnnnnnnnnnnnnnnnnntactataaataatacgaatatgccaacattatataatcattgctttctgcaactgtttactataatttcaaaattaatatcctattaactgttcctataaattatcaaatttggcaagtgtattactagcaggagatggaccttaaattatgacaacttt

SEQ ID NO: 4315 - DNA, 817 bp, Homo sapiens
  SIMILAR (801)..(658): 611254mologous to Homo sapiens Human secreted protein, SEQ ID NO: 6953,accession number AAG02872,Smith-Waterman Score=149.
tataacctatgcacattctcccatatagtttaatcatctttagatacttataatgcctaatacaatgtaaatgctatgtaaatagttgttgttatactgtattgtttagggaataacaataagaaaaacagtctgtacatgttcactacagatgcaaccattgttaagcctgactacatctttttatctgcagttgattgaatctatggatgtggaacctgtgcatatggagggtcaactgtactataaataatacgaatatgccaacattatataatcattgctttctgcaactgtttactataatttcaaaattaatatcctattaactgttcctattaaattatccaaatttgggcaagtgtattactagcaggagatggaccttaaattatgacaactttatattttttgatagcatctcttgaaaaagaattttaatgattctaataagaggttctttttcttttttccatttccttgacaaatagtactcatttaaaaactaaggggctaggcttagtggctcacgcctgttaatctcagcactttgggaggctgaggcgggcagatcgcttgaggtcaggagttcaagaccagcccgggcaacgtggtgaaacccggtctgtactaaaaaaaaaaaaaaagaaaaagaaaaagaaaaaagaatacccaggtgtggtagtgcatgcctgtagtcccagctactttggagactgaggtgggagtaccccttgagcctgggaggcgcaggttgcagtgaaccaagatcacatcactgcacttcaacctgggtgacagagcaagaccctgtctc

SEQ ID NO: 4316 - DNA, 413 bp, Homo sapiens
  SIMILAR (3)..(266): 451254mologous to Plasmodium vivax pva1,accession number X92485,Smith-Waterman Score=156.
ttttttttttttaaaaagagacatgggtctcattctgtcacccaggcttgagtgcagtggcacaattataactcactgtagccttgaactcctaggctcaagggatcttcctacctcagctttcagagtagtggcactacaggtatgtactaccatatctggctaattttaaaaactttttttttaagagacgggagcttactttattcctcaggctgatcttgacctcctgggctcaagtgagcttcttacttcagcctcccaagtaatgtcttagttacctattgcagcataacaaatcacctcaatgtatgcattttttttaattgaaaacaaattttttaatttttgtgggggtgcatggggtgtatatatgggggggtacatgaggaaggttttgatacggggtcaac

SEQ ID NO: 4317 - DNA, 857 bp, Homo sapiens
  SIMILAR (10)..(87): 881254mologous to Mus musculus putative,accession number AK018256,Smith-Waterman Score=124.
ctctttgcaggcccttctgcgatgttttacctggctgcggctgtgtcagatttctatgttcctgtctctgaaatgcctgaacacagatccagtcatctgggggcccactgcagataacaatgaagatggtgccaaaactgctttctcctttggttaaagattgggctcccaaagcatttataatttcctttaagttggagactgaccccgccattgtaattaatcgagctcggaaggctttggaaatttatcagcatcaagtggtggtggctaatatccttgagtcacgacagtcctttgtgtttattgtaaccaaagactcggaaaccaagttagtctcgacacacagcttttataggtgacagaaactgaagtaaaaagcccttataggatcaaaaattgttcagggctcttagagatggtgaaaactacaaaaaaaaccatggctttcatatggacagataaaatgaaagaaagggaaaaggcagtggtgtgtaggcaaatatggtttggcatttgtcttttaatgacacctgatatgatgtcattttgattttgaaattgaacactagaactgttaatcacctttaaaaagaagagcttattgggaattatatattccttaaaatatacatgggggcctgaatgtcagccatctttatactatagaaaaaggattatggatgcatgaatggtcatgctttggagatcaaatattggttgaatgcctatgtatgtcaggccctgtgctgagccatgaggattaaaaagatgaataaacatatcttgtttaggaaatggatgtataaaaaaatcaagtgcaataaagtccgtgtccaaaagctgacacaatggaa

SEQ ID NO: 4318 - DNA, 705 bp, Homo sapiens
  SIMILAR (289)..(699): 851254mologous to Mus musculus putative,accession number AK018256,Smith-Waterman Score=599.
ggccggtgcgcttcctggacaacttcagcagcgggcggcgcggtgcaacctcggccgaggccttcctagccgccggctacggggtcctgttcttgtatcgcgctcgctctgccttcccctatgcccaccgcttcccaccccagacttggctgtccgctctgcggccttcgggcccagccctttcgggcttgctgagcctggaggccgaggagaatgcacttccgggttttgctgaggctctgaggagctaccaggaggctgcggctgcaggcaccttcctggcagtagaagttcaccactttggcggactatttgcatctgttgcaggctgcggcccaggcactcaatccgctaggcccttctgcgatgttttacctggctgcggctgtgtcagatttctatgttcctgtctctgaaatgcctgaacacaagatccagtcatctgggggcccactgcagataacaatgaagatggtgccaaaactgctttctcctttggttaaagattgggctcccaaagcatttataatttcctttaagttggagactgaccccgccattgtaattaatcgagctcggaaggctttggaaatttatcagcatcaagtggtggtggctaatatccttgagtcacgacagtcctttgtgtttattgtaaccaaagactcggaaaccaagttattgctatcagaggaaaaaaaaaaa

SEQ ID NO: 4319 - DNA, 1138 bp, Homo sapiens
  SIMILAR (285)..(593): 551254mologous to Mus musculus putative,accession number AK018256,Smith-Waterman Score=259.
tagttttcaccatctctaagagccctgaacaatttttgatcctataagggctttttacttcagtttctgtcacctataaaagctgtgtgtcgagactgaagattatccactatcttctcttctatctctacgcctttttctatttcttcctctgatagcaatgttcccccatttctttcggtgctgcgcgctgggctgaggcccttgtgcgatgttttacctggctgcggctgtgtcagatttctatgttcctgtctctgaaatgcctgaacacaagatccagttcatctgggggcccactgcagataacaatgaagatggtgccaaaactgctttctcctttggttaaagattgggctcccaaagcatttataatttcctttaagttggagacttgaccccgcccattgtaattaatcgagctcggaaggctttggaaatttatcagcatcaagtggtggtggctaaatatccttggagtcaaggacagtcctttgtgtttattgtaacccaaggactcggaacccaagttattgctatcagaggaagaaatagaaaaaggcgtagagatagaagagaagatagtggataatcttcagtctcgacacacagcttttataggtgacagaaactgaagtaaaaagcccttataggatcaaaaattgttccagggctcttagagatggtgaaaactacaaaaaaaaccatggctttcatatggacagataaaatgaaaagaaagggaaaaggcagtggtgtgtaggcaaataatggtttggcatttgtcttttaatgacacccctgatgtgaagtcattttgattttagaaattgaacacttagaactgttaatcacctttaaaaagaagagcttattgggaattatatattcccttaaaatatacatgggggccctgaatgtcagccatcctttatactatagaaaaaggattatggatgcatgaatggtcatgctttggagatcaaatattggttgaatgcctatgtatgtcaggccctgtgctgagccatggaggattaaaaagatgaataaacatatcttgtttaggaaatggatgtataaaaaaatcaagtgcaataaagtgtgtgtccaaaagctgacacaatggaaaggaaaa

SEQ ID NO: 4320 - DNA, 444 bp, Homo sapiens
  SIMILAR (50)..(406): 931254mologous to Bos taurus actin-binding protein CP3,accession number Y10372,Smith-Waterman Score=584.
  misc_feature (1)...(444): n = a,t,c or g
gggcggnnnnnnnnncctcgtagtcattagcccatgcggtggaattcccgggaccgccgccgccgccgccaccatgagtgatcagcagctggactgtgccttggacctaatgaggcgcctgcctccccagcaaatcgagaaaaacctcagcgacctgatcgacctggtccccagtctatgtgaggatctcctgtcttctgttgaccagccactgaaaattgccagagacaaggtggtgggaaaggattaccttttgtgtgactacaacagagatggggactcctataggtcaccatggagtaacaagtatgaccctcccttggaggatggggccatgccgtcagctcggctgagaaagctggaggtggaagccaacaatgcctttgaccagtatcgagacctatggagaaggatgaaactgtgagtgactgctccccacacata

SEQ ID NO: 4321 - DNA, 517 bp, Homo sapiens
  SIMILAR (41)..(295): 951254mologous to Bos taurus actin-binding protein CP3,accession number Y10372,Smith-Waterman Score=426.
agtgatcggcagctggactgtgcctggacctaatgagaccctgcctccccagcaaatcgggaaaaacctcagcaacctcatcgacctggtccccagtctatgtgaggatctcctgtcttctgttgaccagccactgaaaattgccagagacaaggtggtggcaaaggattaccttttgtgtgactacaacagagatggggactcctataggtcaccatggagtaacaagtatgaccctcccttggaggatggggccatgccgtcagctcggctgagaaagctgcaggtggaagcctgcttctgccacacctcgctctcagttctctccacatttccatagagaccgtgtggtttttgttcacccgggccccccgtcttcctccctgtccccccatttataggcataaaatccactgtctgccagcctcccttccctcccacctttttggtacattggtgtaaaaaatgtaaaacaaaaaaattttatgaactaactgtggtgtgtgaaagagagaag

SEQ ID NO: 4322 - DNA, 2490 bp, Homo sapiens
  SIMILAR (154)..(2235): 1001254mologous to Homo sapiens angiotensin converting enzyme (EC 3.4.15.1),accession number M26658,Smith-Waterman Score=3715.
ggaaaataaaatcagaagtacgctgaacgagatctactttggaaaaacaaaggatatcgtcaatgggctgaggtctgtgcagacttttgcagacaaatcaaaacaagaagctctgaagaatgacctggtggaggctttgaagagaaagcagcaatgctaaacctctgtttcatgctaaccagacacgccgtgcactcgttagattcctttcttagaaaactcgttttctgctcccttccctcgtcccttccctccccgacaggtcacataacagctgcatcattgaccgcacagcgccatctctccctgagaataaagccgatagccaccaagaactacaacaccaacatcaccacagagaccagcaagattctgctgcagaagaacatgcaaatagccaaccacaccctgaagtacggcacccaggccaggaagtttgatgtgaaccagttgcagaacaccactatcaagcggatcataaagaaggttcaggacctagaacgggcagcgctgcctgcccaggagctggaggagtacaacaagatcctgttggatatggaaaccacctacagcgtggccactgtgtgccacccgaatggcagctgcctgcagctcgagccagatctgacgaatgtgatggccacatcccggaaatatgaagacctgttatgggcatgggagggctggcgagacaaggcggggagagccatcctccagttttacccgaaatacgtggaactcatcaaccaggctgcccggctcaatggctatgtagatgcaggggactcgtggaggtctatgtacgagacaccatccctggagcaagacctggagcggctcttccaggagctgcagccactctacctcaacctgcatgcctacgtgcgccgggccctgcaccgtcactacggggcccagcacatcaacctggaggggcccattcctgctcacctgctggggaacatgtgggcgcagacctggtccaacatctatgacttggtggtgcccttcccttcagccccctcgatggacaccacagaggctatgctaaagcagggctggacgcccaggaggatgtttaaggaggctgatgatttcttcacctccctggggctgctgcccgtgcctcctgagttctggaacaagtcgatgctggagaagccaaccgacgggcgggaggtggtctgccacgcctcggcctgggacttctacaacggcaaggacttccggatcaagcagtgcaccaccgtgaacttggaggacctggtggtggcccaccacgaaatgggccacatccagtatttcatgcagtacaaagacttacctgtggccttgagggagggtgccaaccccggcttccatgaggccattggggacgtgctagccctctcagtgtctacgcccaagcacctgcacagtctcaacctgctgagcagtgagggtggcagcgacgagcatgacatcaactttctgatgaagatggcccttgacaagatcgcctttatccccttcagctacctcgtcgatcagtggcgctggagggtatttgatggaagcatcaccaaggagaactataaccaggagtggtggagcctcaggctgaagtaccagggcctctgccccccagtgcccaggactcaaggtgactttgacccaggggccaagttccacattccttctagcgtgccttacatcaggtacttcgtcagcttcatcatccagttccagttccacgaggcactgtgccaggcagctggccacacgggccccctgcacaagtgtgacatctaccagtccaaggaggccgggcagcgcctggcgaccgccatgaagctgggcttcagtaggccgtggccggaagccatgcagctgatcacgggccagcccaacatgagcgcctcggccatgttgagctacttcaagccgctgctggactggctccgcacggagaacgagctgcatggggagaagctgggctggccgcagtacaactggacgccgaactccgctcgctcagaagggcccctcccagacagcggccgcgtcagcttcctgggcctggacctggatgcgcagcaggcccgcgtgggccagtggctgctgctcttcctgggcatcgccctgctggtagccaccctgggcctcagccagcggctcttcagcatccgccaccgcagcctccaccggcactcccacgggccccagttcggctccgaggtggagctgagacactcctgaggtgacccggctgggtcggccctgcccaagggcctcccaccagagactgggatgggaacactggtgggcagctgaggacacaccccacaccccagcccaccctgctcctcctgccctgtccctgtccccctcccctcccagtcctccagaccaccagccgccccagccccttctcccagcacacggctgcctgacactgagccccacctctccaagtctctctgtgaatacaattaaaggtcctgccctccc

SEQ ID NO: 4323 - DNA, 702 bp, Homo sapiens
  SIMILAR (16)..(384): 741254mologous to Bos taurus actin-binding protein CP3,accession number Y10372,Smith-Waterman Score=426.
  misc_feature (1)...(702): n = a,t,c or g
cgagccactgacgccgggaccgggaccgccgcngcngccgccaccatgagtgatcagcagctggactgtgccttggacctaatgaggcgcctgcctccccagcaaatcgagaaaaacctcagcgacctgatcgacctggtccccagtctatgtgaggatctcctgtcttctgttgaccagccactgaaaattgccagagacaaggtggtgggaaaggattaccttttgtgtgactacaacagagatggggactcctataggtcaccaatggaagtaacaaagtatgacccctcccttggaagaatggggggcaatgccgtcaagcttcgggctgagaaaagcttggaggttgggaaagccaacaaatggccttttgaccagtatccgaagaccttgttgcttctggaattgttggatcctggatgaatccgcaatcaggactatgtttgggcttgagctccagcctcatgaaccacccaaccccatcgaatgactgagagctgccaaggctcctgccacgttggagctcagaatcctccccgtgggggacactgttgctgcagccagcccttccaagggagccgcttgttttatggcctaaaaagtctctttatgctgagaaggtcacactggactttgctcacacagagatttgacccaagaaaaggaataaagaggccttggatacccaaaaaaaaaaaa

SEQ ID NO: 4324 - DNA, 649 bp, Homo sapiens
  SIMILAR (405)..(467): 711254mologous to Homo sapiens NAG13,accession number AF194537,Smith-Waterman Score=82.
gaagaattggtaccaatctttttaacattattccacaagatagagaaagaaggaaccctccctaattcattctatgaagccagcatcaccctaataccaaaaccaggaaaggacataaccaaaaaagaaaactacagatggatatccttgatgaacatagatgctaaaatccttaacaaaatacttgctaaccaaatccaacaaattaccaaaaagataatccaccatgatcaagtgggtttcataccagggatgcagggatggtttaacatgcacaagtcaataaatgtgatacaccacgtaaacagaattaaaaacaaaaatcacatgatcatttcaatagatgcagaaaaagcatttgacaaaatccagcatccctttatgattaaaactctcagcaaaatggcatacaagggacataccttagtgtaataaaagccatctatgataaacccacagccaatataaaacaaactttccagatacaagattaatgtacagaagtcagtagctcttttatacaccaacggcgaccaagtagagaatcacatcaagaactcaaccccttttacaatagctgcaaaacaaaaaacaaaaaacaaaaaaaaaccttaggaatatacctaaccacggagttgaaaaacccgga

SEQ ID NO: 4325 - DNA, 1742 bp, Homo sapiens
  SIMILAR (450)..(929): 411254mologous to Bos taurus actin-binding protein CP3,accession number Y10372,Smith-Waterman Score=182.
cccacgcgtccggtaagcgccgggccctgctgcgggggggagagccactgacgccgggaccgggaccgccgccgccgccaccaccatgagtgatcaacacttggactgtgccttggacctaaagaggcgcctgcgtccccagcaaatagagaaaaacctcagcgacctgattgacctggtccccagtctatgtgaggatctcctgtcttctgttgaccagccactgaaaattgccagagacaaggtggtgggacaggattaccttttgtgtgactacaacatagatggggactcctataggtcaccatggagcaacaaggatgaccctcccttggaggatggggccatgccgtcagcttcggctgaggaaagctggaggtggaagccaacaatgcctttgacccagtatcgagacctgtatttttaaaaggtgggcgtctcatctgtcttacctctgggatctggatccatggctttggcttgagtggatcctccataaaagaaagggctgggaggatgggatcaaaagaagatcaaaaggctgctggggattccatcccacgtggtagaagtgcaggagaaatccagcggtcgcaccccccattacaagttgacctccacggtgatgctgtggctgcagaccaacaaatctgggttcttgcaccatgaacctcggaggcagccttaccagacagatggagaaggatgaaactgtgagtgactgctccccacaaattagcccaccatcgggcgcctggtagaggacatggaaaataaaatcagaagtacgctgaacgagatctactttgggaaaaacaaaggatatcgttcaatggggttgaggtctgtggcagactttttgcagacaattcaaaacaagaagctcttgaagaattgaccttggtgggaggctttgaaagagaaagcaagcaatgctaaaacctctgtttcatgctaaccagacaccgccgtgcactccgttagattccttttcttagaaaactcggttttctgctcccttccctcgtcccttccctcccccgacagggtcacataacagctgcaatcattgaccgcacagcgccatctctccctgagaataaagccgatagccaccccttctccggctccgagcctgcttctgccacacctcgctctcatgttctctccacatttccatagagaccgtgtggtttttgttcacccgggccccccgtcttcctccctgtcccccccaattaaaggccataaaacccactgtctgcccagcctcccttccctccccacctttttgggtacattgggtgtaaaaaaatgtaaaacaaaaaaattttatggaattaactgtgggtgtgtggaaaggaggaggaaggaaaaggctggacctcttattccgtgtgtgtttgggagttgcttggggttgggggtcgtggggacaggggacagctctgggaaccaaaggtggccctcgggtcccgtcctgcgcagactctcccgtcccacggaggcagcggggatgggggctgggggggggtgccgccgaccgttccgctcttccggccaggtgcttttctgtcaatttctatggaatgccaaaaggaggtttttgttttattttgtttttttgtaaagcttaagaaaaaaatctacatcttatacttgagcctccatacttaaaaaaagaaaagaaaagaaatcaataaaaagaaactggggcgcagttaaaaaaaaaaaaaaaaaaa

SEQ ID NO: 4326 - DNA, 1914 bp, Homo sapiens
  SIMILAR (1609)..(1911): 1001254mologous to Homo sapiens UDP-N-acetylglucosamine: alpha-1,3-D-mannoside beta-1,4-N-acetylglucosaminyltransferase IV,accession number AB000624,Smith-Waterman Score=526.
atgactctagaggatcccccgggtttctgcgagcggctgctgagccgggtggccgccctgttccccgcgctgcggtctggcggcttccaggcgcactaccgcgcccattccagcagcttatgtccagctgagaacccctgggtgctcacgtgctgtcttttaaacaatctagatgaggacggggacttggttgccttttccagtgacgaggaattgacaatggccatgtcctacgtgaaggatgacatcttccgaatctacattaacgacagccctgcagtggagaacatctcatccttctgctttgtgtcgctgaaatcagcaggcagggcagatgctctaaaggaaagacagtcggggagcacgcatgcacacgtgcagttaaggctgcaggggtctagggggaacagtggccactcacaaagaccaagtaactacaaagttctagcaggttcccagcgtgactttaatggcacagacatcactgcagcagcagcagctccctcgggtttatacctggataatgtggtcaacaagcagagtgtctctcctcctatcccgcacctccgtgccttgctgagcagcagcgatgacccccctgcagaggtggacatctttgagctcctgaaagtgtcctatgagaaattcagcagcctgagggccgaagacattgagcagatgcggtttaaacagaggctgaaagtgatccagtccttggaggacacggccaagaggagtgtggatcgcttctcagaattgcaactgtccaggcagacacagcacgaacattttaaggagcttgataacttctacaaaatttcttcccacgaacaatcatacggcagccagcctcccatcctgcagccagcgctgggtgccgctcagcactgtgcatctcacagtgtgacatgccagagcacatcattcttacaattaaaaaaagggaaaaccaagctctatgctgaaaagcaactaaatagtacatggagcagacagacttcaggggcaaacctaagggttctacatgaagcacgagaagcacagtcgtccggcccagctccctccatcagccgcatggatgcccggcaagcccttgtcctcttgccttcctccagggaatcatcgcagaagagaacaagaacctgcagccccaggggagacgaggaccccgggaagttcaaggaggctgagctgaagatgcggaagcagtttgggatgcctgagggcgagaagctggtgaattactactcctgcagctactggaagggccgcgtgccccggcagggctggctgtacctgacggtcaaccacctgtgcttctactccttcctgctggggaaggaagaaaaaaaaagacatctgagcatctgcaagattattcctgtctgtgccaagtggggcgtccagttcagttccgagatgctgcaccagcacaggtgggtcttgagacagtgtgaccccaagcacctgggcagcctcccagacaaatcccaggccccaccaacactcactcaccaggatcaaaaaaggcctggcctttctctgctgggccctgggtgctgtgctggaacgctgcccctgcagcagctcacaggcctgcctggctgcaggttcttcttccgcagtgggaacatcgagcacccggaggacaagctcttcaacacgtctgtggaggtgctgcccttcgacaaccctcagtcagacaaggaggccctgcaggagggccgcaccgccaccctccggtaccctcggagccccgacggctacctccagatcggctccttctacaagggagtggcagagggagaggtggacccagccttcggccctctggaagcactgcgcctctcgatccagacggactcccctgtctgggtgattctgagcgagatcttcctgaaaaaggccgactaa

SEQ ID NO: 4327 - DNA, 1138 bp, Homo sapiens
  SIMILAR (599)..(796): 981254mologous to Homo sapiens phosphotyrosine independent ligand for the Lck SH2 domain p62,accession number U46751,Smith- Waterman Score=354.
gggagagtgtggcagctgcccttagccctctgggccattgaagttgatatcgatgtggagcacggagggaaaagaagccgccctgacccccgtttcttccagaggtttccggccacgggggagaagagcagctcacagccaagcagctgctgcctctgatcccagcaagccgggtgggaatgttgagggcgccacgcagtctctggcggagcagatgaggaagatcgccttggagtccgaggggcgccctgaggcaagcctgtgcccctttccgccacctgggaccacgggccagcctagtgatctgtggcctgcacctccgcctcattctcagcacctctgcagccccacttacaaacccgagggagctggctgctggcttgcagtggatgtctgttgccatttaaagtcacgctgggaacctgctagaactttgtagttacttggtctttgtgagtggccactgttccccctagacccctgcagccttaactgcacgtgtgcatgcgtgctccccgactgtctgccaggagccagggccatggtcaggcttggcctgttgcgcgtgtctcctgtgtgctcatggtgagttttgttccaggaacagatggagtcggataactgttcaggaggagatgatgactggacccatctgtcttcaaaagaagtggacccgtctacaggtgaactccagtccctacagatgccagaatccgaagggccaagctctttggacccctcccaggagggacccacagggctgaaggaagctgccttgtacccacatctcccgccaggcaagtgaaccaagaggttttgtacatattcctacctttccctttagagcatcctgccctcctctgatttcagcgacacaaacagaaggatgagatgttctccactgcagggctgtctgtaggtgtgggaggttaggagttggttttgtcctattatgtgtaccctgagcaatagcgagtaagctctgctaatgcagttctgaaaatgtttttctttaggcaaactccagagccaggaatattagttgtaggagtttataaaacttaacatgcagtccaggaattaaggcaggatgtattcgtccgctgggaggatccacgcaacgtcgcggcatgctatc

SEQ ID NO: 4328 - DNA, 2116 bp, Homo sapiens
  SIMILAR (53)..(1411): 691254mologous to Homo sapiens p60,accession number U41806,Smith-Waterman Score=1472.
gcgcggcggctgcgaccgggacggcccattttccgccagctcgccgctcgctatggcgtcgctcaccgtgaaggcctaccttctgggcaaggaggacgcggcgcgcgagattcgccgcttcagcttctgctgcagccccgagcctgaggcggaagccgaggctgcggcgggtccgggaccctgcgagcggctgctgagccgggtggccgccctgttccccgcgctgcggcctggcggcttccaggcgcactaccgcgatgaggacggggacttggttgccttttccagtgacgaggaattgacaatggccatgtcctacgtgaaggatgacatcttccgaatctacattaaagagaaaaaagagtgccggcgggaccaccgcccaccgtgtgctcaggaggcgccccgcaacatggtgcaccccaatgtgatctgcgatggctgcaatgggcctgtggtaggaacccgctacaagtgcagcgtctgcccagactacgacttgtgtagcgtctgcgagggaaagggcttgcaccgggggcacaccaagctcgcattccccagccccttcgggcacctgtctgagggcttctcgcacagccgctggctccggaaggtgaaacacggacacttcgggtggccaggatgggaaatgggtccaccaggaaactggagcccacgtcctcctcgtgcaggggaggcccgccctggccccacggcagaatcagcttctggtccatcggaggatccgagtgtgaatttcctgaagaacgttggggagagtgtggcagcttgcccttagccctctgggcattgaagttgatatcgatgtggagcacggagggaaaagaagccgcctgacccccgtctctccagagagttccagcacagaggagaagagccagctcacagccaagcagctgctgctctgaccccagcaagccgggtgggaatgtagagggcgccacgcagtctctgggcggagcagtatgaggaagatcgccttggagttccgaagggcgccctgaggaacagatggaagtcggataactgtttcagggaggagatgatgactgggacccatctgtcttcaaaagaaagttgaccccgtctacaggtgaactccagtcccctacagaatgccagaatccgaagggccaaagctctctgggacccctcccagggagggaacccacagggcttgaaaggaagctgcctttgtacccacatcttcccgccagaggttgaacccgcggcttgatttgagtcccttttcccagattgcttgttccatggggctttcttcttgattgaagggcggcttgggttcaaccagggttcctggcagaccaaagaactattgacattcggagcggctctgggacaccatccaagtattcaaaagcatcccccggccgttgttgaccactttttgcccaccttcttcttgcgtgcccctcttcttgtcttcatagttgtgtttaagctttgcgtagaattggcaggtctcctgtaacggggccagttttctctggccttctttccagggttcaggggttaggggttgcaagaagccattttaggggcaggcaaaacaagtggacatgaaggggaggggtccttgttgttgttgtgtgtggttgatgtttcctgggtgccctggctccttgcagcagggctgggcctgcgagacccaaggctcactgcagcgcgctcctgacccctccctgcaggggctacgttagcagcccagcacatagcttgcctaatggctttcactttctcttttgttttaaatgactcataggtccctgacatttagttgattattttctgctacagacctggtacactctgattttagataaagtaagcctaggtgttgtcagcaggcaggctggggaggccagtgttgtgggcttcctgctgggactgagaaggctcacgaagggcatccgcaatgttggtttcactgagagctgcctcctggtctcttcaccactgtagttctctcatttccaaaccatcagctgcttttaaaataagatctctttgtagccatcctgttaaatttgtaaacaatctaattaaatggcatcagcactttaaccaaaaaaaa

SEQ ID NO: 4329 - DNA, 729 bp, Homo sapiens
  SIMILAR (729)..(61): 951254mologous to Homo sapiens unnamed protein product,accession number AK000703,Smith-Waterman Score=1079.
ttagcatccctgagtcccggtgacattggcaggtcctgccaagagtgaaaaagcggctttcacccctgaagactcataattgtgcattaccatcgacaaagctgtctgctgtgagggattacttattttattctgagaatttgaatttcccacaactgaacaaggactcttaacgtggatgttagcaggctttgaaattccaactgctgttgtgtttgttctgagtttatcacactccttttcttttgcagtatctgaaggttgctttttccacagggaaagacaggttgctagcacttccatggaacagctactgtcacttttagcaggcattccttttgttgaggattcttgtccactgcaaaaggagttgtccaaaaccctgccacttacattagaagtacttggagtttccatgtttttcaaattcagttggttaccagtcatttgggtatttggattcatttcacagctgtctggtttagaatcctgaatagtttgattagcatcttttaatactgtcttctgagtcttacgtgcctgtgaaagcaaagcgagaagtagcatattttcattttgaatttttgatttatattcctcagtggacatggacttgggaacagaaattgtttcgcaaactgctggtgaattttgctcagctctcatcagaaaatgttaccaaagttgagtattcaatactgcgtgggtcatctcaacagctgatgtctt

SEQ ID NO: 4330 - DNA, 5355 bp, Homo sapiens
  SIMILAR (19)..(708): 481254mologous to Mus musculus putative,accession number AK013408,Smith-Waterman Score=512.
atgaggaatcctgtgcattctcatataggggcaactgtatctcatcaaactgattttggagctaacgtacccaatatgccggcactacagagtcaactgataacatcagatacctattctatgcaaatgcagatgatcccttctaattctacacgacttcctgtagcttaccaaggaaatcagggacttaaccagtctttttcagagcaacaggttgattggacacaacagtgtatatctaagggactgacttacccagattacagaccacctccaaagctataccgttactcaccacaaagctttttaccagattctaccattcaaaaacaaaactttataccacatacatcattgcaagttaaaaatagtcagcttctaaattctgtattaactttaccatcaaggcagacctcagctgtaccatcacagcagtatgccacgcaaactgacaaaagacctcctcctcctccttacaactgtagatatggaagccagcctttgcaaagtactcagcatattactaaacacttgtctatggaagttcctcagagtcgagaaatgctgtcatctgaaataaggaccagctttcaacagcagtggcaaaaccctaatgaaaatgtcagcacaattggaaatttcactaacttgaaagtaaataccaacagcaaacagccttttaacagtcccattagatcttctgtggatggtgttcagactcttgctcaaactaatgaagagaaaataatggattcttgcaatccaacttcaaatcaagtactggacacaagtgttgcaaaagaaaagctagtaagggatattaaaacattagtagagataaaacagaagttttcagaacttgcaaggaaaattaaaatcaataaagatcttttgatggcagcaggttgtattaaaatgactaatacttcttatagtgaaccagctcagaattctaaattgtctctaaaacaaactgccaaaatccagtctggaccccagataactccagtaatgccagagaatgcagagagacaaacaccaacagtagtggaatctgcagaaacaaataagactcaatgtatgttgaattctgacattcaggaagtcaattgcagaaggtttaaccaagttgattctgttttaccaaatcctgtctattctgaaaagcggccaatgccagactcatctcatgatgtgaaagttctcacttcaaagacatcagctgttgagatgacccaggcagtattgaatactcagctttcatcagaaaatgttaccaaagttgagcaaaattcaccagcagtttgtgaaacaatttctgttcccaagtccatgtccactgaggaatataaatcaaaaattcaaaatgaaaatatgctacttctcgctttgctttcacaggcacgtaagactcagaagacagtattaaaagatgctaatcaaactattcaggattctaaaccagacagttgtgaaatgaatccaaatacccaaatgactggtaaccaactgaatttgaagaaacatggaactccaagtacttctaatcaaccttcagatactgcaaaagaaaaggagtgtgataaactcagaacaaacacaacagcagttggaatttcaaagcctgctaacatccacgttaagagtccttgttcagttgtgggaaattcaaattctcagaataaaataagtaatccctcacagcagacagctttgtcgatggtaatgcacaattatgagtcttcaggtataaatataacaaagggaacagaacttcagatagctgtagtgtcaccgttagttctgtcagaggtcaaaacattgtctgtcaaaggaataacacctgcagtgttacctgaaacagtgtatcccgttattaaagagggcagtgtttgtggttttacaaaatcaattggcagaaaatgcaaaggcaactgctgctttgaaagttgttgttagtggatcagtagcaagtacagcaacatcaaccaagatttttccactaactcagaaggaaaagcagaatgagtcaactaatggtaattcagaagtcacacctaatgtcaatcaaggaaagcataacaaattagagtcagctatccattctcctatgaacgatcagcaaatctcacaggagtcaaggaatagtactgttgtgagtagtgatacattacagattgacaatatttgttctctggttgaaggtgatacctcttacaattcccaaatagcaaagatattcagctctcttcccttgaaaatggttgagccacagaaaccttctctacccaatcagcaagggattggctgcagagaaccagaaaaacaattagataataccactgaaaataaagactttggttttcaaaaagataaacctgtacagtgcacagatgtttcacataaaatatgtgatcagtcaaagtcagagccacccttagagtcatcttttaacaatcttgaaacaaacagagttattctagagaaaagtagtttggagcatgccacctgaaaaaagcacagctaacgatacgtgctcgtcagctggctattcaggaggatatttaccctcaggaaatagatgcatccagcaactatactccccaagatcctgcaagaaatgaaatccacagtgataaggcacctgtcttatacctacatgaccagctgtcagaacttctaaaagagtttccttatggcattgaggctgtgaatacacgtgaaggttctgtgggccagcaaactacataccagacctcagaagatcaaactgctgataaaaccagttctgactccaaagacccagcagatcaaatacaaattacaatattaagctcagagcaaatgaaagaaatatttcctgaacaggatgatcaaccctatgtagtagacaagttggcagaacctcagaaagaagagcccatcacagaagtagttagccagtgtgacctgcaggcacctgcagctggacaaagtcgtgattctgtgatactggactctgagaaagatgatataccactgctgtgcattgggctggctctccatggtttacgaaggagtaccccagtgtcagtgtaattccatcaagaactcatcttcagaggaagagaaacaaaaagagcagtgttctcctttggataccaacagttgtaaacaaggagagagaacttctgatagagatgtcactgttgttcaatttaagagccttgtaaataatccaaagactcctccagatgggaaaagtcattttcctgaactacaagacgacagtagaaaagatacacccaaaacaaaacataaaagcttaccaaggacagaacaagaattagttgctggtcagttttcatctaaatgtgataaactaaatcccttgcaaaatcacaaaagaaaaaaattgaggtttcacgagggtaacctttcactccagtaataaaatgacagcatcttatgaacaagcttctcaggaaacccgacagaagaaacatgtaacacagaactcacgtccactaaaaacaaaaacagctttttttgccaaataaagatgtgtataagaagcatagttctttgggacagtcattatcaccagaaaagataaaattgaaactcaaatcagttagcttcaaacaaaaacgaaagttagaccaagggaaccgtattagatatggaagtaaagaaaaagaaacatgataaacaagaacagaaaggaagtgtgggagctacattcaaattaagtgactctttgtcaaacccaaacgaaagagccattgttaaagaaaagatggtatcaaatactaagtctgtagacacgaaagcgagttcatctaaatttagtagaattctaactcctaaggagtatttacaaaggcagaagcataaagaagctctgagtaataaagcatcgaagaaaatctgtgtgaaaaacgtgccatgtgattctgaacatatgagaccaagtaaacttgccgtgcaggttgaaagttgtgggaaatcaaatgagaaacacagcagcggcgtgcagacctctaaagaatcattaaatggcttgacaagccatggtaaaaacctcaaaatccaccattctcaggagtcagaaacatacaacattctaaggaatgttaaagaaaaagttggtgggaagcagcctgataaaatatggattgataagactaaattagacaaattaaccaatataagcaacgaagctcaattcagccaaatgcctccccaagtaaaggatcaaaagaaattatatctgaatagagttgggtttaaatgcactgaacgtgaaagcatttctctcaccaaattagaaagttcacccaggaagcttcataaagataagagacaggaaaataaacataagacctttttaccggtgaaaggtaacacagaaaaatcaaacatgctggagtttaaattatgtccagatatcttactaaagaatacaaactctgtggaagaacggaaggatgtaaagcctcatcctaggaaggagcaagcccctctgcaagtttcaggaataaaaagtacaaaagaagactggttaaaatttgttgctacaaagaaaaggacacagaaagacagccaagagagagataatgttaattcaagactctcgaagagaagcttcagtgcagatggatttgagatgctacaaaacccagtaaaagattcaaaagaaatgtttcaaacctacaaacagatgtacctgggagaagaggaagcagaagccttgggtaggcagtcctgtaaaataattacaagatgtggttttgtaattgccactgggaaatttctttccttttctgttcaaaatatttcgctgaaactaatgagaaatgccatgataaagatttctcagagttgggttccccactttcattgtatttccattgaaagtgcttaattaaaatggcttgagaacttttgggtagccatgtgtaagaaatgggatggtattcaccggggaaacaaggtatttgaatttctactttattgaaccaggatttaccattattttaaaaggaatgcttatacaaatcaatttgaaattctacccattcttgagggaggaccgttcctcagttaaggacttgtttattttaaatgggacctgtaaatatgttttggtttctaagctatattagcaaaatttatttttcaaaaatgccccctgtgatgtgaatgtcaaaatatattcttaagtgttttataactaattgtcacctttttttcagaagtcttattttatccttgtgattgtgagcgcccttttgggccttcgtattaacacactacttttcatacttgaaataaacatttattttttaaaaaaactaaaaaaaaaaaaaaaaa

SEQ ID NO: 4331 - DNA, 765 bp, Homo sapiens
  SIMILAR (696)..(481): 681254mologous to Homo sapiens neuronal thread protein AD7c- NTP,accession number AF010144,Smith-Waterman Score=217.
cgtcgacttttttttctttttttttttcaggtaacaatgagacatatgcagctttatttaataatctgttaaaaagtcaatactctggcagagtgatgcaattccttaatctcagcagaaagcaaacagtctgtctgaaaaagccccttccccaagatttggaactgtgtaaccctgagcttacatctcaatgctcccaagagctgggctcttgctatgtggaaagttggtccccaacaatttttctcaaccctccaggcaaatactcctctgtctgggctgtgactcccctcacctaacagtaggacatgagggctggaaaacaactttaccgggggcaggggctaccccttacaggattgggcccttttctctcctacaaaggggagtttcatagggggttaacaatctttctaatgggctggggagcaatggactcatggcctgttaatcccaggcactttggggagggtgagggcaggtgggatcacccgagggtcagggagttttgagaccagcctggccaacatggtgaaactccatctctactaaaaatacataacttagctgggtatggtggcaggtgcctgtagtctcagctactcgggaggctgaggcaggagaatcgcttgaacccagggggcagaggttgcagtgagccaagtttgcgccattgcactccagcctgggtaacagcgagactctgtctcaaaaaaaaaaaaagactctgagaaatgggttctgtatcaatttaatttggcttcc

SEQ ID NO: 4332 - DNA, 1080 bp, Homo sapiens
  SIMILAR (1011)..(862): 821254mologous to Homo sapiens RasGAP-related protein,accession number U51903,Smith-Waterman Score=208.
tttttttttttttttttttaatggaattatagtaacatttcattttacataaaacaatttcccagagaatacatttaaaaaccatctagatactgattttttagcattacaaaaaattgagaggcacaattgaagtattcaaataaattgtgaggggtggaggtggggactatgctcactatctatgttgttccttagtcacttaaaggctctgcgtgcaagagtctttacatgaggcagtagtgcactttcatttagtagggaataaatccacataaaatatatactttttatacaggaaagtgttattggtgttggcattttcaattacttataaaaacttcatttggaattggcacaaaaggttctctttaaaattggataactccccagaagaccagggccttagaactgtcctaaataattccattaccaataattaggggttcccatttatccatagattaaaaaaactatgaagaattacgttattcaagtgggacattttaaaatttttttcataggaaaataggttctacatgtttcgcccctagtcagctaaatttcccaccccccaactttaaaacagatcacaggatgtccaaagttttaaatcagagtacctatatcacagtacagtgtggatatgtttccattaattcattttatgtctcattctattatagtatcaaattagcaaaaaggcacctgggtacattcttcagaacagttttggtcatttaaaaaaaatcacacatttataagcagtgatttcaatcatgtttaaaaacaaaaatattaaacaaattcatttcgtaatccagatgatacagaatccaagaaatttctgtaggcgcttcactttccatagaacttcttgttcagcaggtatatgagaaggtttacattcactttaaccttatcaaacattttcattacagctactccttcatattgcatctgaagtaaatccttggtgttgagatggaaaaggtgcaactcaatattcaggatttacttcagatgcaatatgaagtaaatcctgaatgttgagatggaaaaggtgcaactcaatattca

SEQ ID NO: 4333 - DNA, 389 bp, Homo sapiens
  SIMILAR (170)..(337): 571254mologous to Homo sapiens KIAA0220,accession number AC003007,Smith-Waterman Score=154.
  misc_feature (1)...(389): n = a,t,c or g
cggacgcgtgggctccaatttgagtactaattaagtggtattcacatctgcaacataaaaaccaaaataatggcatcctcgtggaaggaattttgtcagaaaagtgctgtgtactttgctgtcttcctaggannnnnnnnnnnnnnnnnnnnnnnnnnnnnnnaatggttccacaggctgcataggaatacaagctaaccaatattttaattacagatcattaagcagctttgagtctggaaaatttgtcaaatgtaccgagcaattagaattggtaccaggagaaaatattcattcaacttcttgaaggatcaaagaaaaaattaaccttgaaaaacctgtttcgtaacatgtgaagtccagatccaagggaaccttacaaatccatt

SEQ ID NO: 4334 - DNA, 691 bp, Homo sapiens
  SIMILAR (13)..(318): 531254mologous to Homo sapiens Human myelin oligodendrocyte glycoprotein gene,accession number AAZ29204,Smith-Waterman Score= 213.
aaagtacaatctttttttattttttatttatttatttatttttgagatggagtttagctctttcgcccaggctggagtgcagtggtgctatctcggctcaccgcaacctccgcctctcaggttcaagcaattctcctgcctcagcctcccaagtagctgggattacaggtgcccaccactacacctggctaatttttgtattttttagtagagacggggtttcaccatgttggccaggctggtctcaatctcttgacctcaggtgatccgcccgccttggcctcctaaagtgctgggattacagatgtgagccactgcgcctggccaataaagtaaaattttaagagaaaaacatggaatggaagaatatttgtacattaagtaactgacagcttactatataaaatgccatcaacatgttcgggcagtgggggctcaatggggataaataggcagtgtacacatgagtaactcaaggccatcatcacaaggaaacatgtagagtccctcttgaaaactaaagaattacaaattccaacttcaagggacagtaagacaatatctaactctaaacaaaatccaatggtagtagggaacctgcagcacttagactccccacatgacgccgtaattggatcagtctttccagagagtagtgcaataccaagaaatatgctatacatcattcttg

SEQ ID NO: 4335 - DNA, 717 bp, Homo sapiens
  SIMILAR (498)..(439): 801254mologous to Homo sapiens putative p150,accession number U93563,Smith-Waterman Score=82.
gcggccgcctactactactaaattcgcggccgcgtcgaccaaagatgtattcctctaagattttatagctttttaccccttacattgggatttttgaatcactttgaattactttttggatatatcattaggaaggagttcattttattcttttctaatgtggctacgcacgtctcaataccatttgttgaaaagtctattcttttttttaaaatttatttattttattatactttaagttctagggtacatgtgcacaacgtcgagggtttattacatatgtatgcatgtgccatgttggtgtgctgcacccgttaactcaccatttacattcggtatatctcctaatgctatccctgccccatccccctcaccccacgacaggccccggtgtgtgatgtttccccatcctgtgtccaagtgttctttcattgttcaattcccacctatgagtgagaacatgcggtgtttggttttctgtccttgtgataagtttgctgagaatgatgggtttccagcttcatccacgtccctacaaaggacatgaacccatccttttttatggctgcatagtattccatggtggtatatggtgccacattttctttatccagtctatcattgatgggacatttgggttggttccaagtctttgctattgtgaatagtgccgcagtaaacatatgtgtgcatgtgtctttatagcagcatgattta

SEQ ID NO: 4336 - DNA, 367 bp, Homo sapiens
tgacaagtggtgcccgaccaggacctgaacgaggaaggtctgccagagcagagaaagtgaaactgatcagacgaactacgaacccctggacgggagagtctgccggcggagaatataagtctataggatcgggtgaaccaccaaccggcaattgaaagctgcacagcctgaaattacctttattcaattaatgcaaaaacaaaaggggagatgttggaggccgaaggaatgagggtcgtgaccaactcagtataccactggaggctctgtgagaaacagcaaactgttctcatgaaagcaggatgttggcgaactgacaaactctgtctgccgccagaaggaatgctgtgggcagtcatgtccaggt

SEQ ID NO: 4337 - DNA, 1621 bp, Homo sapiens
  SIMILAR (1086)..(76): 451254mologous to Homo sapiens zinc finger protein ZNF135,accession number U09413,Smith-Waterman Score=805.
tcagtccataacgggtgaatggacagtggcatcagtgtggggatccttagaccccttttcagggagattctggtaatactcggtgaggtgtgacatctggatgcaggacttgccacactcattccacttgtagggcttctccccattgtgagtcctctgatggagggcgagggatgaggtttgcatgaaggctcttccacagtcaccacacatgaagggcttctctcccatgcggacttgctcatgctgggtgagaaacttgctgtggctgaaagtcttcccacattttccacatgcataaggatgctcgccacgtatgtacggcttctcaccgctgtggatcttgaggtgctgggtcaggtaggacccctggctgaaggcctttccacattctgtgtgtacctgctggtgcttgctgagggatgagctgtggctgaaagctttcccacattcctgacacgcatacagcttctctcccgtgtggcagcgtatgtgctcagccagggacaagctggggctgaatgccttgcagcatacccggcactcgtagggcctctcacccgtgtaggttccgtggcatgcaaggagggccgagaagtcagcaaaggctttgctgctcttggcaggcaaatggcttttccccggtgtggaatcaccagtgctgtacaaggtgtgtgctctcgcacacacgtatggcttctcacctgtgtgcacacgctggtgcttggcaagggatgagctctctcggaagcacttgccacagtggccacacatgtagggcttctcgcctgtgtggacgtgccagtgcttgactagagatgaattgttgctgaaggtacacccacattcctggcatgcatacagcttctcactggtgtgctgaacaaggtgacttctctgtccaaaggccttgccacactcttcgcacgtacagggtctccttttgttgggaatctgctgatagctcacaaggcacgtgttcttgccaaaggtatcttcccacccactacatggcagtacaccctccccagcgtggactccttgtggctgattaaggtctgggaaacagctgcaggcctccccacatacaccctctccttggcaggagcacccccgataggtggcatcaacacatgcaggactgtcgcggttgcttctggaccgaacgaaggacgacgaatgcagaaatgagacagacaaaaggatcgcacaggacactacagctagcatggccaagaacatggagtcaggggtttttgcctgaccctggcgctccagtagtttctcagcttcttgtgtcgttttcttgatctgtccccatgttatggggttggatgtcattgtgactccggtcggcccttgttctgtctttgcattcagattccgctggctcatggctcgtactggaggtaacaggcccacggttgaataccatggatccctccggtctcccgttccatggtcacacacacctggagggcacccacacggtttgtccatctccccttctttcaaacagatccttttgtctttgtcttcatttctgccttcgttctccttcgtttggtccagaagcaaccgtgacaagtggtgcccgaccagggacctgaacgaggaaggt

SEQ ID NO: 4338 - DNA, 411 bp, Homo sapiens
  SIMILAR (251)..(126): 901254mologous to Homo sapiens Human 5' EST secreted protein SEQ ID NO:469,accession number AAY12438,Smith-Waterman Score=223.
aggatatatccgtgaccgggacactcagtaagtatcaaaaagtcggaggtcgtaatactaatcagtccccatgttatagggatggatgtcatagggactccggtcggcccttgttctgtcttagcattcagattccgtaggctcatggctcgaacagaaggtacaaggcccacggttaaataccatggatccctccggtctcccgttccatggtcacacacacctggagggcacccacacggtttgtccatctccttatattctccgccggcagactctcccgtccaggggttcgtagttcgtctgatcagtttcactttctctgctctggcagaccttcctcgttcaggtccctggtcggacaccacttgtcacggctgcttcactgtggcagcctcctcagagagccta

SEQ ID NO: 4339 - DNA, 530 bp, Homo sapiens
gaggacaatggcaggaggacagtacagaccaaaccccaagcagagaaaatagaaggatccactttaagaactttctgatgagctcgtttcaatctttctcctactcagtctcaattttccacagcaagagtacctgtctgcagaaaccatgggttatgtgtaataacctcctgcagaagcttaatgtttgagaactaacccgagcaccagattgtttaagtaaaactttaagcagctgcacataatgttgctcctcaacagacagattctgccccatgttaccctgattcagaaacctcccgctcccgataccttctcagggaactgaccttatattctccgccggcagactctcccgtccaggggttcgtagttcgtctgatcagtttcactttctctgctctggcagaccttcctcgttcaggtccctggtcgggcaccacttgtcacgaatgctacactgtggcagcctcctcagagagcctagccgcccgatagtccgcgcgcccgtgagcgacgaaatatccatt

SEQ ID NO: 4340 - DNA, 2326 bp, Homo sapiens
  SIMILAR (1848)..(1657): 361254mologous to Homo sapiens exon X,accession number M20679,Smith-Waterman Score=104.
  misc_feature (1)...(2326): n = a,t,c or g
ttttttgaattttcacagcagtagcatttataatatcagagagttggaaacaaccccaatgtctatgaactaatgagtaaacaaactgtggtatatccatacaatgcagtattattcagccataaagaggaatgaaaaactgatacatgctacaacatggatgaactctgaaaacgttcagtggtaaaaagccagacacaagaaaccacatattgtatgactccatttatatgaaggttcccagaaaaggcaaatctagacatataacgtggattagtggttgccagaggctgggaggaagagcgaataggcagtgatgataaggggtatgagggatactcacacacctgaggtcacacctgcacattacaggtggcatcaacacatggcaggactgtcgcggttgctttctggaccgaacgaaggaccgacgaatgcagaaatgagacagacaaaaggatctgtttggaaggaaggggtcaggggggctccttgattctagggaacagggacctgagctttttacagccctttcatatttattaggtagagtgaatagggaggaaggggataactgtcggtcagctattttgatttaacacagggcccacatggattccttccttttggttcaaacaggttcctgggatggtccttgtgggataaccctcaaggagccacggggaccctggggacattgactgcccccaagcattccttctggcggcagacagagttttgtcagttcgccaacatcctgctttcaatgagaacaagtttgctgtttgcctcacagagccctcccagtggtatactggagttgggtcacgaccctcattcccttcggggctcccaaacatctccccttttggtttttggcattaattgaataaaagggtaatttcaggctgtgcagctttcaaatgccggttggtggttcaaccccgaatcctaatagacgcaacaggacactaacagctangcatggccaaagaaacatggaagtcaagggttttttgcctggaccctggcgcttcaagtagtttctcaagcttctttgtgtcgttttctttgatctgtccccaatgttatggggttggatgtcattgtgaactccggtcgggcccttgttcgtgtcgtttgcattcagatttccgctggcttcatggctcgtacttggaggtaacaggcccacggttgaataccatggatccctccggtctcccgttccatggtcacacacacctggagggcacccacacgggtttgtccatctccttatattctccgccggcagactctcccgtccaggggttcgtagttcgtctgatcagtttcactttctctgctctggcagaccttcctcgttcaggtccctggtcgggcaccacttgtcacggttgttctggaccaaacgaaggagaacgaaggcagaaatgaagacaaagacaaaggatacactgccgccggcacttccggtacgcacttccgcctggtgccagcggccgcccaggacctcacctcccagaaggcccttcgccttcctgctggaaacggccatgcacgggatacaaggccttctgggaaatggagttccagcgctgtaatactcggtgaggtgtgacatctggatgcaggacttgccacactcatccacttgtagggcttctccccattgtgagtcctctgatggagggcgaggatgaggtttgcatgaaggctcttccacagtcaccacacatgaagggctttctcccatgcggacttgctcatgctgggtgagaaacttgctgtggctgaagtcttcccacattttccacatgcataaggatgctcgcctgtgtgcaccgctggtgtaggaccagggctgaggagtcaccgaatggcttcctttactcccacgtatgtacggcttctcaccgctgtggatcttgaggtgctgggtcagtaggacccctggctgaaggcctttccacattctgtgtgcaacgctggtgcttggcaagggatgagctctctcggaagcacttgccacagggccacacatgtagggcttctcgcctgtgtggacgtgccagtgcgggacaccagggaaacagtcaccatgccacaggagctccacagggtcgctgagctccgattcgaaggtgtggggcacccggagcggtagcggacctgtagttgccggcgtgctggggccccacgaagacagctcgaggttcgccgcggccccgggggtgcggaccgtcttcacggcctcgtctcgccctcgcgcagcagctcgaaggtgacgtcggggatgggtcctcgcagcgcaggacggcat

SEQ ID NO: 4341 - DNA, 7278 bp, Homo sapiens
  SIMILAR (3702)..(3965): 681254mologous to Homo sapiens Human myelin oligodendrocyte glycoprotein gene,accession number AAZ29204,Smith-Waterman Score= 293.
  misc_feature (1)...(7278): n = a,t,c or g
tgttggcacaagattacaacctacaatttcaatgcccttccctcctacacagctcaaatggaaggaaactgattaacacatagaaaggaacggcaggctcacaggtttaagcatttgtttttacaaaaaggagtgggatatgggggtggtcaagttttacgggtaataacaacattctctctagatggcagggggtaagtctgcctgtcctccattgctggtaccacataagggatacattagtaaagtaaggtaagggttatatgtgtggctggcctgttctttagagaggaaggtgggatggtatctgctgtgtacctgtctcagaccaaacctggggctggaccagtgcccctttcttctcagccctcctccacagcctgactgtactgccagccgcacccatgagaaggaagtgttgaaggaagcctgaagacatccacctcgagaaaaggaaacaggaaaactattccttccgccttctctggaccaaattcactccctcagctccagagagtgctgcaaaaatcttccttagggacgctgtgaagacacggggaagaggccagccctgagcgggcaagaagaaagcttgaactttccatgcagtaccaagcaaggctattttggaaacaagcaaacaaacaaaaaatggaaaccaacaccatataaccacaggttgggtagctcctaaatcctggacagcatttggattgggggtaagggcaattttactccagctccttgtyttataacccgcacaaggtgccrrgaggttaaggaccacaactgacctctctttccctacaagcaccattccttggattcccagttttgttgagctcatttgaggtcatccttgccatcctcttaaaaaatgacacagcctcttggttattccattttctatccctttctayaattatgaacrcactctctaaacaggagatctatatatgctctcatcctgcaacccaagagattaggygacctaatgatgagaaggctaacttatttgctttcctgggtggtcctgatggaaatgaacagcagcagagttctggtgggatagagcagtctagtctgagccactgtgtgattccccaggggactggtccctgggtacatgggtccctggctctctgtctcagttccacagatattactcaacttggccatttacgcctcagctaaaacatatgagcatgagggaaaagggacaagaaatacttttgtcctctagaaaaacttaactcaatacatcttggctactttgcctcaacccacggggttccctggaaacatttgttgaacttggccaagaggagattgtatatggatggcacacctggaaaaggggagaaagcacactagttcatctcttttataagtagaatggtcccagggatgttaacctttctgatgctgatagtagatgagtggagtggggtaatcgtgaaaacttaaaaacccttaagctgtttggagactacwcaccacagtggagcaaaccaaggtggggcctcactgccctcctcagagcccatccctgaccatgtcattggataggatggaagacaaagtctytgaaatggaggctgggctggcaaaagtaagtatgaagatgctactactggccttccacttcctctctctgatacacctaagaaggtgagagacactagcttcaattccattttacaacagttctcaacaacctgaaatattcttgacttccttaagcacatggaaaactggtaagctatatctttctaactgaaattttacttattctaaccaaccttttctttgattatcaaccagtttgacagtcttcagatcacaaaacaatagaacagacctgacatttacaaaactgtactacatacttatttcttttacagtagagctgaccaattacttttctaactactaatgcaacaccatgccactgggccctggactctgatgtttctgatccctgagcaacacatctatgtccattcacagatggaaatgaaagagtgagattctcagaggctaaacaacattctgggaagcaaattggatttttgaagggagagtcctccttagaaaattctggagccaaacatgctcccagtcacgagggaatggkktragccgggccaggtttcctgtctgtgrgctatagctcccttcctgaactccctcmtgtyctttgggaaggacacaagcytcttgctcattaagcaaaggccctccaagtctcctttttacttcagcactttggaaacyytccaagacttaacttccgatctggggaggttctacgtggagcagacctatcccttcttattcctgttcctgggtgtctccataatcagcctctaccttccctggcataagtcatatctgttatgctgcaggaacygagtaaccaaagctagatatcccttggaccactgattagtgacacattttctccacaacaaagggaggttaaagacaaaggtttaaccctgagaaactttttttttggcaagataataaagaggttaaagaggctacgtggatctgtcactgctttagcttaccattttcaattcagcaccaaagtgctcagaaagacaggctcagwtcaggacgacttcttaaagggatacacaggcaatattactggcaaaatgattttccaaagctgagccacgcgccccaccctacagggaggggagtagaatcttatggcccagcattggcattgaggcatcttgctttttttcctcagaattccacaaaggcttaagagtgatctaaatgcctggctggaagctcaagtctaggagagctattttactgcactgttgagatgttctctgcaaggtagtcacagataataagcaatttagtagataattattctatacaagaattaatgttctctgaaacagtgattaatagaatcttcacatctggcctggctgggaggcttgggggcaggaaagggagggtggaaggatgggtagcacatcaaaatggtgatgaactggcaaaacgacaatgctgctgtttttgtatcctttaaagcctatatcccagggttttaaacgacgccgggggtgtgcttcacatctggcctggctgggaagcttgggggcaggaaagggaaggtggaaggatgggtagcacatcaaaatggtgatgaacctggcaaaacgacaatgctgctgttttgtatccctttaaagcctataacagtttaatgacgcttttttkgtgtgcttcctgataggaagtcaaataagttttagtattaagaactggggatataamccaaaggaaacctagagtcaactgactgctggaggaacagaagcaatgrctttctttccacccttcttagatagtaatcttacttttgttggctaaaagcactttcttcagcattctgagttaacacgggttccctataagctcccctccccaggtggacagtcytattttctaagacaagctcaaagctcaaactcaccaaattaccactataaacaaagcttcagggaagagacataacctwacttcaaaagcttcaggtcagagacrgccaaaatcatgtgactgctagcytcarstcaagyagtgtgcccaaatcattcacaaaatgggattccctttccttttcttttttttttttttggagacggagtcttgtctgtcgctaggctgcagtgcagtggcgggatctcggctcactgcaacatccacctcctgggttcaagcgattttcctgcttcagcttcccgagtagctgggactacaggagcgtgccahtacacctggctaatttttgtatttttagtagagatggggtttcaccatattggtcaggctggtcttgaactcctgaccttgtgatccacccgcttcggcttcccaaagtgctgggattacaggcgtgagccaccatgaccagccctccatttattaatttataaggggactagaaggacaaactatttgattaatttgaaggtgagaggtatcattttctcagatgctccaactaggcttctcacatccctcaaaggttatcagctaaagacaagagtttctgaggctaatgcaaaaacatggtcaaatgtgaaacksccytttwrgaggcagggtttgtgaaaggctgctggcytccaaaggagagtatgcmtaaactctctggrctcccaggacctgtggtgacctcaagctaacctgatgcacagacaacagtatcttttagggactgcagccaatgttcccccaatttacttttttttttataccttaaaatatcaaatgtttcatttttaggtgatatcccaagtgacacagaaacacagctcctccggatggtgaagtctccgctgcaaaactcacgaaacagcacagaggatgactctagggtgctctcccacttgctccaagttaggcaggtgccctgatggaggcaaggctgagccattaacatgcacagctccatatcctggaagcctctgtagccttgaggagataggctctatccaacaggactcagaataaatgactgccacctcaactgagcagtatgaactgcccacctcaactgggcagtctgacctcttccacagtctttaaagaaacaggagagccatttgcattatttaatcaccattcaataatctcctccctccccatagctgcttgagttaactgtcccacaagtgtaactgtgttttgtaaagatgagggttattttctgaaatgcagatgggactaggatgaagctgtattatcaattacagagacagccaactctcatttctcttaaagcaaaaattcattccactgtgatttctccaggtatttccggcaattctaaatccgccctttgatattagagaatattaaaatcacacagttgtggcaaaaatcacattgtggctattaaaccctttttgtgaacttaaaaaaagttgaaagtggctttaggctaaagctgttttttttttttttttttttaaagatagaggatgcggactccaataaaggcattaagaaagtactagatgaaaatgagaaatatgtgaaggataacatgtgaaatgtacactcaggtctaacaaatacctattatttctctggttaagaaggtttagcaggagcctccaatgagcactgtatgtagagaaaagggaaggagcaggaggaggaacagatctgcacagaatttttttcttaaaaaccacaaagggtgacttttttcttctaaggcaagccaggcctgagaggcatttacatggggctggctcctaatatcaaaacaaaatatttctttggccacaaagggaacttggactatggtaggcaacacattttacaaaacttactggcaaaacacttcccagagggccagtggacctactctggttccccagaggcttccaagaagcaaggccttcaagtgccttcatgttcccatgggngcttgtgccagtgcaatgccagaaggcggatattcctgctgtgaacgccaccctcgagaccttctgcagcctgagagggggtgatactcccacaccctttgatccttccagatggctcagcctagatctagcagtgagagagccctctccatgcagggcagatggagtggtggacacttgtgaaaacaaaacactaactgttccatcctgttatatttgctgtgaggaaaattaagattcctgttgtatgggctgcactgtttctggaagactacaggaaaatctaacatgggttgacacttcctgggtagcccttctgtacatacacacacacacacccaggggagaaggccaggagagaaaatcctggtccaaaagatcacatgaccttactagtgtttccccaatgactgtaatttataaactaaaaatttttacaaatccactgctatcttcttctgtcctgagtttggtagactttaatggatgctccagcaataaccagaatctaggacatgcagactcactgtgagcgagaagctagggatctgccctaaacataggaacctgtttctatcaagcctgaatgaggtcagctctggtagaattaatgacaaatcaatgtcagtgaaatattctgcaaacagggtagcttttgtgcctttcttttggattattttcctttggggagataagaggtattgccaacccatgggtcctaactaatctatcactaaaggactgtgacgacattcctcagtaaagacagtcatggtgtttactgtgcccaaggagggaaaatcccagatcatcagaatccccagtgcaacagaaaacagcacccagtttcaacaattctgatgttggacaaagcctctttttgtcagttaagaaagcgtaagcacaatctctcagtcaattgcattaacaggaatccattcatgtcactgaaaaatacttcttggcacagttcactttccgtgacccaaagacaccaacaacaatcaaaactgcactttcagggtagtatattgttacactagcccagtcaaaacatactcagaacatttaaaaatgtataaattactgttagcactgcagttccgttttattgtcttatttatttattgagacagagtcttactctgttgcccaggctggagtgcagtggcatgatcttggcttactgcaacttctgcctctcaggtttaagcaattctcatgcttcagcctaccaagtagctgggattacaggagtgcaccatcatgcccagctaatttttgtattttagtagagatggggttttgccatgttggtcaggctggtctcaaactcctggcctcaagtgacccacctgccttggcctcccaaagtgctgggattacaggtgtgagccactacacccagccctgcagtccctttttaaagagtactggactgttttcctgcaaagtactttcaaatccataccataaaggtagaatttatctgggaagaatgtgttttttgaattccacctggcacttggttaaatctactttattttgccctttatttatttgaacagaactttagaatgctctaggtcaggaaaagaaacagtgtgttcgtttttaagaaggatgtgtgaatagtaagttggcattcagactcaagtcccatggtattgttcttatccaatgggacctctccttgggaatataattcctttaccagaggtatcatggtatcccaagaatataactgctcccttggctctgtgtgtgaagattgggggagaggatgtaaactaagagtata

SEQ ID NO: 4342 - DNA, 513 bp, Homo sapiens
  SIMILAR (268)..(450): 671254mologous to Mus musculus putative,accession number AK013206,Smith-Waterman Score=190.
tgttctgattcagctcgtgtggatagcgttattgctggtcgacccatcgcgtccggtgttaaccaaggacgagccagcttcaagcagtaccagcagctttacatcacagtcacagaaaaaaggacagcaatcgggattcctgcaaagccgtaactgaggatgcatagccttatgtgaagatttcaacgagaagagatatattaagtcggaatggactaggattcctttagaataaagtggttctttaattttattttccacttaacagtgatcacctcatctgacctgcacatacatggagagatatgggtagtccctaatactgaccatgtctgcacacgattctttttcgtctatgatgactgcctagtggtatatgcatatattaatactcttttatgaggcttttactaatatattcttctagtaattgttaattatactggttctgttcattggtttatattttattatcttgttttgaatgtcttgttctgttttttgttatatatt

SEQ ID NO: 4343 - DNA, 536 bp, Homo sapiens
agtactccccctcacagcagccaaagggcttgtgaaccacttccctcctttgctcaatgccctcgttaggcacccagcccacctgcgccccattgtgctcttatttgtccaattccaaagatggaggagcgtccgctatgtgaataggaagataacgtcgacatttattgagcacttactgtgccaggagctgcactgagcaggctccttgtattatcttgcttaatcctcacaatgtcctggatttatcccgtttatgggtaaaaggacaatgaggcacagacaagatcagtcaacttgctgagaggaccacagttcatgagtggctcagcagcctggccagaagctctccttgccctcactttcacgtagagagtggctggcccttggctgaatgactgcatcttggggtagtctgcatgcctgatcgcacatgagacttgccccccatcgccctgtgaggcgcaaagtcacacagctccatcataataggctctagccactcagatgtgatcccttggagaagtgagttagtg

SEQ ID NO: 4344 - DNA, 436 bp, Homo sapiens
  SIMILAR (350)..(436): 1001254mologous to Homo sapiens HSPC057,accession number AF161542,Smith-Waterman Score=154.
gaggctacttaagtgaagtagtagaagaaaatactccaccaaaaatggaaaaagaaggcttggagataatgattgggaagaagaaaggcatccagggtcattacaattcttgttacttagactcaaccttattctgcttatttgcttttagttctgttctggacactgtgttacttagacccaaagaaaagaacgatgtagaatattatagtgaaacccaagagctactgaggacagaaattgttaatcctctgagaatatatggatatgtgtgtgccacaaaaattatgaaactgaggaaaatacttgaaaaggtggaggctgcatcaggatttacctctgaagaaaaagatcagcaggtcaaaaggtacaagattgttacttctatcaaatttttatggaaaaaaatgagaaagttggcgttcccacaattcag

SEQ ID NO: 4345 - DNA, 388 bp, Homo sapiens
  SIMILAR (1)..(306): 1001254mologous to Homo sapiens Human cytoskeleton associated protein 9 (CYSKP-9),accession number AAY91954,Smith-Waterman Score =547.
gaagagctaaacactgcacccgtccaagagagtccacccttggccatgcctcctgggaactcacatggtctagaagtgggctcattggctgaagttaaggagaaccctcctttctatggggtaatccgttggatcggtcagccaccaggactgaatgaagtgctcgctggactggaactggaagatgagtgtgcaggctgtacggatggaaccttcagaggcactcggtatttcacctgtgccctgaagaaggcgctgtttgtgaaactgaagagctgcaggcctgactctaggtttgcatcccttgccagaatatggagttatttgctgttctctgcatagaaacaagccactatgttgcttttgtgaagtatgggaaggacgattt

SEQ ID NO: 4346 - DNA, 1623 bp, Homo sapiens
  SIMILAR (13)..(561): 691254mologous to Homo sapiens putative p150,accession number U93572,Smith-Waterman Score=660.
atgaatccaaaccaagaagaaatctctgatttacctgaaagaattcaggagacagagaaggaaggaaccctccctaattcattctatgaagccagcatcaccctaataccaaaactaggaaaggacaaaaccaaaaaagaaaactacagaccaatatccatgatgaacatagaggctaacatccttaacaaaatactagctaaccaaatccaacaacatatcaaaaagataatccaccatgatcaagtgggtttcatatcacagatgcagggatggtttaacatacacaggtcaataaatgtgatacaccacataaacagaattaaaaacaaaaatcacatgatcatctcaatagatgcagaaaaagcatttgacaaaatccagcatcactttatgattaaaactctcagcaaaatcggcatacaaggggcatacctcaatgtaataaaagccatctatgacaaacccacagccaacataatactgaatgggaaaaaagttgaaagcattccctttgagaactggaacaagacaaggatacccactctcacaactcttcttcaacatagcactggaagtcctagccagagcaatcagacaagagaatgaaataaagggcatccacattggtaaagagaaagtcaaactgtcactgtttgctggtgatatgatcttttatcttgaaaaccccaaagactcctccaaaaaactcctagaactgataaaagaattgagcaaagtttccaggtgggaattgaacaatgagaacacttggacacagggtggggaacatcacacaccggggcctgtcgtggggtcgggggaggagagagggatagcattaggagatacacctaatgtaaatgacaagccgctcactggggccgccttggcaagtaccctaggggtgtgggaaaatgaaaacaaattcacacacctttttaacatacacagccagttctgcctacccagccaaggcatattcttcttgtgtggaacttcaacctatgtctgcctcaccactaactggacaagcacctgtaccctaatcttcctaagccccaaaattgacattgcccctggaaaccaaaccttaccagtccctgtcagagcccaagtccatcagcatagggctgtgcagataatacccttgcttataggactaggagttaccaatgccacaggaactggaatagcaggtttgtccccttccctgtcctactatcatacactctcaaaggatctctcagacagcctacaagacatagcaaaatccacccttactctccaatcccaaatagactccttagcagcagtaactctgcagaaccaccgtgggcttagacctcctaaccgtcgaaaaaggtgggctatgcacctttttaggggaagattgtttttccaccaaccagtctgggactagtacgagatgctgcctcgcgtttaaatggaaaagggttcttaaaattcaggacaatgtcttttcaggactttttaacaccaatctttgggagctggggctttgtgggtttttccctatagctggggcccctcatttccatcattctccttctcctatttggaccctgcctcttccgtctagcctctcagttcctacaaaag

SEQ ID NO: 4347 - DNA, 384 bp, Homo sapiens
  SIMILAR (248)..(382): 1001254mologous to Homo sapiens Human cytoskeleton associated protein 9 (CYSKP-9),accession number AAY91954,Smith-Waterman Score =244.
gggggcttacctcagaattcgtgtccttttaccaggtttattcactgttggccccagaatcctttcagaaaccaagaaatgagaatatgtcaagggttaaaggaggctttcacttccagaaatcagaagtaaaataaaggcttttagagcctgaaattagctttttggaaatgataggattataaaatcactggcaaaagggtttagaacttgactgccctataaagagttcttcctctgtgccataggtggtcagaatggcttcaacattcctcaagtcaccccatgcccagaagtaggagagtacttgaagatgtctctggaagacctgcattccttggactccaggagaatccaaggctgtgcacgaagactgctttgtga

SEQ ID NO: 4348 - DNA, 1742 bp, Homo sapiens
  SIMILAR (4)..(288): 1001254mologous to Homo sapiens Familial Cylindromatosis Gene,accession number AJ250014,Smith-Waterman Score=501.
  misc_feature (1)...(1742): n = a,t,c or g
taccaggaaaggaggcctcccaaacttgcctttatgtcaagaggtgttggggacaaaggttcatccagtcataataaaccaaaggctacaggatctacctcagaccctggaaatagaaacagatctgaattattttataccttaaatgggtcttctgttgactcacaaccacaatccaaatcaaaaaatacatggtacattgatgaagttgcagaagaccctgcaaaatctcttacagagatatctacagactttgaccgttcttcaccaccactccagcctcctccatgtgaactcactgaccaccgagaacagattccactctttaccattcagtctcaccaagatgcccaataccaatggaagtattggccacagtccactttctctgtcagcccagtctgtaatggaagagctaaacactgcacccgtccaagagagtccacccttggccatgcctcctgggaactcacatggtctagaagtgggctcattggctgaagttaaggagaaccctcctttctatggggtaatccgttggatcggtcagccaccaggactgaatgaagtgctcgctggactggaactggaagatgagtgtgcaggctggtacggatggaaccttcaagaaggcactcggtatttcacctgtgccctgaagaaggcgctgtttgtgaaactgaagagctgcaggcctgactctaggtttggnattattgcagccggtttccaatcagattgagcgctgtaactctttagcatttggaggctacttaagtgaagtagtagaagaaaatactccaccaaaaatggaaaaagaaggcttggagataatgattgggaagaagaaaggcatccagggtcattacaattcttgttacttagactcaaccttattctgcttatttgcttttagttctgttctggacactgtgttacttagacccaaagaaaagaacgatgtagaatattatagtgaaacccaagagctactgaggacagaaattgttaatcctctgagaatatcagcaggtcaaaaggtacaagattgttacttctatcaaatttttatggaaaaaaatgagaaagttggcgttcccacaattcagcagttgttagaatggtcttttatcaacagtaacctgaaatttgcagaggcaccatcatgtctgattattcagatgcctcgatttggaaaagactttaaactatttaaaaaaatttttccttctctggaattaaatataacagatttacttgaagacactcccagacagtgccggatatgtggagggcttgcaatgtatgagtgtagagaatgctacgacgatccggacatctcagctggaaaaatcaagcagttttgtaaaacctgcaacactcaagtccaccttcatccgaagaggctgaatcataaatataacccagtgtcacttcccaaagacttacccgactgggactggagacacggctgcatcccttgccagaatatggagttatttgctgttctctgcatagaaacaagccactatgttgcttttgtgaagtatgggaaggacgattctgcctggctcttctttgacagcatggccgatcgggatgagtccaacaatgagtttgtacaaataactggggtcatcgggaaaggcaaagaaactgaaggcagagtcctaacgttgcatcttattcgagctggcagttctgttcacgtccattgccggcaatggatgtctttgtggtga

SEQ ID NO: 4349 - DNA, 4098 bp, Homo sapiens
  SIMILAR (1)..(489): 841254mologous to Homo sapiens Human cytoskeleton associated protein 9 (CYSKP-9),accession number AAY91954,Smith-Waterman Score= 689.
  misc_feature (1)...(4098): n = a,t,c or g
cccgtccaagagagtccacccttggccatgcctcctgggaactcacatggtctagaagtgggctcattggctgaagttaaggagaaccctcctttctatggggtaatccgttggatcggtcagccaccaggactgaatgaagtgctcgctggactggaactggaagatgagtgtgcaggctgtacggatggaaccttcagaggcactcggtatttcacctgtgccctgaagaaggcgctgtttgtgaaactgaagagctgcaggcctgactctaggtttgcatcattgcagccggtttccaatcagattgagcgctgtaactctttagccatttgggaggcttacttaagtgaagtagtggaggaaaatactcccacccaaaaatgggaaaaagaaggcttggagataatgattggggaagaagaaaggcatccagggtcattacaattcttgttacttagactcaaccttattctgcttatttgcttttagttctgttctggacactgtgttacttagacccaaagaaaagaacgatgtagaatattatagtgaaacccaagagctactgaggacagaaattgttaatcctctgagaatatatggatatgtgtgtgccacaaaaattatgaaactgaggaaaatacttgaaaaggtggaggctgcatcaggatttacctctgaagaaaaagatcctgaggaattcttgaatattctgtttcatcatattttaagggtagaacctttgctaaaaataagatcagcaggtcaaaaggtacaagattgttacttctatcaaatttttatgggaaaaaaatgaggaaagttgggcgttcccacaatttcaggcagttgttaggaatggtcttttatcaacagtaacctgaaatttgcagaggcaccatacatgtctgattattcaggatgcctcgatttggaaaagactttaaaactatttaaaaaaatttttccttctctggaattaaatataacagatttacttgaagacactcccagacagtgccggatatgtggagggcttgcaatgtatgagtgtagagaatgctacgacgatccggacatctcagctggaaaaatcaagcagttttgtaaaacctgcaacactcaagtccaccttcatccgaagaggctgaatcataaatataacccagtgtcacttcccaaagacttaccccgactgggagattgngagacacggctgcatcccttgccagaatatggagttatttgctgttctctgcatagaaacaagccactatgttgcttttgtgaagtatgggaaggacgattctgcctggctcttctttggacagcatggccgatccgggatggtggtcagaatggcttcaacattcccccaagtcaccccatgcccagaagtaggagagtacttggaagatgtctcctggaagaccctgcattcccttggactcccaggagaatcccaaggctgtgcacgaagactgctttgtgatgccatatatgtgccatgtacccagagtccaacaatgagtttgtacaaataactgggggtcatcgggaaaggccaaaagaaactgaaggccagaagcccctaacgttgccatcttattcggagcctggcagttcctgttccaccgtcccattgcccggcaatggatgcccttgtggtgatgacccctcagaaaaggatgccccctgtttaaaaacaaattgcttttgtgtccctgaagtatttaataagaagcattttgcattctagaaagtatgtttgtgttggttttttaagaagtctaaatgaagttattaatacctgaagctttaagttaagtgcattgatcatatgatatttttggaagcatacaattttaattgtggaagtttaaagcctcttttagtcccattgagaatgtaaataaatgtgtccttctttatggaccaaggatatgaaatcatttttcttttgtagctaacggttgccttgaggaagaaataatttggttttattaagagtctactctcaatccagttattagagatgtactgagtttgatttgttaatcctttctatatactgctgatcttgcatgtctacaatctgctcagtttttctgtgtttctgcaatagtggtcagaaaaatacttaaattcccttaatggtgttgttttctatttgttctggttttgagataaatgagtgattctgtccccaaatgtccatttttgaagtgattttcctggaggattagggtatttagcagttgaagctcttcattcatagtagttactgtcagctaacaggttttttaaggcttttaactattaatattttatggaatggggcaaagtaaattgatgaaagaattggagtgataatagtcctttacaaacatacagtccataagaaaatgaatttggcatatagaattattacaatttcctgggagagatggatatttaaacctctattattttagacaagactgtctagaacttaagtttgatctgtcagccagtactcccattaaattcagtgtagtttcacttgatagaatcacatatgttatcgaaatgttagcagcagcttcatcctccttctgattaaagtaagtagaaatgggatgttttgtttaataacagccataagcgtgtgtttagaccacagcggatgttgtagaccaggaccatagatgatacatgtcagtgctgtggaatgtgcattctctgagtgttgttttgtggtatcattgtctttcctgaatgactttctaactgtgcagaaaggcagaaaagtcatccatatgtatatgtcatatggacttttataaaatattttaatgtggaccanaaagtggggaaagaatctttaccaaccctggcaattactttttttaaaggcacttttactctttggttttatccattccattttgctaatatttactagctttataaattacagtaagggtacaaaaactccatcttgtaattattttccatttttggaagtggaaaaagtacatattattttgcacaaggttttatactgctaagtgcttggttggggtggtgagatgatgattagaatcaggggtgaggctgagagactctgggtttagggcctagccccgccccccatctcccctggggtaaaaatggaagggtgtgggggtaaaaagatgccataaggcccttttcctagcctctgacagccctagaagtcccaatcacccctgtaataaatatgtgttgaatgaagaaatgggtgaatgagcttgtcaatgtgattttaaaaaattgactaccctggaggaatgattaggaatcctaaatgaagccagccctcggtatctgcaggtttctcatcccatggaattcaaccaactgcaaatggaaaatacgatttttttttaaaaaaaggatggttacatccgtattgaacatgtacagacttttttcttgtcattattctctgaacaatacaagaactctttatgtagcatttacatttattaggtattataagtaatctagagattatttaattaaaatatacaggaggatgtgtgtcagttatatgcaaattctgtaccattttgtatcagggaattgagcatcttcagatgttggtatctgcagggatcctggaaccaaacccctgcagatactaagggctgacgatctaggtaagactggatttaacagttggaaaaaaaaaaaaaaaaaggagagagaagacagttcctttcctgtagaaattaaaacaaaatacaaattgaggaagctctgctacccaggctgtcatggtagagaacttgaagaagacctgtttggatggacacctggtttcaaaagtcaggtgtggagactgttaaatgggagggcctcatccataaatgatttctggcaacgtcttcttcaggtggagcttgacgtctttttaatgttacttggggagggagtgctcattaagggatgccagggccagctctggtggttcctggggaggctgcgtccttccctgcttctgcatgtcatgaggcagcaggaaggtttcccctgcacctgtctgtcctggctccctctgggtagccccct

SEQ ID NO: 4350 - DNA, 452 bp, Homo sapiens
  SIMILAR (100)..(144): 861254mologous to Homo sapiens Similar to chromosome 6 open reading frame 32,accession number BC000930,Smith-Waterman Score=63.
  misc_feature (1)...(452): n = a,t,c or g
attgagcctatggaaccgtcngcagaanctccggaagtatcacgcgaccgacctgatctcttagggatctgttgttggagaatttgtattgctgctttatcctttctagatggaagcttagaggatgctgtggatggtcttttacgttgcattacaaccacataaagagcagtataaagagtttcaggatctgaaccaagaagtcatgaatttggatgatattctaaaagtaagtaccttttcacagaaattggattaggattggagagaggtgtactaagccaacattctatttaagatgaggtatcatttnnnnnnnnnnnccctgtccaatcacaggattaatagctcatcattattttaaatggcactaatatgccagtagtgcatattaagttttattttccaaagcacagatcaacttatctaaattgattaggatttaaacaaag

SEQ ID NO: 4351 - DNA, 1609 bp, Homo sapiens
  SIMILAR (1197)..(898): 761254mologous to Mus musculus putative,accession number AK005056,Smith-Waterman Score=385.
  misc_feature (1)...(1609): n = a,t,c or g
cagccttcaaaatctgaaancacctacaataaaactagagcacccttaattcaaccaagaaaatnccattttcaggaatactaaagggaaatagtaaacccatgaaaataattacaatgaaaaaaaggacgaaattaaaattttcaaaataagccttcaaatatctgcccaagaggaattccctttttttcgaagatggaagtcttgcctctgttgccccaggctgggagtgcagtggcatgatctcgggctcactgcaacctcccacctccccaggttcaagcgattctccggcctcaagctccctgggcagcttggatttacaggtatgtgcccatcacgtctggctaatttttgtattttcagtagagaaggggtttcacccatgttggcccaggctgatctcgatctcctgacctcaggtgatccgccagtctgggcctcccaaagtgctgggattacaggtgtgagccaccacgcccagcctccatattgttaacatatagttaacactttaaaactgatgtgctttaattaaaaagcaagcaaatatacgataaaacagacaaggaatcaaagcacagatcctgaaatcagaatctaaagaaaataatacagtggggttgtatacaacttagcttagtaagaaattataattataacagaagcgatcggagctaccacaaaactgtgtaagaataaacaggtaattttaacagatggttatgtaaattggcaggtcgggtaaagaacaaaataagcttacagaatatgccatttaaaaatcctaaccaaatatttcatttcataccgtatattaaaatgcaacctggaaaagaaaccctgatctcaattcagctttggagtctataggagtctactttctagaagatttcaaatttcatttgccaagacatcataattagctgtatggttcagtgccacattaggattgtcgacttcattcacagcaggcaagaaggcagatgtaaaaggaagcaggttatgacaggccatcctatattcttcatattgggaactacagttcccaaagctgccatcaagcagtgcttcagaaacctttattaatgtctttacatctttatcttttatagtttcatctagtctagtggctatagcaattgctttctcctgccttgacttgtccagaaaatacatcattttagcacctgaaataccaaggcatttcaaaatgaataaacacctatactttacattttatgtgatatcaactggccagtgacttcaaatatggttttaagtgtttaatcagtggtaagctggagctggctcctaccagctcaagagagccaagtgtgacatttcttccctacctcctattcagtagcatcccattgataggccatgatcagagtatttatatcatgaaaatacactacaaatcagagcttcttccttcacaaaatgatggttattaaacatttatcagatgaacagtgactcaacaacttcctccccttagaaataaaattgagaatgtaaatatggactgccctgtggcatcaatcagtatttcagccaaaactatgaaaaaagatattctaaaataaaaccggacgcgtgggtc

SEQ ID NO: 4352 - DNA, 1050 bp, Homo sapiens
  SIMILAR (169)..(273): 771254mologous to Homo sapiens Human secreted protein, SEQ ID NO: 5327,accession number AAG01246,Smith-Waterman Score=134.
cggtgagcgcggcccgggccggacatggcggcgctctacgcctgcaccaagtgccaccagcgcttccccttcgaggcgctgtctcaggggcagcagctgtgcaaggaatgtcggattgcacaccctgttgtgaagtgcacctactgcaggactgagtaccagcaggagaggctagagtgcaatggcacgatctcggctcactgcaacctccacctcccaggttcaagcgattctcctgcctcatcctcccgagtagctgggattacaggcattaaaaccaatacaatatgcaagaaatgtgctcagaacgtgcagttgtatggaacgcccaaaccttgtcagtattgcaacataattgcagcatttattgggaataaatgccagcgctgcacaaattcagaaaagaagtatggaccaccctattcttgtgaacagtgcaagcagcagtgtgcatttgacaggaaagatgatagaaagaaggtagatgggaaattgctgtgctggctgtgcacactttcatacaaacgggtccttcagaagaccaaagagcagaggaaacacctgagtagctcttctcgtgctggccaccaggagaaggagcagtatagtcgcctgagtggtggtggccattataacagccagaaaacactttctacatcttcaattcaaaatgaaatcccaaagaaaaagtccaagtttgagtcaatcacaactaatggagacagcttctccccagacctggctctggactcaccaggcactgaccactttgtcatcattgcccaactgaaggaagaagtggctaccctgaagaagatgttgcatcaaaaggatcaaatgattttagagaaagagaagaagattacagagttgaaggctgattttcagtaccaggaatcgcagatgagagccaaaatgaaccagatggagaaaacccacaaagaagtcacagaacaactgcaggccaaaaaccgagagctcctgaagcaggcagctgctttgtccaagagcaagaagtcagagaagtcaggagctataacctctccatga

SEQ ID NO: 4353 - DNA, 963 bp, Homo sapiens
  SIMILAR (169)..(273): 771254mologous to Homo sapiens Human secreted protein, SEQ ID NO: 5327,accession number AAG01246,Smith-Waterman Score=134.
cggtgagcgcggcccgggccggacatggcggcgctctacgcctgcaccaagtgccaccagcgcttccccttcgaggcgctgtctcaggggcagcagctgtgcaaggaatgtcggattgcacaccctgttgtgaagtgcacctactgcaggactgagtaccagcaggagaggctagagtgcaatggcacgatctcggctcactgcaacctccacctcccaggttcaagcgattctcctgcctcatcctcccgagtagctgggattacaggcattaaaaccaatacaatatgcaagaaatgtgctcagaacgtgcagttgtatggaacgcccaaaccttgtcagtattgcaacataattgcagcatttattgggaataaatgccagcgctgcacaaattcagaaaagaagtatggaccaccctattcttgtgaacagtgcaagcagcagtgtgcatttgacaggaaagatgatagaaagaaggtagatgggaaattgctgtgctggctgtgcacactttcatacaaacgggtccttcagaagaccaaagagcagaggaaacacctgagtagctcttctcgtgctggccaccaggagaaggagcagtatagtcgcctgagtggtggtggccattataacagcttctccccagacctggctctggactcaccaggcactgaccactttgtcatcattgcccaactgaaggaagaagtggctaccctgaagaagatgttgcatcaaaaggatcaaatgattttagagaaagagaagaagattacagagttgaaggctgattttcagtaccaggaatcgcagatgagagccaaaatgaaccagatggagaaaacccacaaagaagtcacagaacaactgcaggccaaaaaccgagagctcctgaagcaggcagctgctttgtccaagagcaagaagtcagagaagtcaggagctataacctctccatga

SEQ ID NO: 4354 - DNA, 747 bp, Homo sapiens
  SIMILAR (16)..(75): 601254mologous to Homo sapiens X-linked retinopathy protein {C-terminal, clone XEH.8c},accession number S58722,Smith-Waterman Score=56.
tgagacggatttccctcttgttgccaggctggagtgcaatgacacgatctcggctcacggcaacctccacctcccaggttcaagcgattctcccgcctcagcctcccgagtagctgggactacaggcatgcaccactagtctcgcgacgttttaattagaattttagaattagaggagggcttagaactctgccctcatttttcagtgaggaaactgcccaagacaggacaaatacttaccctaatgcttagcctggctccagtgaaattagctccccagccaaagctgagctggatggaactaacaaggacacagcaggctgtccccagccctttcgggaggtggggagggataggaaggagaaaggttttggtgcctattgctgctgatggttgggcatcaggccaggccaggggccttcttggaggctctgggaaaggggaagggaaggccaccgggtgtgagagagagggcacttgtctccttcaaggctgatggaaggtaggatatgtgagtccttcctcttaagtggcaggaaacagaattttctcttttatttctttttttttcccctggatcctagaactgaggaaacactattttctcatcttactggtttttgggcccctactctattccttttatgcaaacctcacagaattttaaccagaaaggccaggcaggatggctcacgcctgtaatcacagcactttgggatcacttgaggttaggagctcgtgaccagc

SEQ ID NO: 4355 - DNA, 435 bp, Homo sapiens
  SIMILAR (25)..(435): 311254mologous to Drosophila melanogaster CG4263 gene product,accession number AE003584,Smith-Waterman Score=172.
  misc_feature (1)...(435): n = a,t,c or g
agtaccgctcgacccacgcgtgcgatagcccttgctatttgcaagctcattcatataactattgagcctctctaccgaagagttggagttcctaaaggtgctaaaggctcacctgttaatgctttgcaaaacaagagagcaccaaaacaagctgagagctttgaagatttgaggagagacgtgttcaatatgttctgttaccttggtcctcacctttctcacgatcccattttatttgcaaaagtggtgcgcataggcaagtcatttatgaaggagtttcagtctgatggaagcaaacaagaagataaagaaaaaacggaagttatccttagctgtttgcttagcattactgaccaggtactacttccatctctttctttgatggactgcaatgcttgtatgtctgaggaactatggngaatgtttaaaacattt

SEQ ID NO: 4356 - DNA, 267 bp, Homo sapiens
agtgtttggaaaactagaaatgtaccttattctgactatttctttttgtcttaacagaaagtgatgccaatactggaaaactaataatctttagtaatattgccttaatttaacagctctacattaatcatactcctccaccactgtccaagagtaaggagagagaaatggacaagaaagatttggacaagtcaaggactttaaaacaaaaacagaagcccttggtcaatgtagttcacaattcttggttctaggatcactcaaaca

SEQ ID NO: 4357 - DNA, 401 bp, Homo sapiens
  SIMILAR (163)..(330): 1001254mologous to Homo sapiens ribosomal protein S5,accession number U14970,Smith-Waterman Score=280.
  misc_feature (1)...(401): n = a,t,c or g
ccagggcggcgcgtggtctacgccgagtgacagagacgctcaggctgtgttctcaggatgaccgagtgggagacagcagcaccagcggtggcagagaccccagacatcaagctctttgggaagtggagcaccgatgatgtgcagatcaatgacatttccctgcaggccatctggctgctgtgcacaggcgctcgtgaggctgccttccggaacattaagaccattgctgagtgcctggcagatgagctcatcaatgctgccaagggctcctcgaactcctatgccattaagaagaaggacgagctggagcgtgtggccaagtccaaccgctgattttcccagctgctgcccaataaacctgtctgccctttggggcagccccagnnnnnnnnnnnnnnnnn

SEQ ID NO: 4358 - DNA, 1074 bp, Homo sapiens
  SIMILAR (43)..(462): 291254mologous to Arabidopsis thaliana F5A9.21,accession number AC004133,Smith-Waterman Score=174.
atgaagggagtaatgaatgtggccctggtgcattcaagtcaggaaccaaatggcgagacaccatcatctttatacagagttgcagcagtacttctacaatttaatcttattgatttagatgatctttatgtacatcttcttccggctgataattgcattatggatgaacacaaacgagaaattgcggaagctaagcaaattgttagaaagcttacgatggttgtgttgtcttctgaaaaaatggatgagcgagagaaagaaaaggaaaaagaagaggagaaagtagagaaaccacctgataaccaaaaacttggcttgttggaagccttattaaagattggtgattggcaacatgcacagaacattatggatcagatgcctccatactatgcagcttcacacaagctaatagcccttgctatttgcaagctcattcatataactattgagcctctctaccgaagtgtcacttcatgggccgtggaccatgcaggcttcttagagagtgacccctgtgactccacagtggggcacctgctgagcagagttggagttcctaaaggtgctaaaggctcacctgttaatgctttgcaaaacaagagagcaccaaaacaagctgagagctttgaagatttgaggagagacgtgttcaatatgttctgttaccttggtcctcacctttctcacgatcccattttatttgcaaaagtggtgcgcataggcaagtcatttatgaaggagcaaagtaagaaggtgggggagaaagactgctgtgttgcggcgaagttacgagcgcaagcgacccgtggcgcccagggctctccagactgggtacctcggtttgctttctcgcctgttcgctgttctggagatttgggcttggtaggcggcggttggacttatgtggccggtgaatggggggttggaaataaggtggacggagagcaataccaaatccctgagacaatgggagagattggaaccaaaaccaaggacttgaaaaatggaaatgtgaagattccaactgcttacccatttaactggcccatttggcctatggaaaatgccatatag

SEQ ID NO: 4359 - DNA, 1231 bp, Homo sapiens
  SIMILAR (800)..(901): 881254mologous to Homo sapiens Human secreted protein sequence encoded by gene 14 SEQ ID NO:72,accession number AAB75253,Smith-Waterman Score=153.
ggaaggtttctttgctgcatgttagagactgtgaccaggtggcatagtgatagagccacatatgaaaaggaatgtggaaactatccaggattccttaccatattacgggcaactggatttgatggtggaaataaggctgatcaattagactatgaaaattttcgacatgttgtacataaatggcattacaaactaaccaaggcatcggtacattgccttgaaacaggcgaatatactcacatcaggaatatcttgattgtgctaacaaaaatacttccttggtacccaaaagttttgaatctgggtcaagctttggaaagaagagtacacaaaatctgccaagaagaaaaagagaagaggccagatctatatgcattggctatggggtaacaaaattatattttaatgtgatttacaagactagatgacagaaggattctgaagactttaaaatgttttacagtgttgaagtttatcttctgccttcaggagattatgggagattatgcgatcatgtttccacaggctggtgagagttaccacttctgattatcaacttccggtctatactggatgatagtttttttaaagtcatgtataatatttcttgattgggaggaaatataattttatcatcatagttaacagatcttcaagagtaaaaaaaaaaaagccatcttagtttaaggattagtttatagggaaattgtaatttttaagaaagctgggcgttctataaaaaccttcaagaacttattaaaaatgggtattttttaattctctagaaccacatagtagaatgaataacttgctaattttattcttaaaaacctcatgtttatgttttttgatttgggtttgtatatttaaacactttgtgcgactttccagctactctgggcagttgaaaaagtaggaaaagtccataccatgataccctgaaaatgagtttccatcacaaagacccccccctccgaggaatgcagttgcccagtgtgcaaaatgggccctggtggtgggccttcttcatcatcaataggaagtgcatctaaatcggatgaaagcagtactgaggagactgataaatcaagggagagatctcagtgtggtgtgaaagctgttaataaagcttctagtaccacacctaaagggaattcaagcaatggaaatagtggctctaacagcaacaaagctgttaaagaaaatgacaaagaaaaagggaaagagaaag

SEQ ID NO: 4360 - DNA, 3499 bp, Homo sapiens
  SIMILAR (2946)..(3185): 271254mologous to Arabidopsis thaliana F5A9.21,accession number AC004133,Smith-Waterman Score=58.
cattactgaccaggtactacttccatctctttctttgatggactgcaatgcttgtatgtctgaggaactatggggaatgtttaaaacatttccatatcagcatagatatcgtctgtatggccagtggaagaatgaaacttataacagtcacccacttttagtaaaagttaaagctcaaacaatagacagagccaaatatatcatgaagcgcctaaccaaggaaaatgtgaagccttctggaagacaaattgggaagttgagccacagcaatccaaccattttgtttgattatgtatgttttgagatcttgtcacaaatacagaagtatgataacttaataacacctgtagtagattcattgaaatacctcacttcactgaattatgatgtcttggcctgtatcctttcaaattgtatcattgaagctttagctaatccagaaaaggaaagaatgaaacatgatgacacaaccatctcaagctggcttcagagtctggctagtttctgtggtgcagtttttcgtaaatatccaattgatcttgctggtcttcttcagtatgttgccaatcagctaaaggcgggcaaaagttttgacctgcttatattgaaagaagtggtacaaaaaatggcaggaatagaaattacagaggaaatgacaatggagcaactagaggctatgactggtggagagcagctaaaagctgagggtggttattttggtcagatcagaaacactaaaaaatcctctcagagattaaaggatgctctattggaccatgatcttgcccttcctctctgtctgcttatggctcagcagagaaatggggtaatctttcaggaaggtggagagaaacatttgaaacttgtgggaaagctctatgaccagtgtcatgataccctggtgcagtttggtgggtttttagcatctaatctgagcacagaagattatataaagcgagtgccttcaattgatgtactctgtaatgaatttcatacaccccatgatgcagcatttttcctgtctaggccaatgtatgcccatcatatttcgtcaaaataccgatgaacttaaaaaatcagaaaaagggaagtaaacagcaacataaagtccataaatacattacatcatgtgagatggtgatggctcctgtccatgaagcagtggtctccttacatgtttccaaagtctgggatgacatcagccctcaattctatgctacattctggtcattgacaatgtatgaccttgcagttccacacaccagctatgaacgagaagtcaataaacttaaagtccagatgaaagcaattgatgacaatcaggaaatgcccccaaataaaaagaaaaaagagaaggagcgctgtactgcccttcaggacaagcttcttgaagaagaaaagaaacagatggaacatgtacagagagttctacagagattgaaactggaaaaggacaactggcttttagcaaaatctaccaaaaatgagaccatcacaaaatttctacagctgtgtatatttcctcgatgtattttttcagcaattgatgctgtttactgtgctcgttttgttgaattggtacatcaacagaaaactccaaatttttccacacttctttgctatgatcgagttttctctgacataatttacacagttgcaagctgtactgaaaatgaagccagtcgatacggaaggtttctttgctgcatgttagagactgtgaccaggtggcatagtgatagagccacatatgaaaaaggaatgtggaaactatccaggattccttaccatattacgggcaactggatttgatggtggaaataaggctgatcaattagactatgaaaattttcgacatgttgtacataaatggcattacaaactaaccaaggcatcggtacattgccttgaaacaggcgaatatactcacatcaggaatatcttgattgtgctaacaaaaatacttccttggtacccaaaagttttgaatctgggtcaagctttggaaagaagagtacacaaaatctgccaagaagaaaaagagaagaggccagatctatatgcattggctatgggctactctgggcagttgaaaagtagaaagtcatacatgatacctgaaaatgagtttcatcacaaagacccccctccgaggaatgcagttgccagtgtgcaaaatgggcctggtggtgggccttcttcatcatcaataggaagtgcatctaaatcggatgaaagcagtactgaggagactgataaatcaagggagagatctcagtgtggtgtgaaagctgttaataaagcttctagtaccacacctaaagggaattcaagcaatggaaatagtggctctaacagcaacaaagctgttaaagaaaatgacaaagaaaaagggaaagagaaagaaaaagagaaaaaagaaaagactccagctactactccagaggccagggtacttggtaaagatggtaaagaaaaaccaaaggaagagcggccaaataaagatgaaaaagcaagagagaccaaggaaagaacgccgaagtctgacaaagagaaagaaaaattcaagaaggaagaaaaagctaaagatgagaaatttaagaccactgtccccaacgcagaatcaaaatcaactcaagaaagggaaagagagaaggagccatccagagaaagagatatagcaaaggaaatgaaatcaaaggaaaatgtttaaaggagggaggaaaaaacaccagttctggggtccttggaattcacctgtttccccaggatcagatatttcccagagccttgaaagggggaaccaaaaacgccgcaaaattgatactcacccttctccatcacattcctccacagtaaaagaaatgtttcatcgaactccaaggaatcttcagcaaagctctaccattaatcatactcctccacccactgtcccaagagtaaggagagagaaaatggacaagaaagatttggacaagtcaagggaaagatccagagaaagagagaaaaaagatgaaaagggacaggaaagagcgggaaaagggggttcactcaaaacaacgacccgtgaagttgccaccggaccttaacccaagagacgtaaagaggagaatggaacaatgggggtttcaaaacataaaagtgaaagtccttgtgaatctccttatccaaatcgagaaagacaaggaaaaaaataagtcaaaatcttcaggcaaagaaaaaggcagtgattcatttaaatctgagaagatggataaaatctcctccggtggcaaaaaggagtccaggcatgataaagaaaagatagaaaagaaagagaaacggggacagttcaggaggaaaggaagagaagaaacatcataagtcctcggacaagcacagataatgaagactttccatcaaggttatgcactttatgctttatgtgagatttaaaaagtattttacccatcttaaataaattgtgtttccatcatagtggatacagtgttcagaccct

SEQ ID NO: 4361 - DNA, 2012 bp, Homo sapiens
  SIMILAR (1016)..(1408): 731254mologous to Mus musculus putative,accession number AK016428,Smith-Waterman Score=504.
gacatttttgattgccataactgatagggtgctactgcatctagtgtataatggtcagggatgctcttaaacattctgtaatgcacaggtcagctcccacccgcacccccaccccctaccaagaattatttggctgaaaataccaataatcaggtgaagaaaccatgaactagaggtagccaaataaaaaagttgagttctcctttatgtgttcagtagtcttaagtttttaaggtagtgttgaaaaaagtctgtctttcagagatgatggatttgcttacaatgatacctgtctgcaagcattttttcccccaaaagtgcttaatagtaaaattagatcttgtagtagccgagattattgtatcatttatctgaaccacagcttttataaaatctttaaaggaaacaaataggggcccacatctttatgaataatgttagaaacattttttgtatatatatgcacaaatgaactgtttttctcttaggctaaagaagaaaaagaagaagaatcaacttcttcttcaagtgttttcttctgctgatgaataagggtcttcatcatcatcctcttcctcttctgggcacaaaaggcataagaaacataagaggaaccgttcagagtcttctcgcagttccagaaggcattcatctagggcatcctcaaatcagatagatcagaatagggaaagatgagtgctacccagttccagctaatacttcagcatcttttcctttaacccttaaacaagaagtgggaggaaactactggggaagcaggataggttacagtatgaaaagacacagataaaagagaaagatagatgccctctctcttcatcttcacttgaaataccggatgattttggaggtaggtctgaagatccaagagatttttataacagctataaaacccaagcaggtagtagcaaaacagaaaagccatataaatcagaaagacatttttccagctagaagaaattcctcagattccttctgtaggaattcagaggccaagatttatggttataggagatttgaaaaggatatagagggaagaaaagagcactatagaaggtgggaaccaggttctgtgaggcattctacctcaccagcaagctcagaatactcttggaagtcagttgagaaatacaaaaaatacgctcactctggatcacgtgatttcagtagacatgagcaaagataccgtttaaatacaaatcaaggagaatatgaaagagaggacaattatggggaggatatcaaaacagaggttccagaagaagatgcactaagtagcaaagaacactcagaaagcagtgttaagaaaaatttacctcagaatttactgaatatatttaatcagatagctgaatttgaaaaagaaaaaggaaataaggtcaaaaaattaatacacccaaggatatcgggcacccattaccacaaaatgcccattaagtgaagtttttggttgtattagtcataacagttgagtgcagaaatctctgcttctaaaattatttgtagagattacaggaaacaaatgcttttaagtaagtttttctcaaattttgtttcagttctaggtcccttgtcacagcttggtttttagactttttatgtatatgtttatgtacagtatattactcttgacagtttgaatttcttcacctaaagataattctctgaaagtactgtttcttcattctattgcggtatatgagaattcctgggtgcatcttattctgctgtttgagagaaaaatttggtgcattgaacacttggatcatttttataaaaattaatttcattttcttttctgttaaattaaaaatcgtcagcttttgaaagattatatgttcgaatgtttcttgaacacttttatatttatcagtttaaatattacattttttgcccaattttttttaaaatttttaaatggtagattatatgtcttaattttcctctaaagcccaatttgattaaaagtggtttgtgaacaatcaaaaaaa

SEQ ID NO: 4362 - DNA, 1030 bp, Homo sapiens
  SIMILAR (600)..(866): 431254mologous to Homo sapiens Human myelin oligodendrocyte glycoprotein gene,accession number AAZ29204,Smith-Waterman Score= 127.
caaactcatcttcttccccagggaagccctcggccccccaagaaggaagacagttttgctaaaaaattggaaaccggcccacccagctgaccggaccggtcaatgcccgtccggaacgtctataaagaaggagaaagctcgagtcatcactgagaaagagaagaatttccaaagcccttgcttagtcttcgttatggcgcgtgccaaaagcccggcttcttcggcatacgggccaaaaagagcccaaggaagccccagaaccaggatgttgaaaaagaaaaaattaaaacccttcctgggaactttgaaatcagtctggcagtcatgcctgggtctcccacgtggtgtgtttccgtgggaacaacctgggccctgggatggggcttcactgcctgtgacttcctcctgccaaggggatttggggctttcttgaaaagacaagtccaagcccctggataatgctattactttcttgtgttgaagcactgttggttgtttggttagtgactgcatgtaaaacggtttttcttgtggggcaggttacagaggctgcacttcagagcggacttgtgctttttctttttaaagaggtaaggttgggctggtgctcacaagctgtaatcccaagcactttgagattgcgctgggaggttcacagaccagcgctggccacacatgtcagaactactaaaaataaagaaatcagccatgcttgggtgctgcacactttgtaagttgcagctcctgggaaggcagaggtgagggaatcacctttaacccaggagggcagaggctgcactgagccaggatcacgccactgcactctagcctgggcaacagtgagactgtctcaaaaaaaaaaaaaaagagacagggtcttcggcacccaggctggagtgcagtgccacaatcatggctcactgcagtcttgaactcatggcctcaagcagtcctccctcagcctcccaagtagaggggtttataggcacgagaccctgcacccaacctagagttgccttttttaagcaaa

SEQ ID NO: 4363 - DNA, 478 bp, Homo sapiens
  SIMILAR (2)..(82): 961254mologous to Homo sapiens beta-subunit signal transducing proteins GS/GI,accession number AF070597,Smith-Waterman Score=146.
  misc_feature (1)...(478): n = a,t,c or g
agacgacttcaactgcaacgtctgggatgcactcaaagccgaccgggcaggtgtcttggctgggcatgacaaccgcgtcactgcctggaactaacgccagtagcatgtggatgccatggagactggaagaccattccaacttggacgcgttaccatgagagcatatcctatccaaccgtactaacgtggacaccctacacctcccctcagaacttcaaaagggcaagatcttttttccttcacttattgctgaaaccaagagcacaattcccattgagagaaagatctctgtgctgtaaactaaaacaaattgtgcattcctttccggggccatcgtctttgttttcttttttgtcttgaatggaattttaaaaggaaatatataataaaaatggtttaaccagaaggtaaacttggagtgtaattgttcagacagacacactttttccaccagtgtatttggaatttttagtanctg

SEQ ID NO: 4364 - DNA, 320 bp, Homo sapiens
  SIMILAR (1)..(222): 971254mologous to Bos taurus put. transducin beta-subunit (aa 1-340),accession number X03073,Smith-Waterman Score=387.
ttctttccaaatggcaatgcatttgccactggctcagacgacgccacctgcaggctgtttgaccttcgtgctgaccaggagctcatgacttactcccatgacaacatcatctgcgggatcacctctgtctccttctccaagagcgggcgcctcctccttgctgggtacgacgacttcaactgcaacgtctgggatgcactcaaagccgaccgggcagaaataacctcttacagttgtaaccattgcggctctgtccacttctcgttgctgctctgtggcacatatcggaagcagtacagcgcgcggctctacacgcttgg

SEQ ID NO: 4365 - DNA, 1209 bp, Homo sapiens
  SIMILAR (564)..(656): 1001254mologous to Rattus norvegicus G protein beta 1 subunit,accession number U34958,Smith-Waterman Score=174.
  misc_feature (1)...(1209): n = a,t,c or g
tatgaggctgggtgcaaggcctgctggattcagctcatcacttaggcctgttctttgccaggttaccacatgactagccacccaagaagttaaggctgatgtccccttgtcattcgctcctgctccagtgccctgtgggacatcgagaccggccagcagacgaccacgtttaccggacacactggagatgtcatgagcctttctcttgctcctgacaccagactgttcgtctctggtgcttgtgatgcttcagccaaactctgggatgtatattcccaatgtttctttctgagcgtttacatgatgtcttgatttgctttctctttccagttctttccaaatggcaatgcatttgccactggctcagacgacgccacctgcaggctgtttgaccttcgtgctgaccaggagctcatgaccttaactccccatgacaacatcatctgcgggatcacctctgtctcccttctccaagagcgggcgcctcctccttgctgggtacgacgacttcaactgcaacgtctgggatgcactcaaagccgaccgggcaggtgtcttggctgggtcatgacaaccgcgtcagctgcctgggcgtgactgacgatggcatggctgtggcgacagggtcctgggatagcttcctcaagatctggaactaacgccagtaggtaatgcagcagcccaaatgcccttctctgaggagaaactgtgcgtgtttctcataggaacatttgaagttgtcattaacgggtttctagatagaatgtttgatgtaggcatttgatttgggaatttgttgttgtggggaaacgttttacagaaagctgaagttcacgttgccctcagcttgcagacattcattgcagtgatgggaagagcagtgacctgggctgtgcgtctgcactttagattctctgcctcttttcacatttctttaaactctgtttaaaacagcatgtgggatgccatgggagactgggaaggaccattccaacttgggacggcgttaccatgaggaggcatatcctattcccaaccgttacttaacgtgggacacccttacacctccccttcaggaactttcaaaaggggcaagatctttttttccttcacttatttgcctggaaacccaggggcacaattcccatttgagggaaaggtctttgtggtgttaaactaaaacaatttgtggcnttcctttccggggcc

SEQ ID NO: 4366 - DNA, 1795 bp, Homo sapiens
  SIMILAR (17)..(463): 441254mologous to Homo sapiens transducin beta-1 subunit,accession number M36430,Smith-Waterman Score=197.
ctgaagatgtcataagctttctctgctcctgacaccagactgttcgtctctggtagcttgtaatgcttcagccaaactctggaatggtgggagaaggcatgtgcgggcagaccttcactggccaacgagtctgacatcaatgcccatttgcttctttccaaatggcaatgcatttgccactggctccagacgacgccacctgcagggctgtttgaccttcgtgctgaccaggagctcatgacttatccccatgacaacatcatctgcgggatcacctctgtctccttctcccaagagcgggcgcctccctcctgggatgggtacgacgaacttcaactgcaacgtctgggatgcactcaaaagccgaaccgggcaggtgttcttggctggggcatgacaacccgcgtcaacctgcctggggcgtgactgaccgatggcatggcttgtggcgacagggtcctggggatagctttcctcaagatcttgggaactaacgcccagtaggcatgttgggatgcccatgggagactgggaagaccatttccaaacttgggacgcgttaaccattgaggagcatattcctatccaaccagtactaaccgtggacaccctacacctcccctcagaacttcaaaagggcaagatctttatttccttcacttatttgctgaaaccaagagcacaattcccattggagagaaagatctctgtgctgttaaactaaaacaaattgtggcattccttgccggggccattcgtctttgttttcttttttgtcttggaatgaatttcaaaagggaaatatataataaaaatgttaaccagaaggtaaacttgagtgtaattgtcagacagagaccacttttccaccagtgtatttgaattttagaccagtgaccctggttttgtggcattcatgcaaaacatgctgagggctttgttcatctgggtcatcgtgtccaaatttcagtcatgtttgtaggccaaggattttgggaaggcatttcatatttccttttttaaaatgtattcctttgtgttcaacagttaatccaaaaccagagagtctagggcagcctctctgatgttgtcaatgatgtaaattcagtccctggtttttaattttctgtctgatgtcacagatcattgttgcacacaaacgtggcatagaaaagaacatgttcagaagccatggggccaagcacatgcggggacggtctcaaatgcgtgatcagagaatccttcacctttgctgaaaagtgagctcagatccagcaccatgttcctcctgacccatcctgtctatcttctcagttgagtttttaatctcactttgggtttccttgtgaagttggagggaagtttataatagcctaacactaccccacccccaactaggaggaacctctgttttcaagagagatgcctgtcctgtgcttggatagtcagtcaattatttgtgtatgaaacaatgtacaaatcaatgttttgaaaataatgatctcagactttctaagttaaattttaaaaattttgattgtttgccatattgggtgggtttactcttagaatcgcatgctgtagaaatgctcaaaagtgcatatgggactcagtccttaggtgttctttttcttttaagaaataacctcttacagttgtaaccattgcggctctgtccacttctcgttgctgctctgtggcacatatcggaagcagtacagcgcgcggctctacacgcttgggtagcgggataagtcactgttttctttatttctttaaaaaaaaaaaaaaaaaa

SEQ ID NO: 4367 - DNA, 672 bp, Homo sapiens
  SIMILAR (194)..(406): 491254mologous to Homo sapiens Human myelin oligodendrocyte glycoprotein gene,accession number AAZ29204,Smith-Waterman Score= 144.
gtagagtcgaggtttcactctgttggccaggctggtcttgaactcctgacctcaagtgatccgcccctgcccttggcctcccaaagtgctgggattataggctgggtatgagctaccacgcctagcctattattatttttgagacaaggtctcgctctgtcacccaggatggagagtgcagtagtgcaaccatggcttactgcagccttggcatcctgggctcaaggaatcctcctgtctcagcctcccaggaggcatgcaccaccacacctggctaattttattttttgtagaaatagggtctcactatgttgttcaggctggtcttgaactcatgagcgtaaacaatgctcctgcctcaagcttccccaaagggattacaggtgtgagccaccatgcccggccaactggtcatgttttaaatgttcaatagactcagatgactagtgaccactgaactgagcagcatggacatggaacagttccatcattgcagaaaattctttgggacaatgctactctagagtcttagaggtatttagcctcctcttctatctcagggatgttcagctccctctgctttataaaaagttcactttccagcccccagacactgaatcaaccaggtcctggtggaaaacaaccataacttggctgtagaaggggtttctt

SEQ ID NO: 4368 - DNA, 437 bp, Homo sapiens
  SIMILAR (54)..(161): 1001254mologous to Homo sapiens ribosomal protein S5,accession number U14970,Smith-Waterman Score=190.
tttcgtgcgtggtctacgccgagtgacagagacgctcatgctgtgttctcaggatgaccgagtgggagacagcagcaccagcggtggcagagaccccagacatcaagctctttgggaagtggagcaccgatgatgtgcagatcaatgacatttccctgcaggtgaggggaacttggtgattggccttcctggctgggggcggacattattccaggaaggcacacatcaaacttgttgctgtgccattaagtcaagaatagagatcataacaggtaaagaagggatcccttgaccaccacatctaccacatctgctcttacgtcctgttcaaagatgactacaacttctgtcatgagaggactccttcaccagaaggagcatcacatctcacatatggtatttttgttactgtttttgtagtaaaatacataacatcc

SEQ ID NO: 4369 - DNA, 536 bp, Homo sapiens
  SIMILAR (94)..(456): 1001254mologous to Homo sapiens Similar to ribosomal protein S9,accession number BC000802,Smith-Waterman Score=613.
ccagtggcccggagctgggtttgtcgcaaaacttatgtgaccccgcggagacccttcgagaaatctcgtctcgaccaagagctgaagctgatcggcaacgccctgctgcggcggctggtccgcattggggtgctggatgagggcaagatgaagctggattacatcctgggcctgaagatagaggatttcttagagagacgcctgcagacccaggtcttcaagctgggcttggccaagtccatccaccacgctcgcgtgctgatccgccagcgccatatcagggtccgcaagcaggtggtgaacatcccgtccttcattgtccgcctggattcccagaagcacatcgacttctctctgcgctctccctacgggggtggccgcccgggccgcgtgaagaggaagaatgccaagaagggccagggtggggctggggctggagacgacgaggaggaggattaagtccacctgtccctcctgggctgctggattgtctcgttttcctgccaaataaacaggatcagcgctttacaaaaaaa

SEQ ID NO: 4370 - DNA, 706 bp, Homo sapiens
  SIMILAR (450)..(626): 1001254mologous to Homo sapiens Similar to ribosomal protein S9,accession number BC000802,Smith-Waterman Score=307.
  misc_feature (1)...(706): n = a,t,c or g
agggtcaaattacnnctggccaagatcgcaagggccnctccgggaactgctnacgctgaatgagaaggaccacggcgtctgttcgaaggcaacgcctggctgcggcggctggtccgcattggggtgctggatgagggcaagatgaagctggattacatctgggccntgaagatagaggatttcttagagagacgcctgcagaccaggtccttcaagctgggcttggccaagtccatccaccacgctcgcgtgctgatccgccagcgccataatcagccctcggaggtgatgggtgtgaactcacccagaggggtacagattcacccttgcacacagctcaccagggagctggggcagcctcttgccccaatagcccagcgcaagggtcacttgcgcttttagccgtacaccttgtgaaggcctcttgccaggcatgtgggcagctggacagggtccgcaagcaggtggtgaacatcccgtccttcattgtccgcctggattcccagaagcacatcgacttctctctgcgctctccctacgggggtggccgcccgggccgcgtgaagaggaagaatgccaagaagggccagggtggggctggggctggagacgacgaggaggaggattaagtccacctgtccctcctgggctgctggattgtctcgttttcctgccaaataaacaggatcagcgctttacaaaaaaa

SEQ ID NO: 4371 - DNA, 743 bp, Homo sapiens
  SIMILAR (312)..(635): 521254mologous to Homo sapiens ribosomal protein S9,accession number U14971,Smith-Waterman Score=209.
ccagtggcccggagctgggtttgtcgcaaaacttatggtgacccccgcggaggacctttcgagaaaatctcgtctcgaccaagtagctgaagctgatcggcggagtatggggctccggaaccaaacgtgaggttctgaagggtcaaatttaccctggcccaagattccgcaaaggccgccccgggaaactggctgaccgcttgatgagaaggaccccacgggcgttctgttcgaaaggcaaacgcccctgctgcgggcggcctggtcccgcaattggggtgctgggatgaagggcaaaagatgaaagctggaattacatccctgggccctgaagattagaggatttctttagagagacgccttgcaagacccaggtctttcaaagcttgggcttggccaagtccatccatccaaccacgcttcgcgtgccttggatcccgccagcgccatatcagggtccgcaaagcaggtgggtgaacatcccgtccttcattgtccgccctggattcccagaaagcacatcgacttctctttgcgctctccctacgggggtggccgcccggccccgcgtgaagaggaagaatgccaagaagggccagggtggggctggggctggagacgacgaggaggaggattaagtccacctgtccctcctgggctgctggattgtctcgttttcctgccaaataaacaggatcagcgctttacaaaaaaaaaaaaaaaaaaaaaaaaaaagtcgacgc

SEQ ID NO: 4372 - DNA, 688 bp, Homo sapiens
  SIMILAR (151)..(285): 641254mologous to Homo sapiens PRO2550,accession number AF130089,Smith-Waterman Score=124.
tggtctgcattggggtcttgctctgttgcctagggtgtggagtgcggtggcatgatcatgcctcactatagccttgacctcctgggctcaagcgatcctcccacctgagtctcctgagtacctgggaccacaggcacatgctaacgcacccacttaatttttttattcgtagagccgaggtctcactatgttgcccagactggtctcaagctcttgggctcaagcagtcctcctgcctcagcctcccaaagtgccaggattacaggtgtgagccaccacacccagtccaaaaagtgattttctaattccatagtttcttctacatttcttaactggaattttgtaaggaagagttatccttattcatttatttacccatttacttgtaggagcatgtatcataaattcttaatctatggggtgtagttagctactgtaaaattgatgcacatatttttccagattcaataagtaggatccccatcaagctatcttctgaatctttaaaaatgtattctccttatttcatgggtatataattattttctggggcaacagtttgttcatgggtacatttgtctccagccctaggactcaggaaaaatgtaatttattttaatgggaggaatactatttaggaaggctggcagtctctgtgtagggaggtgttcctaggtaatagtgccct

SEQ ID NO: 4373 - DNA, 415 bp, Homo sapiens
  SIMILAR (2)..(256): 711254mologous to Homo sapiens proton-ATPase-like protein,accession number D89052,Smith-Waterman Score=283.
atggttcctgacggagacttcgcccttcatgtggtccaacctgggcattggcctatctatctccctgtctgtggttggggcagcctggggcatctatattaccggctcctccatcattggtggaggagtgaaggcccccaggatcaagaccaagaacctggccgatgctcaaaaccccagcctctttgtaaagattctcatcgtggagatctttggcagcgccattggcctctttggggtcatcgtcgcaattcttcagacctccagagtgaagatgggtgactagatgatatgtgtgggtggggccgcgcctcacttttatttattgctggttttcctgggacagctggagctgtgtcccttatcctttcagaggcttggggttcaaggccctccctgcactcccctcttgctg

SEQ ID NO: 4374 - DNA, 1098 bp, Homo sapiens
  SIMILAR (300)..(734): 441254mologous to Homo sapiens proton-ATPase-like protein,accession number D89052,Smith-Waterman Score=179.
atgacggggctagcactgctctactccggggtcttcgtggccttctgggcctgcgcgctggccgtggcttgttgggtaaacagcggaacggactgggccggcgggatctggctggagcgcttgctccctcggtcccgcctcggattcgggcttgcgggtggcgaccctgcctgcgcaggagtctgctacaccatttttgatttgggcttccgctttgatgtggcatggttcctgacggagacttcgcccttcatgtggtccaacctggggcattggcctagctatctccctgtctgtggttgggggcagcctgggggcattctatattaaccggctcctccattcatgtggtggaaggaagttgaaaggcccccagggattcaaagaccaagaacctgggtcagcatcatcttcttgtgaggctgtggccaatctacggcatcatcatgggcaattgttcattgagcaacatgactggagcctttcaagtgccacagaaccccaaggccatcggcaattcgggaactaaccatggcagggctactcccatggtttgggggctggccttcaccgtaagccttgtctaaacctcttctgtggaagtctgcgtgggcatcgtgggcacgtggggctgcccctggcaaatgcctcagaaccccacagcctctctttgtaaaagattctccatcgtggagatcttttggcaagcgccattggcactctttggggtcatcggtcgcaaattcttcaagacctccatgagtgaaagatgggtgactagatgatatgtgtggggtggggccgtgccgtcacttttatttattgctggttttccctgggaacagctggaggctgtgtcccttagcctttcagaggcttggtgttccagggccctccctgcactcccctcttgctgcgtgttgattttggaggcactgcagtccaggccgagtcctcagtgcggggagcaggctgctgctgctgacgactctgttgcagctgcgcacctgtgtcccccacctccaccctcaacccatcttcctagtgttttgtgaaataaacttggtatttgtctgggtcaaaataaaaaaaaaaaaa

SEQ ID NO: 4375 - DNA, 350 bp, Homo sapiens
  SIMILAR (2)..(319): 681254mologous to Homo sapiens RNA helicase HDB/DICE1,accession number AF141326,Smith-Waterman Score=375.
agatgaagattcccttcatagtgttccagttgcacaaatgggtaactatcaggaatatctgaagacattggcttctccactgcgagagattgatccagaccaacccaaaagactgcatacttttggcaatccgtttaaacaagataagaagggaatgatgattgatgaagcagatgagtttgtagcagggccacaaaacaaagtgaaacgtccaggggaacccaacagtcctatgtcatctaagagaaggcggaatgctactatcattcacgatggccatgaggagaagatggaaaatggtcagatcacacctgatggcttcctgtcaaaatctgctccatcagagctta

SEQ ID NO: 4376 - DNA, 1935 bp, Homo sapiens
  SIMILAR (107)..(244): 361254mologous to Homo sapiens putative tumor antigen,accession number AJ278111,Smith-Waterman Score=72.
aatctgctgaaaacgcacaagtttattgttgggacaagatgaagattcccttcatagtgttccagttgcacaaatgggtaactatcaggaatatctgaagacattggcttctccactgcgagagattgatccagaccaacccaaaagactgcatacttttggcaatccgtttaaacaagataagaagggaatgatgattgatgaagcagatgagtttgtagcagggccacaaaacaaagtgaaacgtccaggggaacccaacatgtcctatgtcatctaagagaaggcggagtatgtccctgctgttgaggaaaccacaaacaccacctacctgtaactaaccatgtgggcggaaagggaccaccctcagcctcgtggttcccatcttatccaaacctcataaaacccacccttgtacatacagatgctactatcattcacgatggccatgaggagaagatggaaaatggtcagatcacacctgatggcttcctgtcaaaatctgctccatcagagcttataaatatgacaggagatcttatgccacccaaccaagtggattctctgtctgacgacttcacaagtctcagcaaagatgggctgattcaaaaacctggtagtaacgcatttgtaggaggagccaaaaactgcagcctctccgtagatgaccaaaaagacccagtagcatctactttgggagctatgccaaatacattacaaatcactcctgctatggcacaaggaatcaatgctgatataaaacatcaattaatgaaggaagttcgaaagtttggtcgaaaatatgaaagaattttcattttgcttgaagaagtgcaaggacctctggagatgaagaaacagtttgttgaatttaccatcaaggaagccgcaaggtttaaaagacgagtcctaattcagtaccttgagaaggtactagaaaaaataaattcccaccaccttcacaacaacattagtcacatcaacagcagatcatcatgttagtgcaaagaccagtgagaaaaaaatgacaagttttctgtgctgtaggatggaacaggatattgttgaagcctcctgggaatgtttgagtccaggggaattgctttccagatgctaagaagcagcagtggggcttttggaattttatgattatctggcagtgaaagctgggcttttgccttaataattttrrrakkgtatggaattgttttgttttgttttcctcaattgtgggaagcttgatgtttataattcacaggctaaattcggtaaacaccactscccctacckcgggtaatgagaggtcactcacttgaactttgccattccagacattctcagagtggcgaggggccacctgcaagtggagcacaacttggtgctctttactgtgtccttcagaaagaataggtgtacagaaaggaaatgggcaatcttatgtgtgctggaacaaagtttttcaacaattcctagttgtgcctttttaaaccatggcaatatttcagggatagtttgaatccaaagaagtaagaagctgcctatttggggtaaccttatttcctctgtgggaaggggcagggagagtcacccaaacaatcctacctccaactctcttctcttttgtcgtagagacattacaaagtgcacttgaggctgcccccccaccctctgacatttgttcttgcatgtgatgatagaaagtccttcagatggacttatacattcctgtgctttggaagcgacaagaagaacaaaatatgtgtatatttcctttaatgtttatacaaaagtttatatggagcagtattgttatgtttgtatgaatttgcaaaaattaaagtgtacaaagaagattttgattttgcagtatataaaataaatcattttattgattttcacaagttcattaatgctggataaatttctacttaaaaa

SEQ ID NO: 4377 - DNA, 2078 bp, Homo sapiens
  SIMILAR (471)..(644): 741254mologous to Homo sapiens PRO2550,accession number AF130089,Smith-Waterman Score=214.
  misc_feature (1)...(2078): n = a,t,c or g
aacccttttattcccaaattggtaaagaataaataatataatttacaatatggtacaaaaaataaccaggaaaggcaggcattctgctttatacatacactgtatatgcatatttataatctataaaacaaattcatatctgaaacgagcggaggcctcgctatggcttaaccgagtaagagagaaaaggggagcggggcgcgggaggcaaggccaggggctgggctccccacacctcacccaccccaaggacacgcagccactgtgacatcaggagagcgctgacagccgcgaagggtgtgctgtgggtttttttccttcgttgtaaattactctttccttgctttctttttttaacttgagacccagtttcgctcttcttgcccaggctggagtgcactggcgcgatctcgactcactgcaacctccgccgctgaggttcaagtgattctcctacctcaagtctcctcagtagctgggattatgggcatgcgccaccacgcccggctaattctgtacttttagtagagacagggtctctccatgttagtcagggtggtctcatactccccacctcaggtgatccgcccgcctcggcctcccaaagtgctgggattacaggcgtgacgaactgcgcccggcctccttccttgttttcttaagacaaaagtgctgtatttcctgacaaatgcatcggctagagctcaaggtttaaagagaaaacacaactgtcttcctcctccctcattcccggtgtcttatgccccacaactttctttgcagaagaaattttgaattcaatgctgtgatctaattaaagatgctattaaactaaaaaggttatccaccagaaatgaggccacggcctctcatgcccagaacctggaggtgcggcaaagcaaggaggccaaccgcggaaacgccgccaacaccccactccctgagctggcaccctacagctacaagacacagaaggacaaaacagccaggaagccacgaactaggcatcccccaaggcacgcaatgcccgcttatcactgcacatccacaacagaattgaggccagaggactaacttccctggaccacagatgctctgtcccaatctccagaaaagtcgaatcaacagaaagatcccaggcaacgtcagagggattcaggaaagctttttctaagaaactgatctcatcttaattacagcatgctcaaatgcaccaaaggaaagccacaggctcatacttagacgatcaccgcttctgttggaaaggcagaagatgcagggaagtctctgtttggatcttttgaaaattccagcctttaacagttgcctatgtttgcacataaatattcatttaggccagaagaaaatgtatccattgtttttctgcaacaaatgacaccattttcccttaatgtggcaagcaaatgccgtatcacctgtcctagttactagagaagcagaaccctcctagaactcttgtcagctttattacaggagaaggaggtaggcccgtccttcttccttaacccatctcccccnactggatggcaaatggcctgcagttggctgctcccccaggaatcctacgctggagaacccaagtggtaaggtgctgtcctaaagagcctacgaaagccagactctgacctcccaaaacttcaccccactgagttgtcaggggctaacaggtaccctgacaggcagttcacaaaccctcctgtcccctggcaacagtgcacacagctcagtgctgttgggacttggcatctctggtctaagcctgtgggagtatgagaaagctaagcagtggcctgaactcggcctggtatcctaaccctctagagacgcagcaaagccagatgcccagagggagatctccttgtcttctctggctcaatgagatgctaattttggaagctggtatacgtagcacaaaacacaagctagtgtaaagatgctgtagttcaaacactgctgtctctctcctaatcaagtggcatgtttcttttttcacccctaagaggtttgggactgtttgcttaagatctcatgtcaatgtctgaaggagggaagccagc

SEQ ID NO: 4378 - DNA, 1431 bp, Homo sapiens
ttttttttttttttttttaactgttacataaacktacgtkatktaaataaaaccaggaaagacccgtttcccccttacacaccagcacatgggcacacgcacacccacaccctccctccctttcggctgtctgcccatggccacctcaaaccccgaggttctcattgtgaccaacctccctcaacctgtagaccccccgtgcagagtccagttgcccacgcatcccaggttgctggcagaacatgggcctagaaaagagcactccatcttcctgggggtggggtcaaaaggaagggaactggttctcccaaggcacccagatctgggtgtgggcttccctacaaacttgggagcactgccagggcagctgggagctgctcccctgcggagggccagaaactttttcaccccaaggccaacccctccctgttaacaaagggaagttaaggagggttgggcagccaagcttccagtgtgccccgagggattcctgcagtaggtattttcagtttggggaagagcaagggagagcaattgagcaccaaattccctaaccccgtcctgcaggagggtgctgagtcagttcagcatctctctacccagaaaaagtaaacacaactgtgcagcaagagtgagggtgggaatgacaggggcctaagccttcaggacctcatgaacttcacccccaacatgggccctcttagggacccactagcaccttggcaatgttgaggacccagcccagcggaaacaccatacccacaggagccagtctgaagttggtgatgctccctatgttgacagtggggttgggtttctctccctgacaccagcttcctgcaggccctgtaagttctgctttggggcacacatcgcagagtgcctcaggtcatgaaagggaatgctgaagggaaaggtggtgtcttccggaggcacacagtacatcttacaggttacacacgggcaggctggagcaggacggggggcagggctcagcagcatacctagggtaccctccaaagttgccttgggaaggggggcggggctggaaaccaacgggaggggtgactgtccaatcccctccgacgggagtactcaggcccagcacccattttctctgatgagcttcccagtgccttctagaccaagttccctgagggaaaaagccaaacagatggaaagagagggagcagaaagggaaagcaaagggtcaatgccctgcagatcgtgatgagctggcaggcagaggcagacagagcgccgagggcgagccttctgaatgggtaaggcaaagagagccgcctgctgaggggaagggggaggctctgagaacgccagggcaggcacagaggactcgaacacagctggcctctcccagggaagcactggagaaggggaccttcgggaagacgaggccccagaggagagggc

SEQ ID NO: 4379 - DNA, 745 bp, Homo sapiens
  SIMILAR (138)..(716): 841254mologous to Mus musculus putative,accession number AK002235,Smith-Waterman Score=807.
  misc_feature (1)...(745): n = a,t,c or g
actgaaacccctgaagaacatctgaccagncnggnggaattcaccagggcggcgcgtggtctacgccgagtgacagagacgctcaggctgtgttcttaggatgaccgagtgggagacagcagcaccagcgttggcatgagaccccagacatcaagctctttgggaagtggagcaccgatgatgtgcagatcaatgacatttccctgcaggattacattgcagtgaaggagaagtatgccaagtacctgcctcacagtgcagggcggtatgccgccaaacgcttccgcaaagctcagtgtcccattgtggagcgcctcactaactccatgatgatgcacggccgcaacaacgggcaagaagctcatgactgtgcgcatcgtcaagcatgccttcgagatcataacacctgctcacaggcgaaaaaccttttggaggtccgggggaccgccatcatcaacagtggtccccgggaggactccacacgcattgggcgcgccgggactgtgagacgacaggctgtggatgtgtcccccctgcgccgtgtgaaccaggccatctggctgctgtgcacaggcgctcgtgaggctgccttccggaacattaagaccattgctgagtgcctggcagatgagctcatcaatgctgccaagggctcctcgaactcctatgccattaanaaaaaagacgagctggagcgtgtggccaagtccaaccgctgattntcccagctgctgcccaatatacg

SEQ ID NO: 4380 - DNA, 386 bp, Homo sapiens
cccacgcgtccgctcccttaaatcctcaaaaagacttaagatggaattaatagattcaattcaagtcccagatattggaggggttcaataaggttttaaatatttaaagtgtgttctgtgtaaattatttgaattttcctgaaatctagaccctttgcaaaaggacctatttgcatcttgtcccctctgaaaatggtgttcagtggattgcgtgtgttctgttataggttcactactgtgatagacaaagtggcaaagagtgtgtgacctgtctgacattagcccctgtgcagatgactttccatgctattggaagctccattgaagccagccatgatcaggcagccttaagtgccttgaaacaattttctgaacaaggactggat

SEQ ID NO: 4381 - DNA, 318 bp, Homo sapiens
atgggcccagggaaagggagacaggcaggacagcgacggcagtggaaccagacagctgtgaggaaaggacatacagcaatgacaccaagaggtggtgctcaagtcaccctggaggaaatggaggtgtcccagagaggcagcatttggggtgagccacagggagctggggcgcaaagccactcagattggctgcagccaccagggcgagtgggaatccaggacaccgcagccttaagtgccttgaaacaattttctgaacaaggactggatccaatcgatggagcaatgaatatcgaaaaaggttctcttgaaaagtga

SEQ ID NO: 4382 - DNA, 2402 bp, Homo sapiens
  SIMILAR (400)..(630): 961254mologous to Homo sapiens 39k3 protein,accession number Y19062,Smith-Waterman Score=376.
ggaatgaattttttggggaaggaaagactttacaagctgctagacactttgctgcaatgaaagccctccaagcactgcagaatgaacctattccagaaagatctcctcagaatggtgaatcaggaaaggatatggatgatgacaaagatgcaaataagtctgagatcagcttagtgtttgaaattgctctgaagcgaaatatgcctgtcagttttgaggttattaaagaaagtggaccaccacatatgaaaagctttgttactcgagtgtcagtaggagagttctctgcagaaggagaaggaaatagcaaaaaactctccaagaagcgcgctgcgaccaccgtcttacaggagcttaaaaaacttccacctcttcctgtggtggaaaagccaaaactatttttttaaaaaacgccctaaaacaatagtaaaggccggaccagaatatggccaagggatgaaccctattagccgcctggcgcaaattcaacaggccaaaaaggaaaaggagccggattatgttttgctttcagaaagaggaatgccctgacgtcgagaatttgtgatgcaggtgaaggtaggcaatgaagttgctacaggaacaggacctaataaaaaggccaaaaaaaaaaaaaagtgttgcagtagcaatgctattacaacttggttataaagcatccattaatcttcaggatcaacttgagaagacaggggaaaacaaaggatggagtgatccaacgcctgggtttcctgaaccaacaaataatactccaaaaggaattcttcatttgtctcctgatgtttatcaagagatggaagccagccaccacaaagtaacctctggcactactctaggctatttgtcacccagagatatgaaccaaccttcaagctcttttcttcagtatatctcccacatcgtatagttcagtctacattcgccaggcatctccttatgaatggaacatcttctacagctgaagccataggtttaaaaggaagttctcctactcccccttgttcctccagtacaaccttcaaaacaacttggaatatttagcaagggattcaaggctttcagggttcactactgtgatagacaaaagtggcaaagagtgtgtgacctgtctgacattagcccctgtgcagatggactttccatgctattggaagctccattgaagccagccatgatcaggcagccttaagtgccttgaaacaattttctgaacaaggactggatccaatcgatggatcaatgaatatcgaaaaagggtctcttgaaaaacaagccaagcatctgataaagaaagtggaccataaccaggcacccccgggctccatcgctcacgactgcaagatatcaaactcggccgtctagcagctcccagaacccgcggctgccaccgcatccttataaacctgtcagcacgcatgagggtgtctgtgttcagggaaatgaatgactaataccattatttgagtcttatgtgaagacaacactattctaacacgagagataatatacatggtactgtttattcaactggggaaaaataaaactttgagcatttcccttggaactcgagatcagatcataactcatttgcctagaggcagcagaaatctgatcctgctactggagcttaaaataacaagtaaagaaaagtgttagaaacaaagctaaaattttaacatgattaataatagagaagttgggtttggttctgttgttatgattgttttgtcgtggtgcttgtgttcagttatattctctctctctctcatttcaaatactgcttgacaattcgaaaatgaaccaatgatgtgctgtggaatgtgatggttgtcttcatatagagtcacatggtttctctttttatgcagatatttataatcttcatcctatatcagtaggaataactataaggtgcactacaaaaagatgtatgcaaacaaacatgttttaaatcaggtcagatatctgatgaaaaatacgaactaatgttaagagcaagtagtttcaacatactccaggaactgagaaacaaaacaaagcaattgtgggttttgagctcccatatactcttagcaaagtaaggggccgtcttgcccctatatatcatcttccccggattccactccctgttgtgggaatcgcgcccacccccatccgtgtgttgtagccactcacggtttgcatcaagagtgttttttgtaactgcctctggacttgggacagtgagtaggatcaaaaataaataatgtacatgacggggaagggaaaaacctgttggagttgcttccagccagccacgctccgggccaagcatgttggaatcccagcgtggagcagatgcagtaaaaatgtggttggttttctgtgtgaaaaaaaaaaaaaaa

SEQ ID NO: 4383 - DNA, 1024 bp, Homo sapiens
  misc_feature (1)...(1024): n = a,t,c or g
ttttgaagttcaacatctttaatcagaaaaatgcaaatcaaaaccacgagatatcaaaatatacccaatagaatggctaaaattaaaaacgctgacaataccaagctttgtcaagaattcttacaaattactggtgggagtataggcatttgcacaagtgaaaatatgttcacaaaaagacttgtaatttcatgcttatagcagctttattcataaaattcctcaaatggaaaaaattcaaacattcatcaacaggtgaatagataatcaaattgtaagataggcatatgacagaatactactaggcaataaaaaaggcacaagctacagatcgcatgcaacatgagtgaatcttcaaaacaaagaaataatgcatgccgagattgtctttctgaagaaattcccctcattctttgggatcccgaggttctcaaaggcatagctggcaacaggccctgaaacagcttcttctggactaccctactagtcttggtagatttcctcgatctttggcattccttcttttcttccatggtcttcatttactggctggtccttcttgcctatcttgaattattctatactattatgaggagaacacaggttcttccatcctggaacttcagttctaagccatgctgggccaatatatacattgagccagactgtgtgcacactggtagttccaaggtgccacaatcttcaaaacatttgaggagnnnnnnnnnnnnnnnnnnnnnnnnnnnnnnnnnnnnnnnnnnnnnnnnnnnnnnnnnnnnnnnnnnnnnnnnnnnnnnnnnnnnnnnnnnnnnnnnnnnnnnnnnnnnggaaacttgcaatcgtggcagaaggggaaacaagcacgtccttcttcgcatgatggcagtaataagtgttgagcaaaagggggaaaagccccttatacaactaacaggacttgtgagaactcagtatcatgagaacagcagtgtgggggtaaccannnnnnnnnnnnnnnnnnnnnnnnnnnnnnnnnnnnnnnaac

SEQ ID NO: 4384 - DNA, 1975 bp, Homo sapiens
  SIMILAR (429)..(692): 861254mologous to Homo sapiens LCA (AA -23 to 1281),accession number Y00638,Smith-Waterman Score=420.
ctggagaacccttgatatacatcatacgacatgtcatattctaaggcactgatagcatttctggcatttctgattattgtgacatcaataagccttgcttgtggttctcaccaacatctatgatctacatagaaagagatcctgcaatgtagatgaacagcaagagcttgttgaaaggtatgatgaaagcaacctgatgaatgtgcagccaatccatgcagatattatgttggagacttatcataggaggattgctagatgaaggaagacttttttctggctgaatttcagagcatcccgcgggtgttcagcaagtttcctataaaggaagctcgaaagactcactaaccagaataaaaaccggtatgttgacattcttccttatgattataaccgtgttgaactctctgagataaacggagatgcagggtcaaactacattaaatgccagctatattgatggtttcaaagaacccaggaaatacattgctgcacaaggtcccagggatgaaactgttgatgatttctggaggatgatttgggaacagaaagccacagttattgtcatggtcactcgatgtgaagaaggaaacaggaacaagtgtgcagaatactggccgtcaatggaagagggcactcgggcttttggagagtgttgttgtaaagatctaaccaagcacaaaagatgtcctagattacatcattcagaaattgaacattgtaaataaaaaagaaaaagcaactggaagagaggtgactcacattcagttcaccagctggccagaccacggggtgcctgaggatcctcacttgctcctcaaactgagaaggagagtgaatgccttcagcaatttcttcagtggtcccattgtggtgcactgcagtgctggtgttgggcgcacaggaacctatatcggaattgatgccatgctagaaggcctggaagccgagaacaaagtggatgtttatggttatgttgtcaagctaaggcgacagagatgcctgatggttcaagtagaggtatgttctaacctttagtgattattctcactttggttttttggacttaaatcttttccaagtgataataatgatattttttaaaaatccaaattcttcacaacctcaaacagtagatgatttcctgaaaactaaaacgtggtaatcaccagaaatacttagaagcatttttcattagtgcctaaaagtactgtggaagaaagatgaccacaaaatatataatttttaaaataatgaactactgttaacatatatcagattggcaaaaaaagtaaaaatgctgaaaatagatttggcatcatctcataaaattaaactgaagagacagaatagtatagtaatcaacagctggttttagaaactacacttacaggtttcaaatcttgcttttaattattaatacgagggtgagtggtattgtttattaagtaattttagtctgactgcacctcagttaagtcatctgtaaaatggagacaatgataatacctcacagacttataaccacaaaagtaatacaaataaagcacttaaacaagtccctggcccatgctatgcatttggtgattgtaagtgatggtaattactgaaaatgtctgtatttgacccagcaaaatcacatatatgcatatacccaagagaagcatcaactagaaacatttgcaagaatgtgcattgcattcagcattgtccaaatagcccaaaaaaaaaaaaaaaaaaaaaaaaaaagtgaaatacatatcaatgaaagaatggaaacaccgtaaatatgtatcaataggggaataggaagacaaaatgtggacatgtgaactctctgtacaacaaatgctatgttgtggtagaaagcaatgatctaggtttgtgtctgtctgtttggagagatgctcagatgaaaacaatgagtgagtaaagctgccatacgaaacattcaagatataatttatgtgattta

SEQ ID NO: 4385 - DNA, 1323 bp, Homo sapiens
  SIMILAR (700)..(738): 531254mologous to Rattus norvegicus putative RNA binding protein 1,accession number U87607,Smith-Waterman Score=41.
atggaagattcgaggaaggcccagaagagggatactaaaattgaaagggaagagcagctctactggccatctagaaaaagcagagggaaaagcaaaggggacttggtattgcacactacatacaagcccagccatagtgggggtagagcagtaagtgggctcttcggttctccgattccaagtcttggctcttggacagcatttttagacccaccctgggccagagtagagcccattgccctgaagggtttgacccagcgcagtcctaatggtggtggacacagggtgtgctttgtcataccaccagcacctccagatggctcagaacagaaaaagagactctgttcattcagaagaaaagaacagtctctgcctggtaatctagagaattcttttggatcttgtccaagactatcaaggcagtacgtctatgagtctgcaagaaccacagcattaatgagattggggtgccctctaaagcagatacagcttatatcacaagacctaagtcctttcgaatatcgggaaagccttcccatgaaggacaagcaaaacaaacaccaaagaatatctttaagcatcaacaccatccaagaaactataatctctccaaatgaactaagtaagtcaccagggaccaattctggagaaacggagatacatgacctttcagatagagaattcaaaatagctgtgttgaggacactcaaagaaattcaagataacacagagaaggaattcataattgtatcagataaatttaacaaagagaattgaaataattaaaaagaatcaagcagaaattctggagctgagaaatgcaattggcatacagaagaatgcatcacagtcttttaatagcagaaatggtcgagaggaagaaataattagtgagcttgaaaacaggctatttgaaaatacacagaggagacaaaacaaaagaataaaaaacaataaagcatgcctgcaggatctagaatataggcttaaaagggcaaatctaagagttattggccttaaagaggaggtagagaaagcaataggggtagaaagtttattcaaagggataataacagagaacttcccaagcctagaacaagatatcaatatccaagtacaagaaggttatggaacaccaagtagatttaatccaaagaagactacctcaaggcatttaatagtcaaactcccaaagatcagagataaagaaaggatcctaaaagtaacaagagaaaataaacaagtaacatagaatggaactcatatatgtctggcagcagacttttcagtggtagccttataggccaggagagagtggcatga

SEQ ID NO: 4386 - DNA, 2755 bp, Homo sapiens
  SIMILAR (3)..(923): 751254mologous to Rattus norvegicus MEGF6,accession number AB011532,Smith-Waterman Score=1503.
ctggctccggctgcgagcagggatgtccgcccgggcggtatgggccaggctgtgaacagctgtgtgggtgtctcaacgggggctcctgtgatgcggccacgggggcctgccgctgccccactgggttcctcgggacggactgcaacctcacctgtccgcagggccgcttcggccccaactgcacccacgtgtgtgggtgtgggcagggggcggcctgcgaccctgtgaccggcacctgcctctgccccccggggagagccggcgtccgctgtgagcgaggctgcccccagaaccggtttggcgtgggctgcgagcacacctgctcctgcagaaatgggggcctgtgccacgccagcaacggcagctgctcctgtggcctgggctggacggggcggcactgtgagctggcctgtccccctgggcgctacggagctgcctgccatctggagtgctcctgccacaacaacagcacgtgtgagcctgccacgggcacctgccgctgcggccccggcttctatggccaggcctgcgagcacccctgtccccctggcttccacggggctggctgccaggggttgtgccggtgtcaacatggagccccctgcgaccccatcagtggccgatgcctctgccctgccggcttccacggccacttctgtgagagggggtgtgagccaggttcatttggagagggctgccaccagcgctgtgactgtgacgggggggcaccctgtgaccctgtcaccggactctgcctttgcccaccagggcgctcaggagccacctgtaacctggattgcagaaggggccagtttgggcccagctgcaccctgcactgtgactgcgggggtggggctgactgcgaccctgtcagtgggcagtgtcactgtgtggatggctacatggggcccacgtgccgggaaggtgggcccctccggctccccgagaacccgtccttagcccagggctcagcgggcacactgtccgcctccagcagacccacatcccggagcggtggaccagcgaggcactagtagaggcagtcccgtggagcccgcctctccagtcccagccagaggggaccctggcctttggtgaccactgagaaggacacttcacgggcccagagctcctggtactgcccttcctttgagggccgtggagggctgtggacagcccagcaacctgtcgctcttggaggctggtgtggccttgaggagggaagcctcgcatggccagctggaagagaggcgcctcctggcctggctctgcagaacccaaggggcacgctctgggcctgggctgaggaagtcccgctctccccgcggctctgagttggactgaggacacggtgtgggcgccagtgtgggtgcaggcgcaggtgcaggcacagggccactgtcctccaggcaggctttttgggtgctaggccctgggactggaagtcgcccagcccgtatttatgtaaaggtatttatgggccactgcacatgcccgctgcagccctgggatcagctggaagctcactagtcatctcctgcccaactccccagaaaccctgattcaggtctgcaggctcctgcgggctcaccacggctgctggctccggtaccatgtaaacctaggaaggtaaaggagcaggcaacctcctcgtggcctgtgtgtttgctgtgttacgtggactctgtgtgggctcctccctggggcccggccagcataacggtgcacccagggacctcccagtgcacccggggccctttgcaggggtgggggtgccacacaagtgaagaagttgggactcatctcagttcccagtgctattgaagagaacgctggggctgcattcattaccgctgagacccagagactggctgttcccagagaatggcccagggggaggagggctggtgtggaggggcaacctggactgaggccgaactcccttgggctcaccccacccacccctacctgagcatcagcagtggggggagggcagcatcgcaggggcagggactccctgggtgaggacagaccagccctcccgagcacctggcactcatgggctgaggctgacttctcctggaagaagggcccagagtggaaggaagaggcagagggtagaggtggtggctgggggctcctctgcagagtggggtggccaatggagagggctgcactcacaccgcaacataggactctctctcccttaagaaggcccccttagggtctgggctgccgcccccatcaccctaaaaccagccaaggtagctgaggccccagggcagacaatttcaccagcaggaggaggaggagtccagtgagcttggttgctcacagacagcaagggagctgtcacagaggaagcttgatgaatggaccgctgtggggagactttaaagtagaacagtgataagggagggcaggatggtggggatgcaaaagcagcagccagagagagacgggacttggggtgcagacggagtgtggaaaacgcataccttgaaatgaagcatccagcagatggggtgagtggatacagctcaggagattctcccaggaatagcagggaggcgtaaagagagacaacgtacagagatagatgaatggaaatgggtaagggaggtgttcattcacatccatctaactgcaaaatacaaaagtaagaagtcattgacatgaagcaacgacgaccaagacgttctcagatctaaaggtgaatgatctcagtcagcctggaaatgcacaaggtggaaaa

SEQ ID NO: 4387 - DNA, 1054 bp, Homo sapiens
attcggcacgacggtgagagactgcagaaggtatgaataccaggaaacagataactcagaagcatctgggaaatttgccatggaattaatgaagaaaagccctcagcacatcatccttctactctaatcaatatgaaatagcattcagtaactcctattaattcactctgaagagaaaccttttgaggacaatctgtatggtaaagctctcagctcgaattctcaccttcatgggcccagaagattatgtactgagagaatcctgaagaatggaacagctgtagaaagccttcagtgctatcagcagggattcatgtgacagctcacactaagggagaaaacctgtgaaggtctcagaaggcttcagtgacagtcatcccttaagacacactggaaatcacacaatggaacaacactcagaaatgcggaataccctgcagcaaaagtgttcacattactgagcaaactatagtgtggtattctgcagttgactatgggaaagccttgaatgttctatcggtttttaaggggacttgagaattaattctggagagaatgccccatttgaacatcatcaatattggagagctttctggttttctacatttgttaaggaaacttgtgaagcattcacactacagagaaacttggaaattttaagaagaagagaaagccttcagtgatgcctctgtgttagggaaaatatggaacttctccctggatgcaaaacctatgagtatattaatattggaaaatttttcagtgattcttctctttcttgtatatgagagaacttacatggagaaacccctaggaatgtaatcagtgttaggatgcctcagcctgaactcttcactgagtggccacaattttcacttggaaccaaaaagtataatcactgttttgagtgtgggatatcctttatccagtgtctcatctgtagattggactgctggctcattaatttttttagtctttttttcttttaatataaacatttgtgtatagctgttccctacaataaacattaacatatttcataaaaaaaaaaaaa

SEQ ID NO: 4388 - DNA, 429 bp, Homo sapiens
  misc_feature (1)...(429): n = a,t,c or g
gaaatagaggatctgaactaaaccataacccagttataccttacttaacatctatacagaacacttcaccgaacacctcctgcatacaaattcttctcaagtgtacatgaaacattctctaggatagaccatgatgttagagcacaaaacaagcctaaatgagttttaaaggttaaagtaatataaagtacctcctnnnnnnnnnnnnnnnnnnnnnnnnnnnnnnnnnnnnnnnnnnnnnnnnnnnnnnnnnnnnnnnnnnnnnnnnnnnnnnnnnnnnnnnnnnnnnnnnnnnnnnnnnnnnnnnnnnnnnnnnnnnnnnnnnnnnnnnnnnnnnnnnnnnnnnnnnnnnnnnnnnnnnnnnnnnnnnnnnnnnnnnnnnnnnnnnnnnnnnnnnnnnnnnnnnnnnnnnnnnnnnnnnnnnnnnnn

SEQ ID NO: 4389 - DNA, 565 bp, Homo sapiens
ccagctcaagtcaacatcctgggctgttaacccgcgataaggtcggacggggcctcagtggagaatacgtggggaagttctctggggcgggcgcagtctgctgctgattctgagaaaccgaaactcagctgttaaaaccgctgcctctgcactttggaatcccatctggagactcgctaagcgtgccagccgcatccctcccgcagcgacggcggcccgggacccgcgggctgtgaaccatgaacacccgcaatagagtggtgaactccgggctcggcgcctcccctgcctcccgcccgacccgggattccccaggacccttctgggcggcaaggggagctgagccccgtgggaagaccagagagagggtttggaggcagcccctaagggcccttcgcgggagagcgtcgtgcacgcgggccagaggcggtgagtattttaacaacctggcttcggggcgggagcccgggccccaaacatactcactcacaagcaccttggtccttggagtttaaaaccacaggggcccaacaacagggattttgactgaatgaaagctcatttg

SEQ ID NO: 4390 - DNA, 429 bp, Homo sapiens
cctcccccacctccattcccactaatcccggattagggctgacactccaagcccgctctcgcctggacagctacagcttagtgctccccctcctgcctctgccttgtcctgatatcactctgtcctacccagggaggagaccagttcttggcctgtcgcttatggattgagaagacactggtaataacttaatcatgtccagcattctgtctgaaaagtggaattttctgtccaattgagacaataactcctcccattccaagttttaccccacctttgtattttaagatggaaagaaaccctaaactcttctaacccagccccttctccaaaaggggagactgaggcccgggaactggaggaatttgcccaggtctgcgcattggtggctgcaagctggtccctggggggaagcaagatcaacttggg

SEQ ID NO: 4391 - DNA, 1196 bp, Homo sapiens
  SIMILAR (9)..(284): 551254mologous to Homo sapiens Human myelin oligodendrocyte glycoprotein gene,accession number AAZ29204,Smith-Waterman Score= 207.
gagatagggttgcctataatggagtgcagtagcttgaccatagctcactgtagcctcaacctcccaggcacaagcaatcctcctgcctcagcctccaagtagctgggactacaggtgcatgccaccacgcccgacttatttttttttcctttttttttttttttttaatagaaacagggtttcaccatgttgcccaggctggtctcaaactcctggactcaggcgattcaccagcctcagcctcccacagtgctggggttacaggagtgagccaccatgcccagttaaaaatacactttttatttaaaaaaaaaaagagaacactcctttatatttcctttatatttttgaaaactacataccccaaaataaagcatatcaaaaactgtaaaaaaaaaaaaaaaaaaaccctaatatcagatattccagacacaacaataccataatttaatcacttaaaatcttactcaaaactaaatcaatgatcttttaggccaggtgtggtggctcatgatagtaatcacagtactttgggaggccaaggcaggaggatcacctgaggtcaggagttcaagaccagcatggccaacacaatgaaaatccatctctactaaaaatacaaaaattagccaggctaatggcacactcctgtaataccagctacttaggaggctgaggcaggagaatcgcttgaacctgggaggcaaaggttgcagtgagccgagatcatgccactgcactccaggctggacaacagagcaagactccgcatcaaaaaaaaaaaaaagatattttaatatattcagatacacaaatatgaaataaaactaagtagagctggtattcatttacacataattatcttataccgtttggaataagaatttggggcacgttagcaaaccaaaaggctcagaaagacgtcgtgatatttagttcttgtctccctctacaaatgtgaagcactcttctatccggcattcttaagtggagttcctattttcaaatttgcaaaccattctggtgctaagcaatctcaaaaaaaccatttattaaaacccaaaggaaaaaaattctaataccttggggaggttgaagccaaaatggatccacttaagttccaaggaagccttgaagacccaggctgtggccaaccaataattaaaccccctttttttttaaaattccaaaaattg

SEQ ID NO: 4392 - DNA, 397 bp, Homo sapiens
  SIMILAR (148)..(354): 981254mologous to Mus musculus putative,accession number AK002491,Smith-Waterman Score=345.
ggggagccgccgggttgagcctatccgctgcggggagggcgggacttcctgcgcgggggcccgagccgctcagtctccctgctctccgtggtcccggctcgcgtgtagcggcggcggcggcgtctccgtgaggaggcgcgcggggccatgacgtcagcgtccacaaaggtcggagagatcttctcggcggccggcgccgccttcacgaagctcggggagctgacgatgcagctgcatcccgtggccgactcttctcctgcgggcgcgaagtggacggagacggaaatagagatgctgagggctgctgtgaagcgatttggggacgatcttaatcacatcagctgtgtcatcaagggcccagataaaggccactgtgaaacgcaaggtatatgaagat

SEQ ID NO: 4393 - DNA, 338 bp, Homo sapiens
agtctcatcttctctgattctctctcttctatctcgggtactaacacactggcagcctttctgagctggatgctcccttacatcccttggatactccaagcacgccctgccttgggccttctgcacttgctattggctgcctgcaatgtcgttggccagtcagccacatgacccagtccctcacttcctttgggtctttgctcaagctcacattctcagtgaggccttttctgacctccagtgtttaaaatctcaccccttatcacagacaaccccaacccctttgaccttcatctgatggacatttttatacagaaaacaataaagatttccctctc

SEQ ID NO: 4394 - DNA, 466 bp, Homo sapiens
  SIMILAR (3)..(167): 871254mologous to Mus musculus putative,accession number AK002491,Smith-Waterman Score=238.
ccactgtgaaacgcaaggtatatgaagattctggcatcccccttccagctgagtcacccaagaaagggcccaagaaggtggcatctggtgtcttgtcacctcctccagctgcccctcctcccagcagctccagtgtccctgaggccgggggtcccccccataaagaaacagaaggctgacagcctgaccctggattctggccttctcatgacctctgctgatcctcctctcctctcctgctgagccttccacctctgacctctcactgttcatgccggacctgtggatctcctgggactccgagcaaggcctgcacgagagagggctgaaaggctgctggggctgccacctcgctattcccgcataagcatctgcccccaacccctttgaccttcatctgatggacatttttatacagaaaacaataaagatttccctctcaaaaaataaaaaaaaaaaagttttg

SEQ ID NO: 4395 - DNA, 925 bp, Homo sapiens
  SIMILAR (88)..(543): 731254mologous to Mus musculus putative,accession number AK002491,Smith-Waterman Score=490.
  misc_feature (1)...(925): n = a,t,c or g
cgagccgctcagtctccctgctctccgtggtcccggctcgcgtgtagcggcggcggcggcgtcatccgtgaggaggcgcgcggggccatgacgtcagcgtccacaaaggtcggagagatcttctcggcggccggcgccgccttcacgaagctcggggagctgacgatgcagctgcatcccgtggccgactcttctcctgcgggcgcgaagtggacggagacggaaatagagatgctgagggctgctgtgaagcgatttggggacgatcttaatcacatcagctgtgtcatcaaggaacggacagtggcccagataaaggccactgttgaaacgcaaggtatattgaagatttttgggcatccccctttccagcttgagtcacccaagaaagggcccaagaaggtgggcatctggtgtttttgttcacctcctccagctggcccctcctcccaagcagctcccagtgttccctgagggccgggggtccccccccataaaagaaacagaaaggctgatgtgacacttcaggtgctcttgaacgacctccgatggccaacagtgacgtgggtggatatttgaagggcttaggagaaactccctccagcttaagaaattcaactttcggaccaggacagcctgacccctggattctgggccttcttcatggacctctgctgatcctcctctccgtctcctgctgagccttccacctctgacctctcactgttcatgccggacctgtggatctcctggggactccgagcaagngcctgcacgagagaggggctgaaagggctgctgggggctgccaacctcgctattcccggcataagcatctgcccccaacccctttgaccttcatctgatggacatttttatacagaaaacaataaagatttccctctcagcaaaaaaaaaaaaaaaa

SEQ ID NO: 4396 - DNA, 1316 bp, Homo sapiens
  SIMILAR (140)..(343): 551254mologous to Homo sapiens cingulin,accession number AF263462,Smith-Waterman Score=154.
ggtgcgaaattccagagaacaagaagcgttcccaggacgacagggcccgggcagctgaagtgtctcgaggataaagtctcacggctggaaacagagttagatgaggagaagaacaccgtggagctgctaacagatcgggttgaatcgtggccgggaccaggtggatcagctgaggacagagctcatgcaggaaaggtctgctccggcaggacctggaagtgtgacaaaatctccttggagagacagaacaaggacctgaagacccggttggccagctcagaaggcttccagaaagcctagtgccagcctctctcagcttgagtcccagaatcagttgttgcagggagcggctaccggctgaacagagggtgaagaccgttctgcggtctaccaatcgaaaactggagcggaaagttaactaactatccctccagattgaagacgaacgtcatcatgtgagtgacacaaacagaccagctaagcctgagggtgaaggctttgaagcgtcaggtgggatgaagcaaaagaggaaattgagcgactggacggcctgagggaagaaggcccagcgtgaggtggaggagcagcatgaggtcaatgaacagctccaggcccggatcaagtctctggagaaggactcctggcgcaaagcttcccgctcagctgctgagtcagctctcaaaaacgaagggctgagctcagatgaggaattcgacagtgtctacgatccctcgtccattgcatcactgcttacggagagcaacctacagaccagctcctgttagctcgtggtcctcaaggactcagaaacacaggctcgaggcctatcgccagcaagtgctgctctgctctgcccaccctgggttctggattccttgaggaccacgagctaacaggagctggtctgtaggttgctctccgtaagcagtgatgcaatggacgagggatcgtagacactgtcgaattcctcatctgagctcagcccttcgtttttgagagctgactcagcagctgagcgggaagctttgcgcctgactcagagagaagaataatggttggggaggggaaaatagaaatattaagacagccaccctttttgtacaaaggaaaccccaattcttctaaggcctaaagtttattcacaaaatccccaactaatcagatttggggaggtacaggatggtggctgagatactaataaataaatatactggcttccaaccagaaacaagtgactacacagtaccatgttagagattctcctccttatccagcacaggagagaccattccctccctgctctagtgtccctatgg

SEQ ID NO: 4397 - DNA, 5511 bp, Homo sapiens
  SIMILAR (5407)..(2348): 1001254mologous to Homo sapiens Na,K-ATPase subunit alpha 2,accession number J05096,Smith-Waterman Score=5249.
caccatatttcaatatcacgatttaggagggaggcaagtataaagtgtagaaatctgaattatggaagagatttctttttttttcataaagaaatgccactttattattttcaagtagataggtagtacctcaaactaatgtcttacaaaaggtcaccaataaagatcctgtagatgtttctttaacaaatacataaagattgatgataattagcccatgcactcgctgcttctaaaaggatatttctaaagtgcctgaaaagtattgtttttggtagactaaacatgccacctctagcaatattgtttatgctcttaatttactaaaaaaatgccatttttattgattgtgcaaagataaacttttgtccacagttagtaatctccaattaatcggatccaaattaatattgtctcccacttagattcccaggcccaaggcaatgactcccttacttccttgcttctgataaagcaaaattccagtgcaatgaaatgacagcctttgggaggtggtttatgggtctgacccaatgcttgtcttttgtgcttccttcctgtctgccttaggtcttccattttcctcagatgtctttctcacttgcatgacctatctaggtctctctctacaggacattcccagtgccttctaagccaggcttagagaatgggcaaggctgcctgcagagcaaaagtgttagatagggagtaagggaaagaaagctatctcctgtaggaacctgaaaccaactctccagcccagggtaagtgggcacaatgatcgtcggtttgaagggcatttgcctggagggaacagccctgccacctaagacgtcaaaagcaaatcattttttttttttttgagatggagtctcaccctttcgcccaggctggagtgtaatggcacgatctcagctcactgcaacctcttcctcacaggttcaagcaattctcctgcctcagcctcctgagtagctgagattacaggcgtgtgccaccatgactggctaattttttgtacttttagtagagacagggtttcaccatgttggccaggctcgcctcgaactcctgacctcatgatccacctgcctcggcctcccaaagtgctgggattacaggcatgagccaccgcacccagaaaaagcaaatctcttagtatttttcctcttgtccaaaggttctgaccatgttcatgacctaagcttgtccctggaagcatacatgtccctgggagacaggaaggttcagggaacttctccaccctgattctagccaatggccagcgaactccttttccagggttggcttggcagtgtcggggaatgatgcaggttcatcgggatgggcatgaaaagaaagggaatggaagaggctgggaaagaacttgtggccatccctttcagaacagcatggagctctgaggacttagtattacagaaggtgaagtgttattaagtacatgagtgacatccggaccttgtggactaagaggacccctaaccaagggtcagcggggaactctgtggcacacaagtgtggcatttctggaagctcttgattgccttctggtcctgcctctgctgctaccctgatgagatctgagtttgttctgctggtggggtattctaaaatgtgggacgtagagctggagtccacgacatctatctggagactcatgtcaaatgtcctgtcattggcactacctcacttcctttgttgtttccttcctccagccagccctacctccatctcccacctgtctgcccagctctccctgaaggtcccttaccagcctcgactgggagacaagtccaccttttccagtctcaggctcttgcactcaccagaagaaccttttgtgattgcaaggtctgaaggggaagccagggatagagtcctgcaggaagctaacgggggtggaagtgggaaatggagtgaggctggggtgatctgagagggcttccttctggtttagatgggttcctgcttttggatgctgatctattacagtaggaagtggggttgaagggatgggagtgggcagggtggggtaacccttaattcctcagaaaaaatagacaacatagtggagtgggatggaaaaggatctggtcggggggactctaacacatagtgtctaatctgattgttcacagttaggtctatggggtcatcaccccaatttatataccccgcaacttagcctgctgagttgcctcattatctctccccaaatgttgccacccaatgccacccgttatttccatccctctccatcaccatccccacaacacctccagagctccccatctttccatgcctggttcttcttccaatggggtcagtagtatgtctccttctccacccagccaccaggataccgccgcaggatgagctttcggacctcatcatagatgaagatgaggaggctgtaggggaaggcgcagaaccaccaggtgactttgagcgggtacatgcggagggctacacccatgcctgggcagtaagagagaaaggcagccaacgccgtctcctccaggagcccaaaaatcaggatcttgttcttcatgccctgctggaagactgagttgcggcgggtcttgcagatgatgaggtcagcccactgcaccaccacgatgctggcaaagaatgccgtgtggcacgtgaactccaccaccttccgctgctcataggtccactcctgtccatagctgtcctccagatcattcatggtccggtcatcccagtcgaggcggattcccagtagccgtgatggcaggaaaccgttctctgccaggatcacaaagtaggtgaagaagccacccagtgcctggatcatcccgatctgtccgtaggccatgctgatgagcctctcattcaccagcttgtccgtctgggagtttcgtggctgccgcttcatgatatcactctcagctgcctcataggccaaggagatggcagggaccatatctgtgcccaggtcaatgcaaaggatggtcacagtgcccagaggtagggggatgttggcaatgatgaacagcaggaagggggtgatctcggggatgttgctggtcagggtgtaggcgatggatttcttcaagttgtcaaagatcaggcggccctcctccacccccgtgacgatggaggcaaagttgtcatccagcaggatcatgtcggctgcctgcttagagacgtcagagccagagatgcccatggcaatgccaatgtcagccttcttcaatgcaggggagtcgttcaccccgtcacccgtcacggccacaatggctccctgcctctgacatccctccacaatgatgagcttctgctggggagacgttcgagcaaagacgatctctgtgtggttcttgaggatctcatcgagctgctccgatgtcatgtccttcaggtcagagccgtgcaccacgcatgccttggcttctctggggttgacttgactcatgggaatgttgagccgggctgcaatgtcctccacagtctcgttaccctctgatatgatgcccacgcctttggcaatggccttggctgtgatagggtgatccccggttaccatgatcaccttgatgcctgcgcttcggcacttgcccacagcatctggcacagcagcccggggagggtcaatcatagacatgagccccacaaagcaaagcttctccgtgggaaagttcagctcatccgtgtcgaatttgaagccccgaggaaactttccagatggcagattcagttgacagaatcccagcacacgctccccaagtccccccagctccatgtaggcattttgaaaggcatcttgcatctccttgtcgagcgggatctccttgccctgcaccaggatggtggagcaccggtccagaatgcgctctggggcccccttcatcaccagcacgtggctctgggggctgtcttctcgctcgtggatagacagctggtacttgttggtagagttgaaaggaatctctgccaccttggggtttctgtctctcattttcctcactgagccacaggagagctcaatgcacttgagcagagctgactcagaggcatcaccagctgtgtcccgcttagacacggagatgttctcctgtcctgccttgaagacggcgcggttgcagagaccagcaattcgagacagggccgtccacgtaggggatcgtttgtcaaaagtggccccagactgatcttcggtggtgtcagcctcatggatttggttgtcgaaccacatgtgggcgacggtcatgcggttctgggtgagggtgcccgtcttgtccgagcagatggtggacgtggagcccagcgtctccaccgcctccaggttcttcaccaggcagttcttccgtgccatgcgcttggctgtcagggtcaggcacacagtgacagtggccagaagcccctcaggcacgttggccactatgatgccgatgaggaagatgactgcctccagccagctgtagcccaggatgagggagagcacgaagaaggagacccccaggaatacagcgacccctgtgatcagctggatgaagtgttcaatctccattgctatgggtgtccgcccaacctccaggcctgaggcgagagtagctatgcggcccatcaccgtccggtctcctgtggcaatcacaatgcccctggcagtgccttcaacacagttggtggagaagaaacagatattgcgggtctccagggggttctcatgggtgaactcgggggagcgggtctggggctccgactctcctgttaaggatgagttatccaccttacagccatgagaagagatgatccggaggtcagcagggacgcggtctccacccttcacctccaccaggtctcccaccaccacttcctctgcgttgatctgcatcttctctccctcccggatcacaagggcttgctgaggtaccatgttcttgaaggaatccatgatcttggagctcttggcctcctggtagtaggagaagcagccagtgacaatgaccacagctgccagcaccacacccagatatagattgtcgttggatggttcatcctccatggcagcctggatgccgtaggccaggaagcagaggatagccccaatccacagcaggatggagaaccccccgaaaagctgacggcagaacttgacccactcaggggttgtgggaggtggtgtgagggcgttgggcccatctcgagccagaacgtcctgagcccgctggttggtgaggcccttggacaggtccacttggtatttgcggcccagctcatccaaggacagcttgtggtcatccattgccacctccttcttcagctcatccagttccttctccttctgtttcttcttgccgcccccattctctgccgtggtggcggcaggtgagtactcacggccagccccacggcccatcttggggcagagtggctgagggaccttagcgggagaggtcaccaggaggatcccaagcccacaccagcccgtctgggacagtcggagaccctggcagacagaga

SEQ ID NO: 4398 - DNA, 526 bp, Homo sapiens
ttttaatgatttagaaaagctttattgtggggacatgctttaagaatcagctctgtatttgtgccaaggagatcaggtattggtgtgcaaacagatcccattaatactctgatttgaaccatgaattccacctactctgcgttgaagccctccagtagactgatagatgtaatcaaatgatcagctaccaagtttaattcctttgcctgtgtgcagcaacagttggtagttttacaagttaagttgatggtctggcttagaacacggaggttgtttgacatctttaaatggatgatttaactgttgtgaggaagagaagttcaagaaaaagccctgctttgtgagtttcttggaaggattggagagagggtaggtgaaatgccaggaacatattccagacactcattaatagtagctgctggggctctcagagcagataaactccgactcccgcttgagaaaagaactcaatcattttatcttgtttttggagcaactaacttgcccacctcacagcagggaaagg

SEQ ID NO: 4399 - DNA, 6501 bp, Homo sapiens
  SIMILAR (5058)..(3658): 1001254mologous to Homo sapiens zinc finger transcription factor,accession number AF049907,Smith-Waterman Score=2486.
ttttttttttttttttgtatttttagtagagacgggtttcaccatgttggtcaggctggtcttgaactcctgacctcaagtgatccacctgccttggcctcccaaagtgctgggattacaggcatgagccaccgcaacaagccaggaaagacttctaagggcaggtgacatcaaagagcaggtgacattaaagccaaagctagaatgataagaagcatgcagtgatctatagtgatcggggggaagaggcatctggtagagggaacagcaagtgcaaaggccctgaggtaggaccaagcctcatcttttgacagtagggaggaggccagtgctgttggaacagagtgaactggggagagggtgggaagggaaggcacagttgggcaggggcagattgtgtggagtttttcgggctgctggaaagaccttttcttttcttttttttttttttttttttttttttttgagacagagtctcactttgttgcccaggctggagtgcaatggcgccatctcggctcactgcaacctctgcctcccgggttcaagtgactctcatgctttagcctcccaagtagctagaattacaggcacacaccaccatgcctggctagtttttgtatttttagtagagacggggtttcgccatgttggccaggctggtctcaaactcctggcctcaagtgatccgcccaccttggcctcccaaagtgctgggattacaggcgtgagccaccatgcctggccccaagtatgaatattaaataccactggtggtgccttgaagccctttcccatggggattgaagaaaaaccacagttaagactcaaagtaggggacaaatagcttggttgtaggccattgacgtgatccctgaaagattgtttgaacaatgttacccacaaccatccaaacttattaggaaggataaagattttctaaagctatattgaggtgaagagaagagactattcctccaactcaacgtggggatgaaaaaaaggtaaaaaccagagtttacaaaaattcacttttaatattcaaatgaaagcaacccccttctcctgcctctctgaacatggccagcatttcagacaccctaccacctcccaggctctggctgcctgataaaaaaatcccaatttttgccaaaacctcaaataccacaaaacactaaaagaacagatgtgagcaacttatttaagttctacatttagtagctgatggacacataaggctttcaagaagacactcttctcttcacaacatattaaataagtcctagcacaactgactgcttccaaaactaccacccaagcgtgccaccactcttggctgaacagaaactcttcctcatgacaagggcactatgctgatttcagcagaactgaaggaccacgactctcccagaatatctgtatttttacctctcagacttctcctgcaatgtcctaatgatcatgtaaatagtcttcaatgagaaacaggacatcaaaccttccaaacaggcagaaaatgctctgctaataccatgggagagggtgatcagtttttggcagaacaaaatggcatcaccaccttagtactgaaattagtaggagtaatagaacaatttctcctcaaatataatggctaggatcatacctaaaacccactggcctctaccatgagtgaaagaaaaggagacaataggcttgattgtacaatcccctcagtatacgtgtgtcaggtacacagagaaaagactgctaaccagtaacgtttcaatactaagagaagctattaatgtggcaaacaaccaagaggtaatatctagtttctaggtttaaaaaaaaacaatatatatatatatttataataaagttttaaatacaaagtgctttttatatatcgagaatgatacagtgttgtgaataaatccctgtttgtaatcttgcttacaagagttaactggtaaataagtattttctttcctctttccagacaatgttcaacaagtaaacaccctggtgttaggagcttgagaatcagaggccattgccagcaatgtctattacattacagcaaagccaaacttttcaaataaaatttcaccccaaatccaagaaaaattatttttattttaagaaaaaaagtttctatttagaagtaaataacccagtacgattgtggaaaagatgacatggtagtagcaccctgtcctaccctggtgataacctcaggtatgttacacagcttaaaagcatgtgcaatattacctttctttttaacctaaatcatctaactgatgggcagaaaaggtctcagaatagttgcttttcttgtttgtttttttaattttttttttctggtcggcgtagctttgtggacttttaagtttaagcagctttatctataatgtgggagcatggttctgtagactaccttgctaaacttaggactccttttacaaacacattccagtgctcataaagaactggtagtattagctcagtgtaccctctaaagagtatctcccccaccttgaaagagtgtattctcaagattcttcttgggcagttttgtcccccttaagtataaccactcatagaatcctgcctatctgccctctcactctggttggtggagtgtcaccttagcactctatgaactactcaagttcacagggaactctcagccacaacttgtggctccttctcactaagtgtggtcatggaccactctctttgtaaagcaccataatctaagacagagcaggggctgtggcagcccgtggtaccgtggtcagtcacagcagcttggtgtctaccagccacagagaagaccccactgtatggaggctacaattaaccaaacaggatttgggaaagcaaaccaatgagaaatacctatctctggcaccctagagaattacaattagataaaattgtccaaactcaatgttagaactaaaatacaaaacactgccttatcaagagtctgaaacaccttgtgacagtagtggcatcttacagaaactgacaagggcactatgtcagccttgtaccgtaaattatctgtttcatatttagaaagtcactctcttagcatctccatagttttagttaaaatatcctttagaaagactaaaaccagacaacagagctctgttaaccaatttctcatcctaggaatcacattatttctagcttttatataagtagcacttccttcagtgaaatagctaccaaaacaaatccacattacctaagtatctatagcaagagcaaaataaaatttcagcatgaccttgtaataatgagtgatccaaagctgctgccacccaaaatggaactggtgggtggagtccagttccaagtgcaggtgtctctgtccacctgtttcgatcacaaccagtcagaaggtttcccttgccagctgggcggtgggttaactcaccccattacccattccaggccaggactggaacacacaaatttgaggaattagatttttttaattggcctacttagagctggtctttcagaaatatcttcctttttttttttaagcttctctcataatagcaagtagcacgcatcatctgtgcccagatttgcattaattaccatagtttatttttgtgcatgccactcaagggccagatcctatttttagttagcctcagttgtattctgctcagcctttgcagcttcgtaggacttagtacaagaagtcacatgccggtggaaactgtccctccacataaacctctttgcacagatattacactcatacggctttatgcctgtgtgaattttcatgtggcccacgagatggtgcttcattttgaatttcttaccgcagaccccacagccgtaaggccgaagaccgaggtgcatgctcatgtgccgatctctctgactcttgtgagtgaaacttttcccacactgacaaggatacagcttgtcagtggctgagaatcctaagtgggaagcttcttctttaatccctgttaccatttcaatattctcactgtaacctgctgcgagggcagcctcctgtctgtgcccaattagattcccatctgacctctctccggaaaactcttccatggaagagccatagaaatccacctgctcatcataattgctttcatcagcctgttcatcaaactcagcttccactttcttctccccgatgtggaagtcctcctccactcccgaaggctgcaccgtgtgctctgtctgcacggtgttgatggactctgtgacctggtgctcgtcgtaggtcgcgtgcacatccatgccctcgcaagcctgttctaagcgctcgggcttcacgtggatccagcgtttgtgagccatgatgctgggcttgctgtacatgggccgggtgtagtggaactcggcgctgtcgctggcgccctcctccccatcctggcttgccatttccgtgctcaggcggtcatgctctgtggacgagttgctgggcaggtattcgtgctcggtgagctgggatgacagctcgtctttggtgctctcctcttcattttcaccatctctcagttcttgggctttgggaaaatcagtatgacccccagagcccagctcaaagctctctaccaggccattataactactgctgcttggtgactggtggtcactgccatgatttagcttctgacaaaggactgtagggtttccctctaaaacttcagtgcatttgtctaccacatgccacatctggaggaagcttgccgctgtcaagtaactaacaatttctggagcgggcattactagacgtcctgtataactagataggagaatgttctcaaacactcttgggttcatcacatcaggcaaaacaattctcctgctgtttttcaggagtacctggtcacaaaagtagggtgaactggcagcaagaacggctttgtgtgcccggaaaatgtggccttggacaacaatggagacgtcacataattgtccttgctggcgctgctggttcagtttctgtagaatggtgctggaaaaatcaggaaattctacccgaaaagagtttgttccaggctccatttcatcacaaatcttgttcggtgctacaagagaaagaaaaattagtacaaattccagcccaaagataaacttattttatcccctcctccattgttaagacaagttccaaagttccacaaagtcctctagcctatgggccccactgggtaagggattcaatccctagagcaaagcttgcaggtgcgtgtttgccaaaggcaggactcaccaccactccttgtggaactcctgattttggttctgtgtctgtgggtaagagaactgaatccatagggacaagatttgtaagctatacaaatctcccaagtaaaaccaagtactgtaaatatttacagttaaaacaaacaagatacccattcaaataatataatttttttttaaacgagatggggtcttgctctgttgcccaggctggagtgcagtggcacaatcatagttcactgcagccttgaactcttgggtaatcaagctatcatcctgcttcagcctcctgagtagctgggactgtatgtacatgccaccatgtccagctagttttttttttttttttttgagatagagttttgctcttgttgcccaggctggagtgcaatggtgtgatctcggctcactgccacctccaccttctggtttcgagcgattctcctgccttggcctcccaagtagctgggattataggcgcccgccactacacctggttaattttttttttttgtatttttagtagagatggggtttcactatgttggccaggctggtctcgaactcctgaccgcatgatccaccccgcctcggcctcccaaagtgctgggattacaggcatgagccaccatgtctggctgattaattttttttttaactgtaagagtttgatcttttcaaatgtgttcagaaactaatttggattctttgattctagtatctcaacgtggtttatttttagattctgataagtgaaatggatgtccttgtggagctctggcctccccagcttatctatcagtcctgctgtcctcacctccttgcctctttccatgcttacccttaagccaccatctttctcaagctagcgtgtgtgtttctagtgtagttgggccctccaatattcaaggggtccagcatgtggtgcttgtagctgtgtctccgtagagctcagtaaatagttcttagaacacggaggttgtttgacatctttaaatggatgatttaactgttgtgaggaagagaagttcaagaaaaagccctgctttgtgagtttcttggaaggattggagagaggggaggtgaaatgccaggaacatattccagacactcattaatagtagctgctggggctctcagagcagataaactccgactcccgcttgagaaaagaactcaatcattttatcttgtttttggagcaactaacttgcccacctcacagcagggaaaggtttgctg

SEQ ID NO: 4400 - DNA, 1536 bp, Homo sapiens
  SIMILAR (85)..(741): 631254mologous to Mus musculus putative,accession number AK017174,Smith-Waterman Score=656.
ggaatcccatctggagactcgctaagcgtcccagccgcatccctcccgcagcgacggcggcccgggacccgcgggctgtgaaccatgaacacccgcaatagaggggtgaactccgggctcggcgcctcccctgcctcccgcccgacccgggatccccaggacccttctgggcggcaaggggagctgagccccgtggaagaccagagagagggtttggaggcagcccctaagggcccttcgcgggagagcgtcgtgcacgcgggccagaggcgcacaagtgcatacaccttgatagcaccaaatataaaccggagaaatgagatacaaagaattgcggagctggagctggccaacctggagaagtggaaggagcagaacagagctaaaccggttcacctggtgcccagacggctaggtggaagccagtcagaaactgaagtcagacagaaacaacaactccagctgatgcaatctaaatacaagcaaaagctaaaaagagaagaatctgtaagaatcaagaaggaagctgaagaagctgaactccaaaaaatgaaggcaattcagagagagaagagcaataaactggaggagaaaaaaagacttcaagaaaaccttagaagagaagcatttagagagcatcagcaatacaaaaccgctgagttcttgagcaaactgaacacagaatcgccagacagaagtgcctgtcaaagtgctgtttgtggcccacaatcctcaacatgggccagaagctgggcttacagagattctctaaaggcagaagaaaacagaaaattgcaaaagatgaaggatgaacaacatcaaaagagtgaattactggaactgaaacggcagcagcaagagcaagaaagagccaaaatccaccagactgaacacaggagggtaaataatgcttttctggaccgactccaaggcaaaagtcaaccaggtggcctcgagcaatctggaggctgttggaatatgaatagccggaacagctggggtatatgagaaaatattgactcctatctggccttcatcaactgacctcgaaaagcctcatgagatgctttttcttaatgtgattttgttcagcctcactgtttttaccttaatttcaactgcccacacacttgaccgtgcagtcagggagtgactgggcttctccttgtcctcattttatggcatgtttgggagggagctggattcctggacctggaactcatatttaatctctactgccagggaaatgctacattatttttctaattggaagtataattagagtgatgttggtagggtagaaaaagagggagtcacttgatgctttcaggttaatcagagctatgggtgctacaggcttgtctttctaagtgacatattcttatctaattctcagatcaggttttgaaaagctttgggggtctttttagattttaatccctactttctttatggtacaaatatgtacaaaagaaaaaggtcttatattcttttacacaaatttataaataaattttgaactccttctgtaaaaac

SEQ ID NO: 4401 - DNA, 688 bp, Homo sapiens
  SIMILAR (5)..(235): 461254mologous to Homo sapiens PRO2550,accession number AF130089,Smith-Waterman Score=142.
gatcaagcgattctcctacctcagcctcccaaatagctgggactacaaggtgccctccagcatgcctggctgatttttgtatttttagttaaggtgaggtttcaccaatgttggccaggcgggtttcgaaatcccttgacctcaaaatgattctaacccactcagctcccaaagtgctgggattacaggcatgagccacccacaaccgtcccccactattttactttttaaaatgacattccctactgattgatttttatcttgctataagttcgatgacacccgtgaatctaataaggttcactgctgacacagtacaagttacatagctaaaatacatagcattgaagactaattttaaggattgacaagagtttattttctattgagcaatatcttaaaggaagcaaccacctttgggaaagtggatctgctgctcctacgcccatgcttgtatacatatgtaaataaacatattcatttaccctaaaaaaaacaataaaccaaggatggggccccggtcttaaagaatccctaggggggcgaaactttgcttgaatgacatgaaaaattttttccttatggggaggcaattaaaagctgggggcgtggcctcttttttaaacctagaaaggggaaaagcctaggcctggggatcttttgaaagaaccatttcttgtgggggggg

SEQ ID NO: 4402 - DNA, 543 bp, Homo sapiens
tttgtgtacaattcaataatgtttattatgtgtaattgaacattcacaggaaatttatgcttctatattatcattaacttttgttgttcttgttgtcatttttgagatagggtctcagtctgtcacccaggctggagtacagtggttaattcacagggtttcactcgcagccttaacctactgggctcaagtgatcctcctgcttcaaccctccctgtgtaagctgggaaccacggggtgcatgccaccatgccctgggctaattttttgattttttgtaaaaatcaggtctcactttgtttgcccaggctggtctcaaactcctagggttcaagcaatcctcccatcatgggcctcccaggcgtgctggaatttatggggtatgaggccactgcccctgcgtattattattaacttttaaaaatgtatgtcacatatgccataatcatttccaactctttcaaagttttttttaaatttcagctcaaaatattagaatgaaatgcacactcaagactaaagaagctatattctatgttcgag

SEQ ID NO: 4403 - DNA, 1077 bp, Homo sapiens
  SIMILAR (4)..(273): 561254mologous to Homo sapiens Human secreted protein encoded by gene 44 clone HTDAD22,accession number AAY02693,Smith-Waterman Score=253.
ttttttttttttgagacggatctcactctgtcgcccaggctggagtgcagtggggcgatcttggcttactgtaatcttctgcctcccaggttcaagcgattctcctgcctcagcctcctgagcatctgggactacaggcgcccgcaccatgcccagctaattttttgtattttcagtagagacggggtttcaccctgttagccaggatggtctcgatctcctcacctcgtgatctgcccgcctcagcctcccaaagagctgggattacaggcatgagccacttgcgcctggccttggttttactttttaaaaatttctatgaagctgctctagaaaactaaaggacgaaaactttactgtcataattccaagttcagtcagggatttctcagaattgaggtgtgcagcatccagattcccctttatgtggatagggatccctgtgccatgtcttgcacttacctaagaactataggaattctccatgtacctcctacagtttttctagcagtgttggacaatggattctaaaggttcctggagactttgttaaatttctcataattccagagggaaggccaaaatattgagaatactcaatgataggatgagtttccactctacttccttatcctcaaggcacacaccagagttccactgggtgaggacagggaagtaggatgtcccacccccctctgagggttttcatgcattaatcccgccatatggggtgatggttggacctgcctttagttctctaagtaaaggtctaaaaatgcacctgtggtttctgaacttgggtatacgctattacataagcactaccatagaagttacatgccttaatcctgtaatacttctgtgtggtatcattctgctaatatattgtccacagggccaaaccccaagttacgcagcgccacagtacttgtcagccactccatctcctcagtgacacaggtgataaggtacctctcccctgaggcaaagtcccgacacatctgtggtaagtgcacatacccagaaatgggcagattttgaaagtgaatgcaaaaaacttaattccgtacgcgtggg

SEQ ID NO: 4404 - DNA, 882 bp, Homo sapiens
  SIMILAR (294)..(4): 881254mologous to Homo sapiens ribosomal protein S7,accession number Z25749,Smith-Waterman Score=434.
ttacaattgaaactctgggaattcaaaattaacatccttgcccatgagcttcttatagacaccagaaaagggttcaaccttgtgttccacattgttctgctgtgcttcgtccaaatgaatctttatgaggtggctgccatccagtttcacgtggattctcttgcccacaatttcgcttgggaagaccaagtcctcaaggatggcatcatgcacagctgtgagagtacagctcctgggaagcttttgcttattgtttgtacagcttttttgagttggcttaggcagaattctccttagctggacttgggttttctggaaagatttcagttgaggaacgggaacaaagattatgatagctttccgaccaccaccaacttcaatttccttggctgccgtaatattcagctcccagagctgagccttgaggtccaagttcatctccagctccagaagagcctgggagattccggattcaaactcatccggcttctcgccattgggcttcacgatcttggcccttgaactgaacatggtcttctccttgctgagcgctgtgttggtgaggtttgttgatgagtcccataacattgtgtctagttgatcttcttcctcttctccttcttcttcttctccttcttcttcttcttcttcttcttcttcttcttcttcttcttcttcttcttcttcttcttcttcttcttcttcttcttcctcctcctcctcctcctcctcctcctcctcctcctcctcttcttcttcttcttcttcttcttcttctttttttttttttttttgagacagagtctcgctctgtcgcccaggctggagtgcagtggcgccatctgggctcactgcaagctctgcctcccaggttcgcgccat

SEQ ID NO: 4405 - DNA, 1990 bp, Homo sapiens
  SIMILAR (714)..(950): 691254mologous to Homo sapiens neuronal thread protein AD7c- NTP,accession number AF010144,Smith-Waterman Score=285.
ctctaaagggaaatcccaaccttctttggtcttgtagttttgaacagggagggtatcctgtattacacctccaatacggctcagtcttaggaggaagcattcaaagtcttccagttcagatgccaaaaaaaccccattcctggccagcttatctaaaatttcattcctcatgtagttgttacaggaagtattctggttaataacatcaacagtcagaaggggccatttgttctgctgaagtgaagcataactatgctgggtttgaaattctccaatccataagataatgtttaaccaatcatggcgagctgtgaggtatctccagagggcttcaggggaatatgatttgtattctacatgaaaaaaaacacattttaaaatataattaattatgtctattgacatgtaactcaacactaaattactgagtaaatataacaatctggacatagatatttatacaatatattaattattcaggtcctctgttttactattttcctttttttgagacaggatctcgctgtgttgcccaggctggagtgcagtggtgcactcgtggcagcctcgacctcctgggctcaagtggtactcctacttcagctgcccaagtagcagggactacagggatgtgccatcatgaccaggtaaatttttttttttttttttttttttttttttttttttttttttttttttttttttttttttttttttttttttttttttttgagacagagtctcgctctgtagcccaggctggagtgcagtggcgcaatcttggctcactgcaacctctgcctcccaggttcaagcgattctcctgcctcggcctcccaagtagctgggattacaggaatgcaccaccacacccagctaattgttgtatttttagtagaggcggggtttcacaatgttggccaagctggtcttgaactcaggtgattcgcctgcctcagcctcccaaagtgctgggattataggcgtgagccaccacgcccgtccacccaggtattttaaaaaatatatattctgtagagatgggggtctcactatgttgctaggctggtcttgaactcctggcctcaagcaatcttctcatctcggtttcccaaatttctgggattacaggtgtgagccaccgtgcctggccacattgttcattttataatcaatgctacagccaaagaactagatgtagcttctaattactctggtggttaaaatgaaacttacgtattagctgtaccattccctttcctggttcaaccctttttttcccttctctttcccttaatgtaaataaaaactttgtttcagatggggaaggatgaaaagaaaaaaataaattaaaaataataaacaaacaaaaacttcagccataatagtaagccagaattttactctctgaattgctactgtttaccactgttagttatgacccagatcccccatatcagatggcatagatccccaatttacacaagaagctcaagactatttgaaaaaacagattgtcactttgaagctggaatgaaaactcagccttgaaatctcaattaactattgggtgcttttattagcacattataaatccctcccagaaactctgagataagaaagagatcttaatgcaacgacttgcattttaaagaacctgaatattatttcccgaaaggaattctaaaattgagacacatcaaaatattcaaatatcaatacccaatttaatcctcattcagtatgttcatatttcaggctctctcacacttgccttctggacttatcctggggagaaggatggattcttgtgttagttgatcccaccacagagcccaatttaacacaattctatggtcctgtttgttaaattcatctttacaatcatatttcaggaatgagtccaaaacagacttgtgcttgaaaaaatcttgttcctttatccagtacctaaaaacagtgatataaatttttttttttttaattttgg

SEQ ID NO: 4406 - DNA, 806 bp, Homo sapiens
  SIMILAR (2)..(280): 521254mologous to Homo sapiens Human secreted protein encoded by DNA clone vq3 1,accession number AAB34695,Smith-Waterman Score= 200.
gagacagggtctcactttgtcacccaggctggagtgtagtggtgcaatcttggcttactgcaacctttgactcccgggctcaagcaattttcccatctcagtcccccaagtagctgggaccacaagtgtgtaccatcatgcccagctaattccttttgtactttgggtaagtgaagaagagtttccactatgttgcccccaggatggtcctcaaactccctgagcctcaagtgatctgccccatctcagcctcccaaagtgctgggattacaagtgtgagctactgcatccagcctgcaattggttttgactgcacaagaaaaaacataaaaaggttccatgaaccttttataacctcttataattgttacggttttatttctttcctcatttttctatgtccaatcagttttaggtccttaaaaaaatagcagagatagtgtaaacctgtctaacaaatagacccagaaaaatatctaaattaaattcagaaaatgtttctattttattttaccccaaattttaaactatcttcatttaccacagattactaatgccctgtgaacttgaaaagcgtttgggcttatttacttaatttatgagtactaatttatttatgtcaagttggtaccatacaggcaatctataaacatagacacgtatccataaaatataaacacaaataaatactttatatcattttttctttttttgagacagagtttcactcttattgcccaggctggagtgcaatggtgcaatctcgcctcactgcaacttccgtcgcccgggtaacagagtatcac

SEQ ID NO: 4407 - DNA, 851 bp, Homo sapiens
  SIMILAR (1)..(117): 461254mologous to Homo sapiens Human secreted protein encoded by DNA clone vq3 1,accession number AAB34695,Smith-Waterman Score= 77.
  misc_feature (1)...(851): n = a,t,c or g
ttgagacagagttttgctggctggcccaggctggagtgcaatggcaccatcccagcttactgcaacctccacctccttggctcaagcaatcctcccgcctcctcaccacgcccggctaatttttgtagttttagtagagatgaggtttctctatgttgcctaggctggtcttgaactcctgagttcaagtgatctaccaccttggcatcgcaaagtgctgggattacaagcgtgagccattgtacctggcctaacattactcatttataaaacatcacgttgacccaaaaaaggccttcaccttaaaaaagcaaaaccaaaataatcctttgactgtgtattaatgagaattttcaacccagccaccatttttatgagttctatgcttgatctataaggtcccggagggcagtgctaagtattttcatttccactgggcacttaacactctggaactatctacgtggcaaagtaaattcgtgtgggaaatactgatgttataagcttttcatagaaggcaaagggaacttgaaattagaaaaccccagaaacagtcacaattgctaagctcacttcttcatctaaaaaggatgatttagactaaatcactgttactcaaactttagtcattctcaaaccaccttcatggcttttgccacattcatgcgcccctataatattatatattattatgtattttaaatatcctgttatgcaccannnnnnnnnnnnnnnnnnnnnnnnnnnnnnnnnnnnnnnnnnnnnnnnnnnnnnnnnnnnnnnnnnnnnnnnnnnnnnnnnnnnnnnnnnnnatcatagccgtcattatgtcacagcacaacttattactt

SEQ ID NO: 4408 - DNA, 821 bp, Homo sapiens
ttttttttaattaacttgactttattgatagttacagcacaatttattaattaacttgactttattgatagttacagcacaatctgtccaaaaccaccagaatatacattcttttcaagagctcaaatggaacatttaccacaaaagaccatattctgggcttcaaaataagcctaaataaatacaaaagcatttaggacctatgaatcagaagactgaatatgcacatatacaaaatgagaatcattctctcacatacaaaacttatataggtagtaaagatacagttgattaggtagatttgaatgttgaatcactgacatttcctgaaggtagagctacaaattacttttttaaaaccactaaccccaccccccaccttaccctcacttaccccttttttggcccttacccaccctactttagtcatacccctataccatgttactccggacccaaatggctctcataaacaatctcagtatatgtgggttgctaagtctatgaccattccttcaaccatttagcatttccttggtgcttgcacagtttggacatcttacatgcaatctaggtaaaggaaaacgggaaacaaatttgtgagttaatgttccagaggtcagagaacatataatatgtatggtaaggaaaatgtatagtatgtacaaaaaagataaatattaatgttttcaagatcatttacttatattctgataaagttttccgtgaacggcaaataggacaaaaatgactatggtaggattaaaatcataaaaaggcatggtcaaatgaactttcaggtactgaacctagatactgat

SEQ ID NO: 4409 - DNA, 1128 bp, Homo sapiens
agctgctggagcccggtacccactcagctctgtctgatgccctctccatagcccagctggagccgtgaacactggggtcccctggcagagtcctcatgacccatcctgggctctctgtccagattgcagcaaaggagtgggcgtggctctgtgtccagggccccagggtctgctcctgctgaggaccagctgtggctgggccaggacagaggactcaaccctgctcctcccggtaggccagctgccgagccgggctatgttctggaacccagtgaatcttgggggccaggcactgtgctaggcaccagcaggggtaacacgaagaagacccggcccttagggcatcaggaagactagctcccctgccccggaggatctgctcagtgctgatggcagcccagctgtgtggactcagggggctctgagggctagggaaacaggaagggcctctttgacaaggtaggagctgtgcttggaggggcaggaaaagaactgagcatgtcgcaggcagcgggcccagcctgagcaaatggcaggatgtgaacttccccatcgcaaatgcagttctcagcccactgcagtggatacaaggaagggcctttttcggggccggagaagagaccaagagaccaggcccgggcagcagcctaccggccacgtggaacactggctccggagttattctctgtcaaatctactccccggacctcaaccatggcaagaaccagaggtccaaagaggcccagacccaggtccttgtgctcagtcctgcggcaaaccaggcccagaccctgcaagcatttgttgatgcccttgcaggcccactgggagaaagatgcctcaggcaggtctcagcctgggggtggcaggggtggggcagagagaatactgacagcagaggtcttggtgggctgcacgtgcctgcgaagatgtggtggacaaggaggctctcgggctgggccttggaggggtggcagcggaaggacagcccaggtggctgaggcctgatgggaagccggggaaggccagggtggaagggcggcttgagggacgccaggagaagactgaatgccaagctaggaaggaggcggctctcgatcacggggtgggtgcccccgacaccgggtc

SEQ ID NO: 4410 - DNA, 523 bp, Homo sapiens
  SIMILAR (316)..(366): 701254mologous to Homo sapiens PRO1847,accession number AF119855,Smith-Waterman Score=78.
  misc_feature (1)...(523): n = a,t,c or g
ctgccttcaattttaaaattagtgatacaaagaaggagggaaccatgcagattcctttgaagatggtgattaacaacactactgcattcatctccacagaggtacagcaaaagtgatttagttagcgataacctctaattctattttttttatttttattttttgagacagtcttgctctgtcaaccaggctggagtgcagtagcntgtcttaactcactgcaacctccacctcctgggttcaagcgattctcctgcctcagcctcccaagtcgctgggattacaagtgcccaccaccatgcacacctaatttttgtgtttttagtagatggggtttctccatgttggccaggctggtctcgaacttatgacttcaggtgatccgcccggctttgggctncccaaaagtgctggggattataaggcgngaaaccttgttgcctgggcctgtaacctctaaattcttcgtttgctggctgtcctagagatcctgagaantacttttaataaaatcanttttttg

SEQ ID NO: 4411 - DNA, 1340 bp, Homo sapiens
  SIMILAR (258)..(1340): 621254mologous to Homo sapiens zinc finger protein,accession number X78933,Smith-Waterman Score=1232.
atgaacaaacacccaagatccagagacagcaacacaaaaaaggaacggaacacaggacaaaacgaccgaagaaaccaacaaagacaaaaaagcacacgacaaaaagaagaacaagaactaggaagccgcaagcaagacgacgaaagacaatatttgcagttggaaggatgatacaatcggctgtaaagaaatgcccacctctgaaaactgtccatcttttgctctacatcagaaaataagtagacagaaaccacggtgaatgtcgggaatatggaaagaccctttgtcaagactcaaagcctgttcaacatgaaagaatacatagtagtgaaaaacccaacagatgtaaagaatgtgggaagaactttagtaatggacatcaactcaccatacatcagagattgcatgttggtgagaaaccctataaatatgaaaaatgtgggaaggcctttatcagtggctcagcctttgttaagcatgggagaattcacactggtgagaagccactcaaatgtaagcaatgtggaaagactattagcggtagctatcaacttacagtacataagagtattcatactgggaagaaaccatatgagtgcggggaatgtgggaaagcttttctagtatatggaaagcttacccggcatcagagtactcacactggtgaaaaaccctttgggtgtgaggagtgtgggaaggccttcagtaccttttcatacctggttcaacatcagcgaattcataccagtgaaaaaccttacgaatgcaaagaatgtgggaaggcctttagcactagctcaccccttgctaagcatcagagaattcatactggcgagaaaccctatgaatgtaaggagtgtgggaagtccttcactgtgtatggacagcttactcgacatcagagtattcatactggtgagaaaccttttgaatcgattcatgcagagataaagccctacagatgcaaggaatgcgggagaaccttcagtcgtgcctcatatcttgttcaacatggaagacttcacactggcgagaagccctatgaatgtaaggagtgtggcaaggcctttagtactggctcataccttgttcagcatcagaggatccatactggggagaaaccctatgaatgtaaggaatgtggcaaagcctttattagtcgccatcagcttaccgtacatcaaagggttcatactggagagaaaccctatgagtgtaaggaatgtggcaaggccttcagagtgcacgtacatctcacacagcatcggaaaattcatactgatgtaaagccctatgaatgtaaggaatgtggaaagacttttagtcgagcctcgtacctt

SEQ ID NO: 4412 - DNA, 2141 bp, Homo sapiens
  SIMILAR (2136)..(580): 901254mologous to Homo sapiens PBK1 protein,accession number AJ007398,Smith-Waterman Score=2333.
ttttttgtagagatggggttttaccaagttgcccaggctagtctcaaactcctggcctcaagcaatcctctcaccttggctacctaaagtgctgaacaaccacagagaagcactctatttttccctctattacattagcaaatacacagaaggacaatttagaaacagattatacccaggaacaatatgtcaggattacttatggaggtatttattatttttatttatttttgagacagagtcttgcactgtcatcaggctggagtgcagtggctcactgcaacctccgcctcccaggttcaagcaattcacctgcctcagactccatagtagctgggattacaggtcgtccaccaaccatggccaattaatttttgtatttyyygcgtacagacagggtttcaccatgttggccagggatggtctcgatctcgttgacctttgtgatccgcctgcctcggcctcccaaagtgctgggattacagggcgtgagcacccggcccctgggacttacttatgggagggttttaaaaaatcttttaagtccagggcctgacgtttaggaggaagggttacaaagggcggccaggatctgagtatttccaaaaagctcctggaggcagcatttgaggtttcctttccagttgaatcacttgactttaagtcgactggggtacctttgggtttttttgggccattttttgggggtgtgggaagcttttctcacagatttactaggagtggtgaaaaaacttggcctctgggctttttggagtctgtctcccatcttttgttccccaccgaaggacttgattcctttcactgctcttctttgatttttggcttcttctctgggcttttccctgcggtctcaaactctgcagcttttggggtctcagatgctggcaaagcctttcttttcttcccacgaggtgtgctgggattaggactctttgctggagacttctttcctgtggcatgtttttgaatctctactttttcattagctggagtcttctttcctattggtaccagctgtgggatttcgtcttcggattcatttgttgctttaacttgggcttttcctctgccacgttttttcttcccatgctctggggtctgttccttctttgattcaggtttcttcactgtagtatcaccactttcaggtgccacatcatctttactaagaactgatgcagtcttcctagcctgctgcctcttcttcttcctctccttttgtttttcaaaatttctttctcttcgttttctccttgcctcttttttcttcttattaagcaaagatcttttggtggcttcatcccaattgctgacaaacgaggaaaagatgggaagtgcagccgatttctcagttttcacaaacaggagtttcacgctctcccacttctctggcaatttttctgaaagtcctttggtgacagcaacaatgttttcaatgatgtgctcaatttgcattccaacgtgaccaatacgtatagcactgcaagaaccacttttagaaatgtttaagaccgttccacctatacagtcattgatctctcttgataaattcttggacagaaggtttacagatactggaactttctttctttgatagaaatgtctcccaatgagtgagggtaagagccgcctaattctggcatcagtaaggaagaaatcaaaactgctcagaaggcggagcttggcttcataggatttatattccttctttagagtttggagggagataatctgagaaacggttttaattccatgcttgtttaaaagctttctataaaactgttctgtcttttcaggagttgaattgggttcatccttcgtaaataaacagatatcttctgaatctgatcgaatactatgaggcaaggtcaatctgaccctcagttctttacttggaattttccataataccaccattaaaaataaactttcattctcattcaaaagcaacccataattgtttttcctggacttgcaatgcgtcaagagagcgtccactgcctttctaacctgttctttatccagctgcttccgtgctgtcggggccgctggagtcgaggtggaggttccagtagcggctgcagaagacagcgaggccgaggccgaatcctccatcttgt

SEQ ID NO: 4413 - DNA, 394 bp, Homo sapiens
  SIMILAR (7)..(153): 611254mologous to Mus musculus tousled-like kinase,accession number AF045253,Smith-Waterman Score=137.
cttgaaaggatgtcttttggccatatccagactaaggaagacatcctacaagagaatacgatttttattgctactgaagtgcagatccagcctaatccagattgaacacctgaagctaaggcgtttatatcgacgatgcttgtcctaccgaaaggaggaccgaattgatgtccatcagctgacctgtgatccctacttgatgcctcacatgcgaatgtcagtctctacatgtagccctgctggagctgctattgcatctacctctggggcttctagtagcagttcttctaattgagactgacttcaaggctcactgcgtgttcatcacacacaaagtggacaaatggcgttcagcagcgggtttggaacatagcgaatccgaatggatctgatg

SEQ ID NO: 4414 - DNA, 745 bp, Homo sapiens
  SIMILAR (3)..(287): 1001254mologous to Mus musculus tousled-like kinase,accession number AF045253,Smith-Waterman Score=486.
gaaggaagccttttggccataaccagtctcagcaagacatcctacaagagaatacgattcttaaagctactgaagtgcagttcccgccaaagccagtagtaacacctgaagcaaaggcgtttattcgacgatgcttggcctaccgaaaggaggaccgcattgatgtccagcagctggcctgtgatccctacttgttgcctcacatccgaaagtcagtctctacaagtagccctgctggagctgctattgcatcaacctctggggcgtccaataacagttcttctaattgagactgactccaaggccacaaactgttcaacacacacaaagtggacaaatggcgttcagcagcgggtttggaacatagcgaatccgaatggatctgatgaaacctgtaccaggtgcttttattttcttgcttttttcccatccatagagcatgacagcatcgattctcattgaggagaaaccttgggcagctccggccaggccttgtaggaaaaggccccgcccgaggttccagcgtcaacggccactgtgtgtggctgctctgagtgaggaaaaaattaaaaagaaaaactggttccatgtactgtgaacttgaaaacttgcagactcaggggggtccctgatgcagtgcttcagatgaagaatgtggacttgaaaatacagactgggctagtccagtgtctatatttaaacttgttcttttcttttaataaagtttaggtaacatctcctgaaa

SEQ ID NO: 4415 - DNA, 1249 bp, Homo sapiens
  misc_feature (1)...(1249): n = a,t,c or g
ccacccctcatgacacagaatacttgagccactgatttttcatttctttttttttttttcctcggcccctcctcagccacctgagttgctctatctgcaagcctgactctgccagcctcccctggtagagaggaggtttacccactccctgcacgcctgccgtccctgccccgctgggagccccttcaagtgtggctggcgttgggggcagtgaagttgcctctttcccctccttggtctggccccaagtggtctggggaagcccccaggcacacctaagcgtcgtggagcattgttctgccacatgcctggaatactgaccccgggatgcctggggccaggtggaccaagcccccagccaacccaccttcaaccctagccctgtcccccccaaggatgggtgaaagcttcagccagggggtctgaggggtaagcccggcccagaaagaggctggaaccctccctgccctcaagtcctagacccccctaccttctctgctgaccccaaaccctgcccagagcctgatgtttcccaatacccaagatgtctttcacagggcacagcccttgcagagcatctttgggtcatttggaagaggacacggtatccccctctggcccagagtatgtcagagaaggaagagtagggctttttttgttttgtttttttttaaaggtgcttgcttgtttaatgtaaataatagaaagccttaatatcttttctgtaacacggagtaatattttaatgttcatgttttggatgtacataatatatttataacaaagcagcaagagtctacttaaccttggctgcctcgtggtgtttcctggctgggtgcgggtggggggtatcaaggagcctgggaccgtgaggccccacctcctcgccccattcccaagctccccccaaccctggcctcaaggatgagaagctgtcacctgganacaagtgaattaaatgttgacatcctgctccaaagccttttggaggggattgggtgaggacagtggtctttcctgttgatcaatgatgataaagtaatgatggctgatcccctatttgtgacttccttcagcaaatattcactggcacctggtgtgtgccaggctctgtcctgtacacaggtacagcggtgaaaggaccaacaaagacctatcctggtggagctgacctcctgggaaaagagtcaataaacaaataaatgcacatgaaaaaaaaaaaaaaaaaaaaaaaaaaaagtcgtatcga

SEQ ID NO: 4416 - DNA, 574 bp, Homo sapiens
  SIMILAR (276)..(479): 541254mologous to Schizosaccharomyces pombe putative FAD synthetase,accession number AL031764,Smith-Waterman Score=176.
  misc_feature (1)...(574): n = a,t,c or g
gggggtttnnngggcctcgaccggctgtggtgaagcggcagaacaggcaggttccctcgacccaggaccccctgttcccaggctatggcccccagtgccctgtagacctggcaggccccccgtgcttgcgacccctatttgggggtctgggtggctactggagggccttgcagaggggcagagaaggcaggaccatgacatctagggcctctgaactttctccggggcgcagcgtgacggctggcatcatcattgttggagatgagatccttaaggactggacctacagagacatctgggattttctgcgtcagctgtttgtcccatactgtatcctgtatgaccgaggatacacatcactggggagtcgggagaataccgtgcggaacccggccctgaagtgcctgagcccaggaggacaccccacataccgtccagcctatctactggagaacgaagaagaggagcggaactcccgcacatgacctcccaccctaggagggagggaaggacaccgtcctagggtataacctggcaataaaccgtgcctctcactgtgaaaaaaaaaaaaaaa

SEQ ID NO: 4417 - DNA, 741 bp, Homo sapiens
  SIMILAR (194)..(307): 501254mologous to Homo sapiens PRO0113,accession number AF090894,Smith-Waterman Score=70.
ttttttttttcacagtgagaggcacggtttattgccaggttataccctaggacggtgtccttccctccctcctagggtgggaggtcatgtgcgggagttccgctcctcttcttcgttctccagtagataggctggacggtatgtggggtgtctgtcacccaaggctggagtatagtggctcagtcaccagttcactgcagcctccaacctcctggcttcaagggccaccccagccttccgagtagctgggactacaggcgcgtgccaccacattcagctcattttaaattttttttgtagaaatggggtcttgccatgttgcccaggctggtgttgaattcctggtctcaagtgatcctcctgcctcagcctcccaaagtgctggaattataggtgtgagccaccacgcctggcctgctttcttctttctgtccccactgccaccaagcaggtccttagcacctttcacctggacaatggcgacagcttcctggccaggctcccagcctccagccacagtgctttgatgtctccggagtaaccgttttaatgcgtcactgtgattgcatcactcttggactcaaaagccatttgttgtttccaactgtatacagaagaaagttcaaattcctttgcagagtatttggggctgtctgtggcgtataccctatcttcttttccagccccatctccctctaattgtctacaaagggtttagtggttaagggtctgtgttctgat

SEQ ID NO: 4418 - DNA, 399 bp, Homo sapiens
  SIMILAR (328)..(80): 651254mologous to Homo sapiens hypothetical protein,accession number AL162044,Smith-Waterman Score=245.
ttttttctttttaattaaaattttattttacatgtttttaaaattcacaatagatattttatcctaaaataaagtaaaaccgagaggtgacagcgtgctggcagtcctcacagccctcgcttgctctccccgcctcctctgcctgggctcctactttggcggcacttgaggagcccttcagcccaccgctgcactgtgggagcccctttctgggctggccaaggccgggtgggcgtgggcttggcgggccccgcactcggagcagccggccagcctaagcctcccacccactccaagggctcctgtgcggcccgagcctcctcgacgagcaccaccccctgctccacggcgcccagtcccatcgaccacccaagggctgaggaatgcaagcgcaccgtg

SEQ ID NO: 4419 - DNA, 1608 bp, Homo sapiens
  SIMILAR (492)..(28): 1001254mologous to Homo sapiens sperm protein 10,accession number M82968,Smith-Waterman Score=809.
ctagtagttttctacgtactgcacacttgtacctgtagatgtgcttgaaattggtgcacctgaagcctgttcccctgaagcgtgctcacctgaaggctgttcacccgaggcctgctcaccagaaggctgttcaccggagccatgttcacctgaaggctgttcatctgaaggctgttcacctgactcaagctcactcaaaggctgttctccggagaggtgttcacctgaaggctgttctcctgaaggctgctcacctacagtatgctcaccttcagcatgttcagtcgcagcgggctcacctgaagcatgctcactctcagcatgttctccagaagtgtgctcggccacagtgtgcttgcttgaaccatgctcactggaaccatgctcacttaaagtgttcaggcctgaagaagtctcatataaagcctcagcatcagaagggttttcaagtgaaaagaactcacctggaagttgctgaactgaagtttgatgatagaggtgggggactagcttaatgccagtgcccactgcttcgtacaggttggggtacttgtaggtatgagcaggacgggtctgggcagtatggcttgctgcctgggaagatgttcccataatgaggcattttggcccttgttcccgcagaatgtgatgctgatgttccttggactgaaattcggagaaatctggacaagcttcagagaggagctcccattccattagcctctcgcagtttatatagcagaaatcctttcctgacctccgcaggcccagaccactggtccattctgcatgaactatcccttcctggaggctggtgaagcctacacgggcaccagaaggcctctcaagtttgtgctgactggccctcacaacctcagagctcagggcacaggagcgagtgccatcttcccagaccatgcgggggcctccactgttaaaaccctgttcaggcagcaacttccaggactcatcgcccaggaggaagagcagagccacactcagtgccaatagcttgtccatcgtcctcaggaaggaggtcctggaagcaggctgccactgaaaggccagctttcccaggctttggctctctcctagcccagactcaggagcccagctggcttcacctagtggatcccgcaccggggctgcaggtggagctgcctgccagtcccatgccgtgcgctcgcattcctcagcccttgggtggtcgatgggactgggcgccctggagcagggggtggtgctcgtcggggaggctttctctctggctgcccttaacatttttttcttcatttcaattttggtgaatctgacaattatgtgtcttggagttgctcttctcaaggggtatctttgtggtgttctctgtatttcctgaatttgaatgttggcctgccttgctagattggggaagttctcctggataatatcctgcagagtgttttccaacttggttccattctccccgtcactttcaggtacaccaattagacgtagattttgtcttttcacatagtcccatatttcttggaggctttgttcatttctttttattcttttttctctaaacttctcttcatgcttcatttcattcatttcatcttccat

SEQ ID NO: 4420 - DNA, 716 bp, Homo sapiens
  SIMILAR (580)..(434): 691254mologous to Homo sapiens hypothetical protein,accession number AL162044,Smith-Waterman Score=176.
ttacatttctaccagcagaattatgataatcccagtgacttcacattcttgacaacacttggcattgtcaattcttttaataatattcattctaatgtgtatgtagtagtgagaggtgacagcgtgctggcagtcctcacagccctcactcgctctcagcgcctcctctgcctgggctcccactttggcggcacttgaggagcccttcggcctgacactgcactgtgggagcctctttctaggctggccaaggctggagcccactccctcagcttgcaggtaggtgtggagggagaggcgcgagcgggaaccggggctgcctgcggcgcttgcaggccagctggcgttccgggtgggcgtaggcttggtgggccctgcactcggagcagccagccagccctgctggccccactccatgggctcctgtgcggcccgagcctccccgacgagcaccaccccctgctccacggcgcccagtcccatcgaccacccaagggctgaggaatgcgagcgcacggcacaagactggcaggcagctccacctgcagccccagtgtgggatccactaggtgaagccagctgggctcctgagtcgtgaagatctgcagcttcactcctgagcccagcaagaccacgagcccaccgggagcaacgaacaactccaggtgctaccttaagagctgtaacactcacggcgaaggtctgcagcttcactc

SEQ ID NO: 4421 - DNA, 963 bp, Homo sapiens
  SIMILAR (760)..(626): 661254mologous to Homo sapiens unnamed protein product,accession number AX088212,Smith-Waterman Score=158.
atgtccaagaatgaccccaaaagattttcaatgaccagttctatggttaccaacctattgggccacgtcatagacatcaagtggatgagcattgcctttatcaatgacagggcttggccatcagcgtttgtgtcagatgagaatcatgcaaggatccagtgtgatgggcagcatcgcttcgaggtcagtgttagtgagctgcctgatgagacagatgtctcctccacggttctggatcttgaccatcagggcctgggccccccaccccctccagcagagcctgatccactccagctgctgctccagcaactctttggcttgggccagctcagctgtgtggtggggccagggccctggaggggcctgtcttcagccagggacaagcagaacattatggtcagcatcatccacaaggtcaagaggccacagagccccctgagggcagtatactggccccttcgatattgtatcctacccagcaggagggccacagtgaactagatctacttggtgtgaactttgaagtcctcacctctgcttgtcacctatcaggctatcaggatgaactgataaatcagctgaagggagcaaagtcacagtgcgtgagaattgttttggagatttactcaggagcccagctggcttcacttagtggatcccgcaccggggctgcaggtggagctgcctaccagtgccgcacggtgcgcttgcattcctcagcccttgggtggtcgaatgggactgggcgccgtggagcagggggtggtgctcgtcgaggaggctcgggccgcacaggagcccttggagtggggaggagatttagcattccttggagacctgaagggatgcagtgagcttaagagtttccaagagcttatcaatcagtcagcccttgttcatccccgagaggatgtgtggtggtatcggggtggacctttactgggcactctgctgaataactag

SEQ ID NO: 4422 - DNA, 1432 bp, Homo sapiens
  SIMILAR (1198)..(1386): 1001254mologous to Homo sapiens Human secreted protein encoded by gene No. 38,accession number AAY27604,Smith-Waterman Score=332.
ctaaaactgaaaaatctcaaaggagatcattggaactgacttgttcatttattttttgtttttaaattaagaaagattacacaaaataagtgttactgtactttaagctattacaaatatccaacttttaaagatatgtaagaatcactaatattctagaaagcacatatatagtaaaagggcatcctttaaatgtagaacgggtaaacatgaaacagttccatgcttgaattgttaagtatctagggggtaaacattgaatgggagaatcatttattgggttaaggtcccttccttgtcattctgggatctgtgaatcacattgtaattcctgttgacaaagctttacttgttaacatcagttgatactgacattctccataaagatatagaatgaaaatatctattaaaaatagtttatcattgttttagcttttttgttttgtttgttttgagacagagtctcactgtcacccaggcttgagtgcagcggtgtgatcttgggctcaatgcaacctccacctcccaggttcaatagattctcccaccttgggcctcccaagtaggctggggattactgggcatgcaccactatgcctgggccagttttttgtatttttagtagaggatgggggttttcaccatgttgggccaggctggactcgaactcctgacctcaagtgatccgcccacctcagcagtcccaaagtgccgggattataggcatgagccactgcgcctagcctgttgcagctttttaaagcaggaaaatatccatataaactgttgggttagaatctatattagaatctttcaaactaattgaaaacaggaagactatcatctaagtagccagataatctgggctcacatagaatgattccatggcactggcttaaaaaatactttgcaagtgttttaatttttaaagcgtaactaattcttcaaatatggtatgctggtagaatatgtattccataagtactttttgtatatgtattcttaaattttaaaaagtcaactgaatgcgcaaagatgatataattttggatgtagacatttaaactagattcccagtcctctccttcaaaagcttgggtctttgtttttcctataggggaaaaaagtccaaaattaagtttccaaaaactatcctccaaagtagtattgtgcttgtagtaaatgaaggttggatggatggatactgacaatggtggcaggcatttcaagccttttaaattagtactttttgtcgtcttgcttattaaaattttgttaattttagcaaagaccaattgttgtgataaactggtgttttttggatgcttcaagcacacgttaaccaattttttaattccccttttggttcctcccattgttctaaaataggactttcatattattaaaaccctcaaaagaagatccacccagg

SEQ ID NO: 4423 - DNA, 905 bp, Homo sapiens
  SIMILAR (566)..(739): 561254mologous to Homo sapiens Amino acid sequence of a human secreted protein,accession number AAY19566,Smith-Waterman Score= 147.
atgaccattcgatttagcaataaggagatcaataacgacctcagggagggcagtatcagcaggaggatcgtagaagttaaagacttaaaacaaactttggcaattaagacaggataccaagattcaaatgcctggttggaatggatcaaatattccatccacacgttaaacaaaagcaattgttatgcttgtgcacatggcaggccagaggccctgattgtccctcttcccactaaggtggtcctccagttgaccaggcatgggctgcagggtagctattttccaggattctacggcctggagtaacaagttgtgccaagctctctctctgctatatctcaaagtccagcaccctgcgggtcagcccctgagggccgtccagcttccgtctcccaacactaagttcacttcatgtctctcatggcagggaggagacttagcattccttggagacctgaagggatgcagtgagcttaagaattttcaagagcttatcagtcagtcagcccttgttcatccccgagcggatgtgtgatggtattgtcgtggacctttattgggcactctgccgaataactagagtggcacttgtgctttagcctatttggctatccctttcaccctggcatttcatcaaccagaggaaggaaaaaaaaaaataataagacatcgtaaagcgagagaagccccttatgggtctttcaactctcacatctatttagatgcaatcgaagccccgcaaggaacaccagatcaatttaaagtccgaaatcaaatagctacaggatttaagtcaatattttggtagatgacagtcaataaaaatgtagattagataaactgcatctattacacccaacagcaatgagctaaaaatgagttgaaaaaaaaaaaaaaaaaattcc

SEQ ID NO: 4424 - DNA, 5907 bp, Homo sapiens
  SIMILAR (1090)..(926): 871254mologous to Homo sapiens eIF4GII,accession number AF012072,Smith-Waterman Score=246.
ttttttttttttttttttttttttttttttaaacttgcaatgtttgtctttattttgttctttatattttcaaagtgaaaagaaatagtactgagtcaatttctttttgtttttttaaatatttgttctatgtatttacaagccttaaagttgctctaaagatttcaagagatattaagagtacttttctcagggtagcactttttttttttttaaacaattcttgggagttctgtgggtccacagcatttccttctgtttcaatgttatgtatgttttgattactattgtgatttttttaaaattttctgaagcaagctgagaggcaggcagaaatgatttgatggccaaaaaaaaaaaaaaatctttcttaaccttggttcaccccaaactttctcaaatctgggactaaatggctataccttaaaacaaacatgaggtgacatcttgaaggggagggaaattttcattctctgcttttctattatacaagttgtttacagaaactgcaaattaaaaaattacactggcatttgcagtccttaaaataaattaaaagttctcaacttttttttttttttgctaaacatttttttaagtatgagtccttgtttaaaaagaaaagattaaaacagaaaatattttctataaataatacatgtattttggttttagtgctcccgccctaaggtttgaagtttacttttatccagtacctttttcctccatgatcacctttttttctctttcccctctcccactcgtgcacacgtgggggtttctgcgagaattggccttgctgcactgtgattgggcgaaggacgtgaaactttttaaaaaaaatacttaaaattggttcttttgtttcattttgtgtatttgaagttttaggttatcctcagactcctcttctgcttcccgcaggccacgtgaagaatgccgtgacaggatttcagaggccacggcccttcccattctgctctgcagggtccttgctgctctcccatttgtagaaggcatcctcggagatcacctcctcgtcatatagacaatcaaaaaacatccgcagcaaattggcagggttgatcaagttttactatcgatgcttgtagtgcataaagtgcttgcagttccttctctgtatctgagtctaggtacttgagtaagatcggcactctctgcttgataacagcagtgtccactctgaaggtagaagagtcggctataatagctgctttacaaacagcagtcattaaagctctaaggaatgtaggtgaactcatctggatttcgtctagattagcctctacccagtcaaagatctgttcatcattcgctttgtcctcaataatgagtttctcgagtcgcttatacagctcttcggcagacagttctttctttgaaagtgcttcagaggaacagggactgtcagactctatgaagtccaacttctgctccaaaagaaaattatgtacatcttctccttctggtaaaaagtccttccagctgaggtcagcctccctccataaggctcccactttcttatggctcatttgtttgcatagtaggtgcaatatttcagatagcaagaccccagctcttccaacaggaagtaaaggtttgctaaattctatggtaagttctctcatggagattccaccttcttttaacatgggggtcaccagttcagcaaggtacaaccaaatatggggaatatcaatggccatgtcatctgccaattccaaagtttctgaaaaacctttgaaaaagtcctgtttgctgagtttttctgactgtaccagctgatagagtagttggcccatgtgatccctggtgatctggctcctttccagggtggactccactcccactctcacaaaaacatgtagtaggccctgggcattcagctcttccacacactgcatggcttccttaaaatcattaatgtgtagaaattcatcaatgatagatttcgacttcctctccagttcctcttctgataatgcagccttgtcatgagctgacattgctgaaatttctggttttgctgactcccttgttttatttcgctcagcctcagtgctgttcctctccacatccacacctcctgtgagctgcttcacggtctccagcatctctctccgctgctcttcttgagactgattgtctagcaggtctttactgctgccacccctcatgaaagtatttggccgagctgttgcagatggaaggggcttgtcattcttctccctgcccatacttccacgactagttaaggtccttcgggaatcaaactctacaggcgtggatggcgtggaccctgagggtgctggaggttgcagggcagagaatctgtttaaactggaagcacttgaccgtaaggcatcagtctcacttgcctttgctccaccactgctgccttttccccagctgcctagctgtgctttaggtaccagctgaattttttcatcaattgtaggcttagtgatttttaggaattttgaggggtccagtacccgactgttcttggccccttgtacagtgttccacccaccttcgtccactctctggacacctggtcttctcttctctttggtcatgagttgctggaccttcctttgctcttcttgttcttctattttagcctctttgtgaatctgttcgatagttttaggcccttgatctgctcttcgagatacccaattgcacagccttaggtctataacatcttgaagcatgaaccgaatcctagatgaggtttttctttctttcacaattttctccatctgattaaagtactggtccatacgtggctttgctttttcaaagtccaagtctttgccaatggtggtgagcaggcgacacaggcactccagggattcttcatcatggttctttagcagcttcaccacacagtcatgcatgatggcttcagtcagcattttgagtttaaagagttctccaataaacttgatgttgcccaatggatctccgccgggctttgtccttggcttcttccagttcatcatgaagccttgtccttcctctggagcactggcagcctcaagttctttctgcttcttctcaaagacatcatcatctgctttatctttttcaaactccttctggcaacggttcagtagcagcttccggaaattcactgtgttaccaggcttgtctgccatgggtactttcagcgttactagacatcgacacatgtttgcgtaacgcacagagaaactgggttcatcaatagccttctcaaagaccaggtcaataactcctttcagccgctcctctgtgtcaacagtaagtcctgacacttgcttcatcagttgattgaacatctgtggtgtcaatttatttaagatacttcgaacttttctaaaaagctcctgggttttaatgttttcgggatcatcggcttggctgtctcgtttttggcttggcttccaggcattttctgcctttttcaggtgtacatcttcttttacagaaactgtgatgatctttctgggttctcttctttggccaggttgagatcttcgtgacccaacattcaacaaaggtacgcctcttccaccaggtgtctgccttccaaaatcagcaaaggctggtgtaaagtctggtcctcgaggcaaaattcgaggatccagagttcgcattggcaatttgggttggttgatcttgtcaagaaccacatcactgataggaggcaggccctctggtttttgtatacaggcaggcatgaactggaagtccagcagaaactccctgtcatactgcttcttaccttcagtatcagtaggcttccaggattctggtttaaatggaaatgtaaccccatcaccagaactatctgtggagcctgaattagcatctattccttcaccctcagaaacactctcagcaccattacgtactggctcagcttcttctccattttcttccacagctttcactttttttaggtcagaggggtctctttcaggatgaaacccctggctcattttatcttgttcagattcaagtactttgtcaatggaaagctcctcttcagctttaagctccaattctgcctctaacatctcttcagtggttcgggtccgatcttttggtttcttccatgtctttggtacagttatagctatttgagctgggacagggctccttcttgaatttaagttttgagaatccaaaatctcttctgtttgcccatctgcttctacctctattttgttctgaatctcttttgcatcttcactaaggcaagttcttatgctctcgtcctcctctaggactctctggactgtgatggcagcactcggagaactaacagtagtggcagcagcaggaacaatgactggagtgtgaggaggagaagctggaggagttggaggagttggaggaaaggaaggaactgtggaaggggtgatgggagctgggatacactccagtttcatttcttctgggggattttcgagaatctccaattcaagagtcaatggcaatacttcctgttttactatttccacaatgctctccgtggctgataatttttcgctaactccatttatttcattaattaggttagtactagaaaccagtggaatatcattaggtgctacactacagggtttcttgcatatatcatcatcattttcatttgttggtaaagggtctgatgtttctgtgcaagatgtgaggctgggtataggaattgtgtcttctcttggggatgagagttcacatctgtcatctatagcagtggtgaatattggttggctactaagagcagaagaggtgggggctgcaattgtacttcgagcaacagaagaaacagtggtaggtgatggaggcagaggaagctctgctatggatactattgcagtagtttcagatgtctggccttcttgttctttcttctctccactgaggactagcctaaggactggggaaggagactttaacactggatctggttttggcttctcctcttgcttctggtcgctagctgcagtgacaggggtgctggcagcaagatgagcgctctccacagtcccataaaccacagggctgtgctcggggacctggctgggcagctgctgaggaggagtaggtgtggacgtgggtcttcctatgggtggagtaggatttctgctgccacctccagacataatctcctctgttatgtctttacctccctggtttggatcccgaattcttatagtttttttctctctcttggctggaggcggctgttgctgcgtaggcactatgataggtgctgactgatacaccggctgacttgggtaaaaaggcgttccataagcattggggaagtccccaggtcctggtccaggataaaaaggacctggccccggtggttgaactggatattgttgggggggcccaacataaggagggccactatgacggtactgtggtatacagtactgaggcccctggggcactgggtacggcatgggcagatggttaaccatcatgatgtgctgattagcctggtacactgcagtgggtgtctgtgcaccaggacgaatggaaggactgctgttcgggatggtagctctaggaggctgtatttgaggcctctggaaaaacggagaacgggtttgaggttgtgaattcattgtctgaggggtttgagggtataccagcgtggttggacctgcattctgtccagagggataaggggtttgagagagtccaggggacgatgcatgtcccgggggcgttgccgcaagatttggatgccccttgtttatttcatgtgctgaataaggggatggggtaggggttcccggctgtcttgccacttgtgttaccttgggaaaatgatgtgatcgctccaaacttcagtttcctcatcaatactctgtgggattg

SEQ ID NO: 4425 - DNA, 4428 bp, Homo sapiens
  SIMILAR (2897)..(3151): 621254mologous to Homo sapiens Human myelin oligodendrocyte glycoprotein gene,accession number AAZ29204,Smith-Waterman Score= 257.
gggtctccatagtttagttttttccagaatgtcatatagttggaatcatacagtatacagcctcttcagattggcttctagtcacctggcaatgtgcatttaaatttcctctatgtcttttcatgggttgatagctcatttctttttagcactgaataatattttggttgtaccacagttcacccattcatatactaaaggacatcttagttgcttccaggttttagcaattatgaatcaagctgctataaacattcatgtgtaggtttttgtgtagacataagtttgcacctcctttgggtaaaatgcaaagagtgatattgctgtatcagatggtaagaatatgtttaattttatcagaaactgccagactgtcttgcaaaatggttacacctgtttgtattcccttcagcaatacgttgaagttcttgttgcatcgcatcttggccagcatttgtttttgtcagtgtttcggattgtcaccattctagtaggttttgtagtgctgtctcattttaatttgcagttccgtcaatgtaatttgcaattctatcaatggcatacgatgtaaagtttcattttaacaatcatatatctgaagaatattttcccagatattcatgggtgaagatatttaggaatgcatgtattgaggggagaaaacttgggtatatatatataaagagattgtcttatattttttaaactacccctcactaactagcagcgaataacatatattggaaattgttgtttttaattgcctgaatttcaaatgttaagttttccaagcattcactattgattaggttggaaagtttacatgctattgagttgtatcaatagaaacgtatatttttttccttttcattttaaaacgtttaaaaatttttttggagtgaggtctcattctgtcacccaggctggagtgcagtgacgcaatcataggtcaccatacctctaattcctgacctcaagggatcctcctgcgttggtcccccaaaaccctgagattgcaggcactggacaccatgcctgacccttatttacttttttttttttaaagtggagtctccctctgtcgcccacgctggagtgcagtggcacgatctcagctcactgctaactctgtctcctgatcaagtgattctcctgtctcagccttctaagtagctgggatacaggggtgcaccaccatgcccggctaactttttttttttttttttttttttgagacagagtctttctctgttgcccaggctagagagcagtggtgttatcatggctcattgcagcctccaccttctggtttcaagcgattttcctgcctcagcctcccgagtagctgggactacaggtgcccaccaccacacctggctgattttttgtgtttttaatagagatgggtttcaccatgttgaccaggctggtctcaaactcctgacctcaggtgatctgcccgcttcggcctcccaaactgcttggattacaggcttgagccaccgtgcttggccttaatttcttttgtatttttagtatttatggggtttcaccatgttggccaggctggtccctaactcctgacctcaagtgatctgcctgcctcagcctcccatagtgctgggattacaagtgtgagccaccatgtccggcccagtttacttttattagaaaagattcatttgctgatgtatattgttcagtatcttaatacttttttcatgagttaatactttcttggcaaagaggcctaatatcttgaggtttttaaaaatacccatgaatatttcatgtaagtgatttttgcttcattctttgtgtctacaatttgttatctaatatttctggctcctaacgattttcttttttgttttttttgagatgcagtcttgctgtgtcgccaagcttttcatagagatggggtttcaccatcatggccaggctggtctcgatcccctgacctcaggtgatctgcctgcctcagccccccaaagtgctgaggttacagggagtgagccaccgcgcctgggccaacagttcttatttaatctttcttcatggaaagtttaattgggttataaaccttattgttctgttatggtaaccttctttagtgaagggaaaaggtaatagaatatagtttgctcacactaaaatattttcaattgctaaatatagttttttttagggaatttatttttaggaatatttagatattcctaattgattaaaaaggctgaatcctgttgtcagaacttactatatttttctctagaattatatattttttagtggatttaaatgttctacattattttagcattttcgttttttgagacatagaacctaaatagcatgtggtgattcctggacaattcttaaagctttttttgagataaacatgagaggtctttatcaataaagaattttgactgtgacctaaaaaagagtattgattgtgcccattaagattgcattcactcaaacaagagttatattgataaagtgttagatgaatacctctcgtcattgatcattaaatggtgttccagttgacacagttaaagcagtttttatttagttcagtgagtgtatccccaagtttaggtggtcatactacactttagctttacctgagtactgtgttaagtcattcctttaaattaggttattggtaatacacacacacatatacacccacaaaatatacgtgttgagtatcccttatctaaaatgtttgggactagaagtgtattggaatttggatttttttgaattttgaaacatttgtgtattatgtaatgagatatcttggggatgggatccagatccaaatatgaaattcacttatgtttcatatatgtcttatatacatagcctgaaggtaacttcatagaatttaatttttttattttttattttttatttttttgagacggagtcttgctgtatcgcccaggctggagtgcagtggcgtgatcttggctcactgcaggctccgcctcccgggttcatgccattctcctgcctcagcctcccgagtagctgggactacaggtgccctccaccatgcccagctaatttttttgtgtttttggtagagacggggtttcgccgtgttagctgggatggtcttgatctcttgacctcgcgatccatccgcctcagcctcccaaagtgctgggattatgtgtctgtccaaaaaaaattttttttaagagacagtgtctcactgtgtgacacaggcttgtcttgaattcctgggctcgagcaattggcatctcagcctcccaaagtgctgggattataggcatgaaccactatgcctggctcagtagaatattttaagtaattttgtgcgtgaaagttttgcctacattttgacttagacccatcacatgaggtcaagtatggaatcttccactttgggcatcgtgttggtgtttaaaaagttttggattttggagcacttggggttttggatggttatgctaaccttgtttcatgatagcccaagtactaaatattaaaggaaaaatatccatgttctgcacaaaaagtgccatgtgccagtagtggcatgtttaccatgccactttggaaaatatttgttaggttaatttaccttacttagtgcaagcttcctgttctatattttcatgaaagaaaactgactgcgattttaaaaatattgcttctcaaaccttttggcttccatatttctttaattttccatatcactattaaaaattattgagggcgccaaagtcctgctaaaggattatatcaatatttaccatattataagccaaagcgaggttttaaagaaaacgttacagagttaagagtcgctttcttgtacatttttgcaaatgtcttttaatgttccctttagtgtagtgggaagaatggtgttgttttatgttttgtaaatttgttttactctataaaaaatggttggcttcccacgtttgcttttgcagtccatctattgcagaaagctttttaattaaaacgcatcaaagaagacctgactttatacggagaagtgataagggaggagtatgttaataacctttaaagataattgtggatttttttgatactactgtaaaacttaaaagtactcttacatcgaaattaattgggttggctgggcatggtggctcacacctgtaatcacagcactttggggggttgaggcgggtggatcacttgagctcaggagttcaagaccatcccaagtaacatggtgaaaccccatttctgcaaaagacacaaaaattatctgggcgtgatggtatctgcctatagttccagctacccttgaggctgaggcaggaggattgcttgaatctgggagtcagaggctgcatgagttgagatcacgccattgcaccccagcctgggcaacagagtgagactgac

SEQ ID NO: 4426 - DNA, 483 bp, Homo sapiens
  SIMILAR (304)..(137): 591254mologous to Homo sapiens Human secreted protein, SEQ ID NO: 7879,accession number AAG03798,Smith-Waterman Score=155.
tttttttgagatggagtctcgctctgttgccagactggagtgcaatggtgcgatctccgctcactgcaacctccacctcctgggttcaaacgattctcctgcctcagcctcccgagtagctgggactacaggcaccgccaccacgcccggctaatttttgtatttttagtagagacagggtttcaccatgttagccaggatggtctccgtctcttgacctcgtgatccacccgccttggcctcccaaagtgcggggattacagacgcgagctaccgtgcccagccgcaacattgattttttaagtaaagtcgtgaacgtttatttatttatatcaaaatatatttgttgaattttgccatatgtctaatatattgcttggtgctgatgattcagtggtgtgtgggcacttgaattgatgaattttaacatagtatattacaatagtatttggatgtttaatcaataaatgagtaaattctctg

SEQ ID NO: 4427 - DNA, 415 bp, Homo sapiens
  misc_feature (1)...(415): n = a,t,c or g
acctataaaagatattttaaacttgtatctaatacttccaggtgtttggctgtttgatctatgcaaaagtacagccnnnnnnnnnnnnnnnnnnnnnnnnnnnnnnnnnnnnnnnnnnnnnnnnnnnnnnnnnnnnnnnnnnnnnnnnnnnnnnnttagattatgaataaaatggaaagcttattttactgctttaatgcagacatcctcataaaacaagactactttcaccaccaccagcatttatacatatatacaaagccagtttaagtacatatacatccacttacacatatttgtaaccactaagcccaaattaattttcccatattccagccgtagcaaatgaatcgcttataagcaacagaaacataaggttaaattgggaaatcaacagttttaccgnacgcgtggg

SEQ ID NO: 4428 - DNA, 1637 bp, Homo sapiens
  misc_feature (1)...(1637): n = a,t,c or g
cccacgcgtacgaatttaaccttaggtttctggtgcttataatcgattcatttgctacggctggaatatgggaaaattaatttgggcttagtggttacaaatatgtgtaagtggatgtatatgtacttaaactggctttgtatatatgtataaatgctggtggtggtgaaagtagtcttgttttatgaggatgtctgcattaaagcagtaaaataagctttccattttattcataatctaatgtgtgtgtatatatgtatgtgtgtatgtgtgtggaatatagaaggattatatatccccccccagagatatatacatatggctgtacttttgcatagatcaaacagccaaacacctggaagtattagatacaagtttaaaatatcttttataggttttatataaaaatgtctgagtatgattttgtgtgaaagttctgataccagttgtaatagagtcaaatttatgtgagcaataaagaagaaattggcagatattggaaaaatattttgtgaaaagctgtatttattataaatactaaggccatgacatagtaccattggggttaagtcattttcccaatcgtatttatagatttaaccnggatatgttaagtgcgnctctgttaatatgtcgaagttttaaaagccaggggcacaatntgtntggcagcacaaaattgtgtaattttggacaaaattaataacttgcaaattttggggtcaatgaaaagtttgcaaatatagtaaaatgcacgattgactgttgctttgtgcctcagtatttaatttgtttcagtaaacttactttattactgtttatgatttcagataaaaatagttgctgagtaaattttacttgtaatctacaattggctttttaaaaataacctgttgatatataattgtcagtccaaatgaatatgtgaaacagctggaattgtacaaattttggttgtatttaaaagctcagtttcctttttgttttattgtatgcgttgggtttgcagcatgaacttgcacagataatgcacgttttctggttaagtaaacatgatgcacactattctgtaacagaaagccctattgtgccttacctgtgtgcttttggtgggcaccttgtttatgaagaataaaaaatgatttgttatctgaagagaataaattttaaattctccagtttatgtctcagatgctaacgtgtggaaaatataaatatatataatatataaagtaaccagtcttcctgtattttatgtgccatccatagtgatttatctgagcttagttgaccccccatctttgtaaccctgttgcaaagagtgaatgtaaaaaatagttgtggcattttaaaaggtcgcctttgatgcagatgcatctttttcttgccttctaaaacatatttccatgtaaacattgtacattttattattgtaatatatactattatgcagcttattttacctgaaactgttaagccgaccaagatccctccttgcaagacagatgggaatgtgtataataactaggtatttgagaagttctgaagtttgatgtaatctgttacttgtcctgttaaaaaaaggaaaaaattctaattaaaaatttattagttttttaaaaaaaaaaaaaaaaaaa

SEQ ID NO: 4429 - DNA, 1653 bp, Homo sapiens
  SIMILAR (540)..(1202): 511254mologous to Mus musculus putative,accession number AK016495,Smith-Waterman Score=393.
  misc_feature (1)...(1653): n = a,t,c or g
atttgccctcgccgcacggctgcaggaattcggcacgagaaaatactttactgagtcaggacttgtgggattactggaacaagcagctgcttccttctctatggctggcatgtatgaagcagttaatgaagtttacaaagtacttattcctattcatgaagctaatcgggatgcaaagaaactatccacaattcatggtaaacttcaagaagcattcagcaaaattgttcatcagagtactggctgggagcggatgtttggcacctattttcgtgttggtttttatggaaccaagttcggggatttggatgaacaagaatttgtttacaaggagcctgcaataaccaaacttgcagagatatctcacagattggagggattttacggagaaagatttggagaggatgtggttgaagtaatcaaagactctaatcctgtagacaagtgtaaattagatcctaacaaggcatatattcagattacctatgtggagccatactttgacacatatgagatgaaggacagaatcacctatttcagacaaaaattacaatcttccgtccgattcatgtactgtacaccctttactttagatggccgtgcccatgggggaacttccatggaacaattccaaaagggaagacccattcctngactacgtctcatgccttttcccttatattaaaaccaggggtcaatgtcactcataaagaagagatcatccttacacccatttgaggttggcaattgaggacatgcagaaaaagacacaggagttggcatttgcaacacatcaggatcccgcagaccccaaaatgcttcagatggtactccaggggatctgtagggcaccacagtgaatcaggggcctttgggaagttgcccagggtttttctgttctggaaatacctagtgacccaaagctctttcagacattcattaataaacttgcgactcttgcttttaaagattttactaaaaggtgtgaagatgccttaagaaaaaataagagcttaattgggccggatcaaaaggagtatcaaagggaactgggagagaaactatcatcggccttaaagagggccctaccagccacttgatccaacagaaagatccctcagtttttacaagggcagtattgcctgtcacctgcccacagagattccttcagtcggattgaggccttcggcaaaatggatctctaaactgaatgccacttgttttaattccatctgcaaaagagcccatgtattccaaccatccgagtgtggaaaaggatcctattggaaaaccaaccatgggaatgggaaattcctggaaattaattaattcattggaaggaattgcagtggcccaaggaaaatatcaaatgtaggattgttaacgccttgagaatccatggcctatggtttcctaatgttcctggtaacaagctgttatcttttaagacattttaaatgactcaaaggtacactatacatttaccattatttataccatagctaaggttaaaaatttattcactttaagttcgtattttttaatttatattaccatttatagattcattttggaaccattttaaatgtagtaatgcttattttaaaggtactattaaatatgtgaatgtttacactaaaaaaaaaaaaaaaa

SEQ ID NO: 4430 - DNA, 1360 bp, Homo sapiens
  SIMILAR (86)..(844): 391254mologous to Homo sapiens putative p150,accession number U93567,Smith-Waterman Score=395.
gaagacacatcggggaaagaacagtcttcattaagtgttcttaataaagatgctgggaaaactgcacttccacatgcaaaacaatgaaatcagacccttatcttagacctacacaacaatcaattcaaaatggataaaagacctaaatgtaagaccagaaactatagaagagaacataggagaaaagttcctggacactgacccttggcaatgattttttggatatcacaccaaaagctcagtcaacaaaaacaaaaacaaatgtgactacatcaaaccaaaaagcttctgacagtaaaagaaacagtcaacaaaatgaaacagtagcctacagattgagtaaaaaatatttgtaaggcatatatatggaaaagggttagtatccaaaatttataaagaattcatacaactcaatttttaaaaatgggcaaaagacctgaaaagacatttctccgaagacgacacacagatggccaacaggtatataaaagggtgctcaacataattaatcatcaaggaaatgcattttaaaaaccactcgaagtactacctctcaccagttaggctagctgttatcaaaaaaaacaaaagacaacaaatgttgtgatggtgtggaataaaaggaactctgtgcactgttggtgggaatgtagactggtacagccattatggaaaacagaatggaagtttctaaagaaaaataaaactaccatacgatccagcaatccctcttctgggcatatactcaaagtaaatgaaatcaccaccttgtaaatatatctgcagtccgtgttcattgcagcattattcatagtagccaacatggagacaactgaagtgtccgttgacagatgaataaggaaactgtgtatatatatgccctacacaccaatggaatattatccacccctaaaaacaaaaaaaaacccaacgatatcttgccatttgctaccaacatggatgggcctgaaggacactgtgctaaatgaaataagccagacagaaaaaaagatactgcataatttcacgatatatgtggaatctaaaaaaaaaatttaaatatataaagagcaaacctggttataggggggatagggagaaatggggaatgtaggtcaaaggattcaaggtagcagatatgtaggatgaataagtctagagatctattgtacaacatgaggattttaggtaacaaatttgtactgtatttgggattcatggtaaatgagtagatgtcagctgctgttgtcaaaaaacaaaaaatatgtgggtaactgagatgatggatatgttaatttgtttcacattgtataccttaaatgtatgcaataaaatttattttaaaaataaaaaaaaaaaa

SEQ ID NO: 4431 - DNA, 409 bp, Homo sapiens
gcccctggcgttggccttggcaatggcctatccctcctgccccggagatgcacatggcccgccgcggcccggtccactgtctcctccctcctagcctgcctctgtcccaattctcctctcaatcttctgcgtgattcctctgtcctcagtcatacccagttgaggggctcaccccacggattctacccgctggagggggccatgttccctgctcccgcccttcctcctcaccaggccttgcctcggtatcagcccccaggtggggagctctgctgctgcctggaccatgccctacttccctctcctcgggatgtaggaaagggagggccagccctagagctcacccaccccccacagcaagcctgtgtactgcgctctggccaccttgcttctcgcctccataacctac

SEQ ID NO: 4432 - DNA, 419 bp, Homo sapiens
  misc_feature (1)...(419): n = a,t,c or g
agaaaaaggtttcctttttaggtttttttaaaaattccacttgggtgggggcgggtggttccccccgttatttccgggccctgggggggccaggggtgtgggttcttaggtccggggttttaggcccccctgggcccccccattgaaccccccttttccctttaaaccccaaaattcccccggcctggttgtttttgccttccgttnnnnnnnnnnnggggggcggggccggggaattccccccaccccggaggccaaggtttcggttaacaaaaattccgcccctgcccttccgcctggggcacaaaaggaggcttcccccnnnnnnnnnnnnnnnnnccaacaacgacattatgagatttttctttttgcgatttctcttttctcttttctgagacagcctcgccattgttgcccag

SEQ ID NO: 4433 - DNA, 3208 bp, Homo sapiens
  SIMILAR (1)..(1827): 991254mologous to Homo sapiens dJ717M23.1 (novel protein),accession number AL050321,Smith-Waterman Score=3130.
atggatagtagcatccacctgagtagtctgatcagtcggcatgatgacgaagccacgagaacatcgacctcagaaggactggaggaaggtgaagtggagggagagacgctcctgatcgtcgaatccgaggatcaggcatcagtggacttatcgcacgaccagagtggggattccctcaacagtgatgaaggagacgtgtcttggatggaggagcagctgtcctacttctgtgacaagtgccaaaaatggataccagccagtcagctgagggaacagctcagttaccttaagggtgataatttttttaggtttacttgttcggattgctcagcagatggcaaggagcagtatgaaaggctgaagctgacatggcagcaagtcgtcatgttggcaatgtacaacttgtctctggaaggaagtggacgtcaaggttatttcaggtggaaagaagatatctgtgcttttattgagaaacattggacttttttactagggaataggaaaaagacgtctacctggtggagcaccgtggcaggttgcctcagcgtgggaagtcccatgtacttccgttcaggtgctcaggaatttggagagccaggatggtggaaacttgttcataacaagcccccaacgatgaaacctgaaggagagaagttgtctgcctctactttgaaaataaaagcctcaaaaccaactttagatcccatcattactgttgagggacttagaaaacgagcaagtcggaatcctgtggaatctgccatggaattaaaagagaaaaggtctcgaactcaggaagcaaaagacattagaagagcccagaaggaggccgctggctttcttgacaggagcacatcttctacccctgtaaaattcataagccgaggccgcaggccagatgtgattctggaaaaaggcgaagtgattgacttttcctccttgagctcctctgaccgcaccccgctgacaagcccatctccttctccttctctggatttctctgcccctggtacacctgcctctcattctgccacacctagcttgctttcagaagcagatctgattccagatgtgatgcccccacaagccttgtttcatgatgacgatgagatggaaggcgatggagtcatagacccagggatggagtacgtcccaccccctgctgggtcagtagcttctgggccagtggttggggtcagaaagaaggtcagaggccctgaacagataaagcaggaggtagagagtgaggaggaaaaacccgacaggatggatattgacagtgaagacacagattcaaacacatctttgcaaacaagggctagagaaaagaggaagcctcagctggagaaggacacaaagccgaaagagcccaggtatactcccgtgagcatctacgaggaaaagctgctgctcaagaggctggaagcttgtcccggtgctgttgccatgactccggaagctcggagactgaaacgcaaactgattgtcagacaagcgaaaagggataggggattaccactttttgacttggatcaagttgttaatgctgctcttttgttagttgacgggatttatggagccaaagaaggaggaatttccagacttccagctggacaagccacgtacagaaccacctgtcaggacttcagaatccttgaccgataccagacttccttgccgtccaggaagggatttcgacaccagaccaccaagtttttgtatcgcttggtaggatcagaagatatggctgtggaccagagtattgtcagcccttatacctctcggatcttgaaaccttatatcaggagcgaccctcactggacgccggagcccgacgcacctctcgattactgttatgtgcggccaaatcacatcccaacgatcaactccatgtgtcaggagtttttttggcctggcattgacctgtctgagtgtctgcagtacccagacttcagtgttgttgttctttataaaaaagtcatcattgcctttggcttcatggttcctgatgtgaaatacaatgaagcttacatttcatttctgttcgtccaccctgaatggagaagagcagggattgcaactttcatgatctatcatctgattcagacctgcatgggcaaggacgtaacccttcacgtctcagcaagcaaccctgctatgctactgtaccagaagtttggattcaagactgaagaatatgtattagatttctatgataaatattacccattggagagtacagagtgtaaacacgcattctttctgaggctccggcgctgatgcgaatacagctcacagagaaacgcatgtgctattggagaacaggtctttgtggagatctaaaggcagtgattgatttcacagggagctctaatctctgtgattacatggtccttcaaactcccaaccaaagtgagaaaagcggcatgcagtgaaatgagcagtgagcagccctttagcaaaatcgccctccagtccttcctggagatgccttcagccagcatcccagactccacagttatttatgaatgatgtcgtgattctccctccacctgacagtttgtaagagtgaaagagcatctaacctgatgctcttggagagagataacctgtctgtcataacttaaaggatgagaaaatgtggtgtagctattaaagattcatgcagtcccaaaaggcactgtcctgggatgatgagagattataaggtgatttcataaaaggaatccaaccctgtgcccggccattgatgtgttgtcattgaatccaggaggatttctagggcactgaagttttgttgtttcttttgctgactttggttacagtcagaaaaaataaactagatgtttgtgtctacatgttctacctgttgtacctattagcatcttcctgcagggacttgggcccatggcctgggaggttggtttgggattggggttgttgggcagcctgccattcacctggcctatcctggcccttctcatgcccaagacagttgtttcacaggagtggaagtgtgggtgatgcaagtagaaccctctagatgtaccctgtgtggtctgcaggactggactgtttgctgtgtttgtggatgttggcgatagactgtcaattaggttgtttgtgatccaacaagaacatttccaaaagtatctaggtgttctcaaataaaaagctttctttgcacaacccatggccagagcgtcaa

SEQ ID NO: 4434 - DNA, 399 bp, Homo sapiens
  SIMILAR (55)..(240): 581254mologous to Homo sapiens PRO2550,accession number AF130089,Smith-Waterman Score=156.
  misc_feature (1)...(399): n = a,t,c or g
tgaatcatagctcactgtaaactcaaacgccccagttcaaatgacccacctcagcctccaagtagctgggactgcaggcatgcgccaccacacccagctaattaattttttttttaagagatggggtcttgccatgttgcccaggcnggntctcaaacacctgccctcaatccctcaagatatcctcccacgtcagcatcccaaggtgctgagattacagtcatgagccactgtgcccagctatatccctgtttcttgaccaaggagaaattagccattcttgaatcaggaggacattgctatcagagacctcaaatggagaatactgaagaatcatccagaagcagaaaactgcaggaaggggacaacttccactgaagaccataggaacaagctaac

SEQ ID NO: 4435 - DNA, 507 bp, Homo sapiens
  SIMILAR (72)..(296): 731254mologous to Homo sapiens Human myelin oligodendrocyte glycoprotein gene,accession number AAZ29204,Smith-Waterman Score= 250.
atttccagtcacagaacataaaacttaatctaatgggtgttttgttttgttttgagacagaggctcactctgtcacctaggctggactgcagtggctcgatctcagctcactgcagcctccacctcccggattcaagcaatttcctgcctcagcctcttgagtagctgggattacaggagccctccacgaggcccagttaatttttgtatctttagtggagacgaggtttccccctattggtcaggctggtctcaaacttctgacctcaagtgatccactcgcctcagcctctcaaaagtgctgggattacaggcatgaggcgccgcacttggcctagtgttttcttaactgtgaaattcccattcatttcttgaatgaggctacatcttatggacagagcaaagttattgtcctacagattcttaaaactataattatggctattgcatgaaatttaaatagattttattatgtctgcaaatctctgggcttttatttttctggaa

SEQ ID NO: 4436 - DNA, 2676 bp, Homo sapiens
  SIMILAR (802)..(975): 621254mologous to Peromyscus maniculatus major histocompatibility complex class I antigen,accession number U12822,Smith-Waterman Score=168.
  misc_feature (1)...(2676): n = a,t,c or g
atggtagatggaaccctccttttactcctctcggaggccctggcccttacccagacctgggcggtgctcccactccttgaagtatttccacacttccgtgtcccggcccggccgcggggagccccgtttcatctctgtgggctacgtggacgacacccagttcgtgcgcttcgacaacgacgccgcgagtccgaggatggtgccgcgggcgccgttggatggagcaggaggggtcagagtattgggaccgggagacacggagccgccagggacaccgcacagattttccgagtgaacctgcggacgcttgcgcggctaactaacaatcagagcgaaggccggggtctcacaccctggcagtggatgcatggcttgcgagctggggcccgacaagcgcttccttccgcgggtatgaacagttcgcctacgacggcaaggattatctcaccctgaatgaggacctgcgctcctggaccgcggtggacacggcggctcagatctccgagcaaaagtcaaatgatgcctctgaggcggaccaccaaagacccctacttgcaagccacattcgtggattcgttccccaaataactgtatgaggggaaggagacctttcttcacctggagcccccaaagacacacgtgcttcaccacccaatctcttgaccatgaggccaccctgaggtgctgggcccttggctttctaccctgcggagatcacactgacctggcagcaggatggggagggccatacccaggacacggagctcgtggagaccaggcctgcaggggatggaaccttccaagaagtgggcagctgtggtggtgccttctggagaggagcagagatacacgtgccatgtgcagcatgaggggctacccgagcccgtcacccctgagatgggaagcccgcttccccagcccacccatcccccatcgtgggcatcattgctgggcctggttctccttggatctgtggtttctgaagctgtgggttgctgctgtgatatggaggaagaagagctcaggacattttcttccaacaggtggaaaaggagggagctactttaaaggctgaatggagcgacattgcccaggggtctgagtctaacagccttgtaaagcctgagacagctgccttgtgtgcgaactgagatgcacagctgccttgtttggccacttgagattcagggatttccttaaggcctccccctatgtgtcctaggggaactctggcttctctttttgcaaagggccctctgaatctgtcggtgtccctggtaagcacaatgtgaagaaggtagagaaccaggtccacttctgtgtctaccatgacccccttcctcacacttgacctgtgttccttccctgttctctttttctattaaaaaataaagaacctggggcagagtgcggcagctcatgcctgtaatcccagcaacttaggggaggcccaggaaggccagatcacgaggttcaggagattgaaaccatcctgggctaaacacggtgaaaaccccgtctctactaaaaaatacaaaaaattagctgggcgcagaggcacgggcctgtagtcccagctactcaggaggcggaggcatggagaatggcgtcaacccgggaggcggaggttgcagtgagccaggattgtgcgactgcactccagcctgggtgacagggtgaaacgccatctcaaaaaataaaaattaaaaaataaaaaaagaacctggatctcaatttaatttttcatattcttgcaatgaaatggacttgaggaagctaagatcatagctagaaatacagataatttccacagcacatctctagcaaatttaagcctattcctattctctaggcctattccttaaccacctgtaattcttgaccatataccttggtagttgaatattgttttcatactgctgtgggtttgaatggttccctccaacactcatggttgagacttaatccctaatgtgggcaatacttgaaaggtggggcctttgagatgtgattggatcgtaagggctgtgctttcatttcatggggttaatgggttaatggggttatcacaggaatggggactggtggctttattaaggaggggaaaagagaacntgaggctagccatgccccagccccacaggggagcctcccactaggagtgatggctaaagtggaaaatgtgaaggtgcaagcttgccaacagaggggccccccacccaggggaaaatgttcttagtgtcttagttggatcccagggcccaccaggagaagagtgcctttgtggaagcgcttgggagcaaggaccttgaccacccacccaggacccccagaacttgtggagtccagtgggcagcatgcagcggcccccttggggaaagcttttagggcaccagccttgcaacccatttcgagcagccacgtaggctgcacccagcaaaagccacaggcacggggctacctgacgccttgggggcccaatccctgctccagtgtgtccgtgaggcagcacacgaagtcaaaaagagattattctcttcccacagataccttttctctcccatgaccctttaacagcatctgcttcattccccttcaccttcccaggcttgatctgaggtaaactttgaagtaaaataaaagctgtgtttgagcatcaaaaaaaaaaaaaaaaaa

SEQ ID NO: 4437 - DNA, 629 bp, Homo sapiens
  SIMILAR (125)..(304): 601254mologous to Homo sapiens Human secreted protein, SEQ ID NO: 4438,accession number AAG00357,Smith-Waterman Score=166.
caccttttcttcatcccctctgccctggagggtcagcagggcaagggacataagtaaaagctccagctgttgtagtttttcttttggttcttttgtttgtttatttacttattttttagagacagtggagtgcagtggtgcaatcatagctcactgcagcctcaaactcctgggctcaagccatcctcctgcctcagcctccttagtagctaagattacaggcgcatgccaccctgcatggctaatttaggtggttttaattgtgttatttaagaggaagtggcagagtcatttgaaattaatggttgagaagaggtttttaagtgaagggcagattttatctgtgtatcatttcagggtacctttattgcaaaatgacagaaacttagctcagatcatcttaggtagaaaaagagaaatgtattgacttagaatattccacaacctttggatggatggtggaaactggcctttgggacgtttgacctcttggatcgatgctgtgggcttttcccacgggtctgaacatgacctcaggcccctctgttcatgttcacagcccctgaccagggaagaaagggagctctatccaatcagcccaggcagacaaacctcatggtaggattctg

SEQ ID NO: 4438 - DNA, 427 bp, Homo sapiens
  SIMILAR (155)..(283): 531254mologous to Mus musculus putative,accession number AK014223,Smith-Waterman Score=110.
ctaaaaagatcttgagaaaaaagatcttgagaaaaagctcagtttagatataagattgatcaagtcagccagaaaatagtcccctaaaagcaatttctctctaaccacccaaagtgcacaattactctcagcatgagaaacatgagcattatgaagaaagggggcagaatttcagaagaattttataaagctttttttcccatctctgctgctctctcatctcctagtcattgaatgggggctctatattgaaatatatctgacacctcccaacaacactttttgaatgcagaaatagaaatctgacctgtgttccaccaattgtggagtataattagaccttccaacaatagttaactgaagagctattatggtttttgggtggccacatcacatgtctttatttgtcctgtaatagcagcatacc

SEQ ID NO: 4439 - DNA, 397 bp, Homo sapiens
  misc_feature (1)...(397): n = a,t,c or g
cacacttccgtgcacactctcaacttcgagtacgccgtggagcgcgtcctcgcaggaacgggagatgagttttggtgacgggtgaccggtgggctgaccgcctctgactgccgttccgtggctgctcagtgtggggtctgcgacgtctgtgaggagagaggaccaaactgggaatcggagctgctggaggtttccatagctatgatggcaacacccagacgtgatcagtcatctcatggaatggagttcagacccgcactgtcagtgtgagacaggttgaacgtttgaaaagggaagtggttcttgccccaggtgtttgaggagcacgagcctcctttgcgagctatccctgcgagaactgagttcctcaccctcaattcgagtgaattcctagcan

SEQ ID NO: 4440 - DNA, 545 bp, Homo sapiens
  misc_feature (1)...(545): n = a,t,c or g
cttggagtacagtggctcgttcataactcactgccacctcacgntccttttgcctcagccctccaagtagctgggactgcaggcgtgtaccaccatgcctggntagtttnattttnagtacatagccttgaacaactgagcttaagcgatcatcctccctcaaccttccaaggtgctaggactgtaggcatgagccactgcacctggcctaaaattacattgttacaggcacgtaagtaaacacttcctggatccaaaaatgtgtattctgcatttcaacaannnnnnnnnnnnnnnnnnnnnnnnnnnnnnnnnnnnnnnnnnnnnnnnnnnnnnnnnnnnnnnnnnnnnnnnnntaaaattacattgttacaggcacgtaagtaacacttcctggatccaaaaatgtgtattctgcatttcatattaaaaaaaacaagcaagtgcttgggttctgcctctggtcaaccccagtaatcatgttcctaaagtttggacccaaatatttcctcggggggcccgccttttatctccctatttcttcg

SEQ ID NO: 4441 - DNA, 898 bp, Homo sapiens
gacaggcaaaaatgagatttattgcatttgttttattgatctcgaatatcaatgaaaaatggggtgaatatcaatgaaaaattgggttactactacacattggggataaggaagagtattcctgaattcaggatatttcatagggtattgcttagaactcccatgtccagtcgttaaagtcagtggaaactagaatgactcaatagaggccgcagttctaatgactacaccttcaaaaataaagatttaggtcaccctacaaagcaaggaagcatcacccatcaaagtgcttacccaggttataggggatataaaaggtatattggaaaatggtcattataagtatcagctatgacaatttttcaagttgcagaaaggaaatgataatcattaatatttcttccttattttgatatgaatataaatacatacatgtgtgtatacacatatgtaactcattttctttctttcttatacatgtcattttttttcattctccctcccgtacctctaccatttaacatgttttcatagtagcaagcattatatctaagcatttgagaaagcatggttcagtaagaagaggaataaatatcagccaaaaaagactctgaatcctcttttgggaaaggggagtgagttttggttatacagagtatggttgaatcctattaggtagactcatgattttgccattgcatttatttgggagtttagtataattaaaagagggatatatattggacgatgacttcacaaaagatagactgtggtggctttgtaaactgtcaggttagttggatctaagtttctcagtattctcttccatgttcagttctaagttaagatttgccacaagtgaaatttgcatggaatttaaagtctaactggaatccag

SEQ ID NO: 4442 - DNA, 442 bp, Homo sapiens
  SIMILAR (60)..(428): 751254mologous to Homo sapiens neutral protease large subunit,accession number M27826,Smith-Waterman Score=443.
agcggctgaagactgacactgcccgatcgcctcggaaacctacaagaccatcacagatgctttgggtaactctaccagtggagggtaagtccgtccccttcctaatcaatacagaggctacccactccacattaccttcttttcaagggtgtgtttcccttgcctccataactgttgtgggtattgacggccaggcttctaaacctcttaaaactccccagctctggtgccaacttggacaacattcttttatgcactcctttttagttatccgcaccttcccagctcccttattaggtcgagacattttaactaatttatctgcttccctgactattcctgggctagagccacacctcattgccgccttttgctccagttcaaagcctccttcacatcctcctcttgtatctctccaccttaaaccacaagtataggatgc

SEQ ID NO: 4443 - DNA, 1262 bp, Homo sapiens
  SIMILAR (260)..(412): 901254mologous to Homo sapiens Human PRO1194 (UNQ607) amino acid sequence SEQ ID NO:29,accession number AAY99348,Smith-Waterman Score=220.
gctcccggcgggcgatgtgcagcccgagattcaggacgacccggctgcccggcttagcgcctttggagctccgcgctgaaggggccttgctccgcacaggcacggcacgcaagcttttggggtgcccagtggctctgttttcaagtcacagccggcccgcagattgcgaacctttccacatctcacttgggccgctagaaaatagaaggtggggaaggagtttcttggggtgcattctgcaagctaccagcctccctcctggcccaagaggcttcgtgacggagttatcagagacattgagaggcaaattcggaaaaaagaaaacattcgtcttttgggagaacagattattttgactgagcaacttgaagcagaaagagagaagatgttattggcaaaaggattctcaaaaatcatgacttgaatgtgaaatatctgttggacagacaacaccgagtttgtgtgtgtgtgttgatggagagtagcttagtagtatcttcatcttttttttttggtcactgtcccttttaaactttgatcaaataaagggacagcggggccatataagttactgctttcaggggccccttatatctgaataaagggagtgtgggcagacacctttttggaagagtctgtctgggtgatcctggtagaagccccattagggtcactgtcccagtgctttagggttgttactgagaaagcacctgccggagcttgtgagaaggaagggatggaatagttagccatccaccctgagtagtctgatccagtcggcatgatgacgaagccacgagaacatcgaccctcagaaggactggaggaaggtgaagtggaggtgagagacgctcctgatcgtcgaatccgcaggatcaggcatccagtggaccttatcgcacgacccagagtggggggatttccctcaacagtgatgaaggagacgtgtcttggatggaggagcagctgtccctacttctgtgacaagtgccaaaaatggataccagccagtaaggagcttctcaaatcctttgatttgtcaattcctgtgtgaaggtttgtttttccaacctgtgaaagaaacgtgaatgtaaaagagacctaaataaaaggataattatatttattctctaggttgatcagctattaaatttatataaaacataggcatgtttgtactaatgaaacgtactgtcaacctctatcacattgttaaattaacacttttggtggtaactcaataaaattgagaaaattggaaa

SEQ ID NO: 4444 - DNA, 727 bp, Homo sapiens
  SIMILAR (153)..(230): 651254mologous to Homo sapiens PRO1722,accession number AF119851,Smith-Waterman Score=70.
cgagacagagtcttgctctgtcgcccaggctggagtgcagtggcatgatctcagctcactgcaacctctgcctcccagatacaggcaattctcctgcctcagcctcctgagtagctgggattataggcgcctgtcaccatgcccagctaatttttgtatttttagtagagacagagtttcaccatgtgtttcaccatgttggccaggctagtctcgaattcctgacctcgtgatccccccacctcggcctcctaaagcgctgggattacaggggtgagccacggcgcctggcctaggacctttgttttttaagtctctgtttctcaatcctctatatgttgaaatgctaaagtacttagtgcctgttttctgctctgttttcctcattctgttcatttcctcctaagatgatttcattaagtttgaagactttcaatacccaatatatatgctgctaattcctaaatttataactctagccccaactatcctctgacaaccacacccttacatataactatctactgacatctatctccacttggatatgtctaatagacatcttccaaatggagtctatataagacagaattcctgatcctcttctccccaataatcctacttcttttccatccttccgcatctcagtcaatggctcaatatccattcaattgctccggaggcgtgggcgagggcggtcaacgggccggcgccagggtcaacttat

SEQ ID NO: 4445 - DNA, 1311 bp, Homo sapiens
  SIMILAR (9)..(1022): 551254mologous to Homo sapiens Human apoptosis related protein,accession number AAY91870,Smith-Waterman Score=813.
  misc_feature (1)...(1311): n = a,t,c or g
tttcgtccgcgccggaggccgccaagaagccgacgccctgccaccggtgccgggggctggtggacaagtttaaccaggggatggtggacaccgcaaagaagaactttggcggcgggaacacggcttgggaggaaaagacgctgtccaagtacgagtccagcgagattcgcctgctggagatcctggaggggctgtgcgagagcagcgacttcgaatgcaaccagatgctagaggcgcaggaggagcacctggaggcctggtggctgcagctgaagagcgaatatcctgacttattcgagtggttttgtgtgaagacactgaaagtgtgctgcgtctccaggaaccgtacggtcccgactgtctcgcatgccagggcggatcccagaggcccgtgcagcgggaatggccactgcagccggagatgggagcagacagggcgacgggtcctgccggtgccacatggggtaccagggcccgctgtgcacttgactgcatggaccggctacttcagctccgctcccggaacgagacccacagcatcttgcacagccttgtgacgagtcctgcaaagacgtgcttcgggccttgaccaacagagactgcggcgaagttgtgaagtgggcttgggtgctggacgagggcgcctgtgtggatgtggaaaagtgtgcggcccaaaccgcctccctgcagcgctgcgcagttctgtaagaacgccaacggctcctacacgtgcgaaggagggtgactccagctgggtgggctgcccaggggaaaggcccaggaaactgtaaacagtgtatctctggctacgcgagggagcacggacaagtgtgcagatgtggaacgagtgcntcactagccagaaaaaaccctgtgtgaggaaaaaacgaaaacttgctacaatactcccggggagctacggtctgtgtgtgtcctgacggcttcgaagaaacggaagatgcctgtgtgccgccggcagaaggctgaagccacagaaaggagaaagcccgacacagctgcccctcccgtgaagacctgtaatgtgccggacttaaccctttaaattattcagaaggatgtcccgtggaaaatgtggccctgaggatgccgtctcctgcagtggacagcggcggggagagagctgccgctcctctaacggttgattcctcatttgtcccttaaacagctgcatttcttggttgttcttaaacagacttgtatattttgatacagttctttgacataacaattgaccattgtaggtaatcaggaggcaaaaaaaaaaaaaaaaaaaaaaagtcgtatcgatgt

SEQ ID NO: 4446 - DNA, 401 bp, Homo sapiens
gtttttatttttaaatgaagtttccatctgtacacgttaagaaaataaacaaaccaacaggaagccattctctgtgtatcctccttggaggcaggaaggatggatctgccgataggcacacaacagcacacagccagggctcatgggagtgagtgcccgtcacctcacgaaggtcatgggcctaaaacatacggaggctccatagaaaatgctccagctggctttgcagtcatgcataaaggtgaggacacttaattcaaggcatctgggggctggtgtcaccgcacatgaagagtagtgcccatgctgccacccgatgattaaacagtgaataaaatgtcatggctctttcctgcgacaattctatttgaggaaaagatttgtttttcccggacgcgtgg

SEQ ID NO: 4447 - DNA, 8274 bp, Homo sapiens
  SIMILAR (1663)..(6324): 611254mologous to Homo sapiens kendrin,accession number U52962,Smith-Waterman Score=4144.
ggtgaatttggaagtgaaaagaaaactgctttgcatgaaaaagaggagacacttcggcttcagagtgcacaggcacagccttttcaccaagaggagaaagagtctttgtctctgcagcttcaaaagaagaatcaccaagtccagcagctgaaagaccaggttttatccttaagtcacgagatagaagagtgccgctccgagttggaggtgctgcagcagaggcgggagcgggagaaccgggaaggcgcaaacctcctctccatgctcaaggccgacgtcaacctgtcccacagcgaaagaggggccctccaggacgccctgcgcaggctgctgggtttgtttggagagacgctgagggcagccgtcaccctgaggagccggatcggggagcgcgtggggctctgcctggatgacgcgggcgcaggcctggccctgtcgacagctccggcgctggaggagacatggtctgatgtggccctcccggagttggacagaactttgtctgaatgtgcagagatgtcttccgtggctgaaattagcagccacatgcgtgaaagctttctcatgagcccagaaagtgtgcgggagtgtgagcagcccatccggagggtcttccagagcctcagcctggccgtggacggcctcatggagatggccctggactccagcaggcagctggaagaagcacgccaaattcattctcgttttgaaaaagaatttagttttaagaatgaggagacagcacaggttgtcaggaagcaccaggagctgctggagtgtttgaaggaggagagcgcagcaaaggcagagctggcgctggagctgcacaagactcagggtacccttgagggattcaaggtggagacagcagatctgaaggaggtgctggccgggaaggaggattccgagcaccgtctggtgctggagctggagagcctgagacggcagctgcagcaggcggcccaggagcaggcggcgctgagggaggagtgcacccgtctgtggagtcggggggaggccacagccacggacgccgaggccagagaagctggatttttcagggtgttttcaggaacgtctctgacgtcctgcatcgctctcagcatctttgccctggcggtgctgttgcatctgggcgtccgttgtcgctgtttctccgatgctttctctgcttgtcctctgctgtccgggggcagcctcatgtgtcttcgcgcccagccagccggcgctgggccacaccccgccgggggagaccacctggtgtttcatcacctcgagcccttggacttcagccagtcacttcgtttgtcaggcctccgggcagataaaggggtgtgtggcctgcattctgttgaacggcccgctctccggaaggaagtggaggatctgaccaaagaacagtcggagaccaggaagcaggctgagaaggaccgctcagccctgctctcccagatgaagattttggagtctgagttagaagaacagctgtctcagcatcgcgggtgtgccaagcaggcggaggccgtcactgccctggaacagcaggtggcatctctggacaagcatttgcgcaaccagcggcaattcatggatgtaagaattctgaataatacatttttttgcatcactaaaagttgccgttacagcatgaacttctttccagatcgttacgagcaggcagccgagcgggagcacgagcgcgaggagttccagcaggagattcagaggctggaggggcagctccgccaggcggccaagccgcagccctggggccctcgcgacagccaggttgagttgttacaacaaaagttgagagaaaagttggatgaatttaatgaattggctatacagaaagagtcggcagatagacaagtgttaatgcaggaagaagaaattaaacgtctggaggagatgaacatcaacatcaggaaaaaagtggcccagctccaggaagaagtggaaaaacagaaaaacatcgtgaaagggctggaacagggaggaccgctgagcatcacctgcacttggagcggagttgtccccctggccggccactgcacacatttcagtgacagctgctccagggcggcttcaccccttctgccttcactcagcgaacgtttactgagcttagtagatgccagggataaagaggtgttaaagaaacagcagatgagtagcttgcttctggcgtccacgttgcagtctacactagatgcaggcagatgtcccgagcctccttcgggcagccctcctgagggtccagaaatacagttagaggtgacacagagagcactcctgcggcgcgagagcgaggttttggacttaaaagaacagctagaaaagatgaaaggtgacttagaaagtaaaaatgaagaaatactacatctgaacttaaaattggacatgcagaacagccagactgctgtcagcctcagagaacttgaggaagagaacacgagcttgaaggtcatatataccagaagttctgagattgaagagctgaaagccactattgaaaatctgcaagagaatcagaaacgattacaaaaggagaaagcagaggaaattgaacaactccatgaagtcattgagaagctgcagcacgagctgtccctcatggggcctgtggtgcacgaagtcagcgacagtcaggctggcagtctgcagagcgagctgctctgctcccaggccgggggccctcgtgggcaggccctacagggcgagctcgaggctgcgctggaagccaaggaggccctgagccggctgctggctgaccaggagcgcaggcacagccaggccctggaggccctgcagcagcgcctccagggcgcagaggaggctgcggagctacagctggctgagctggagcgcaatgtagccctcagggaggctgaggtcgaagacatggcctcccggatccaggagttcgaagcggccctgaaagcaaaggaagcgacgattgccgagagaaatttagaaatcgacgctctgaaccagcggaaggcggcccactctgccgagctggaggccgtcctgttggccttggcccgcatccgccgcgccctggagcagcagcccctggcagccggggcggcgcctcccgagctgcagtggctccgagcgcagtgtgcccgcctcagccgccagctgcaggtgctgcaccagcggttcctgaggtgccaggtggagctggacaggcggcaggcccgcagagccacagctcacacacgggtgcccggggcccacccacagcctcgcatggatggtggcgccaaggcccaggtcaccggcgacgtggaggcctcccatgatgctgctttggagccggttgtccctgacccacagggtgatctgcagcctgtcctggtgacgttgaaggatgcacctctctgcaagcaagaaggcgtgatgtcagtgctcaccgtctgccagaggcagctgcagtcggagctgctcttggtgaaaaatgaaatgcgcctgagtctggaggacggcggcaagggtaaagaaaaagtactggaagattgtcagctgccgaaggtcgatctcgtagctcaggtgaaacagcttcaggaaaaactgaaccgtttgctgtattccatgaccttccagaatgtggatgctgccgacaccaaatctctgtggcccatggcctcagcacacctgttggagagcagctggagtgatgattcctgtgacggagaagagcctgacatatcaccccacatagacacatgtgatgccaatacagccacggggggtgtaactgatgttatcaaaaatcaggccatagacgcgtgtgatgccaatacaaccccagggggtgtaactgatgttatcaaaaattgggattccttgataccagatgaaatgccagattctcccattcaagaaaaatcagaatgtcaggacatgtctctttcttcaccgaccagcgtacttggtggctcccgccaccagagccacactgcagaggctgggccccggaagagcccggtcgggatgctggacctgtcttcctggagctcccctgaggtcctcaggaaggactggaccctggagccctggcccagcctccccgtgacaccccactcaggagccctgagcctgtgcagtgccgacacatccctgggggacagggcggacacctcgctgccacagacccaggggccggggctgctttgttccccaggcgtgtctgcagcagcgctggcactgcagtgggccgagtctccgccggctgacgaccaccatgtgcagaggacggctgtggagaaagatgtcgaagattttatcacaacatcctttgattctcaagaaacattaagttcacctcctcctggattagaaggaaaagctgatagaagtgagaaaagtgacggctcgggttttggagcaagactgagcccggggtcaggaggccctgaggctcaaactgctggtcctgtgacccctgcttccatctctggaaggtttcagccgctgccggaagccatgaaggagaaggaagtgcgtccgaagcacgtgaagtttagcagatcattttatggcaaaaccattgacaaaaacttggctaaacaagctttactgcagatggtgcgtgacgagagccaccagatcctggcgctgtcagaaggccttgcacccccaagcggcgagccacacccaccccggaaggaagacgagatacaggacatctcgctccatgggggaaagacgcagcaggccctggttgtgtgcgagcggcagcctggctggcattcaggaggctcattggtgctgcacgctgcccctggggaccagcgggaagtgcccaccgcgtgccccgattggagaggggaccttctgcaggttgtgcaagaggcctttgaaaaagagcaggagatgcagggggttgagctgcagccccgactcagtggctcagatctggggggtcacagctccctgctcgaaaggctggagaagatcatccgtgagcagggagacctgcaggaaaagtccctggagcatcttcgcttgccggaccggagcagcctgctgtccgagatccaggcgctgcgtgcccagctgcgcatgacgcacctgcagaaccaggagaagctgcagcacttgcgcacggcgctgacaagcgcagaggcgcgcgggagccagcaggagcaccagctgcgcaggcaggttttggattccgtcaaggggaacggccttgcagttcagcccacggcccttgtcccggcgcccatgccctttgtgctctctggggctgggggccggcgctgtgcacatgctcttgaactgctggcttataaagtagagcaggagaagtgcattgctggtgacttgcagaagacgctgagtgaagagcaagagaaggcaaacagcgtgcagaagctcctggcggcggagcagactgtagtgcgagatttgaagtccgacctctgtgagagcaggcagaagagcgaacagctgtcccggtccctctgcgaggtgcagcaggaggtcctccagctgagatccatgctgagcagtaaggagaacgagctgaaggccgcgcttcaggagctggagagtgagcaggggaaggggcgtgccctgcagagccagctggaggaggagcagctgcggcacctgcagagggagagccagagtgccaaggccctggaggagctgcgggcgtctttggagacacagcgtgctcagagcagtcgactctgcgtggcactgaaacacgagcagacggccaaggacaacctgcagaaggagctgcgtatcgagcactcacgctgcgaggccttgctggctcaggagcggagccagctctctgagctccagaaggaccttgcggctgagaagagccgcaccctggagctgtcagaggccttgcggcacgagcggctcctgaccgagcagctgagccagaggacacaggaggcttgcgtgcaccaggacacacaggcccatcacgctctgctgcagaagctgaaggaggagaagtcccgggtggtggacttgcaagcgatgcttgaaaaggtgcagcagcaagccctgcattctcagcagcagcttgaggctgaggctcagaagcactgtgaggcgctcaggagagagaaggaggtaagtgccacactgaagtcgacggtggaagccctgcacacccaaaaacgagagctgagatgctctctggagagagagagggagaaaccagcgtggttgcaggcagaattagagcagtcacacccacggttgaaagagcaagaaggacgcaaggctgcgaggaggagcgcggaggccaggcagagcccagcggctgcggagcagtggaggaagtggcagagagacaaggagaagctgcgagaattagaactgcagcgtcagcgtgacttgcataagatcaagcagcttcagcagacagtgagagacctggagtcgaaggacgaggtgcctggcagccgcctccacctaggttctgcccgcagggctgccggctcggatgcggaccacctccgggaacagcagcgagagctggaggcgatgaggcagcggctgctctctgccgcccggcttctcaccagcttcaccagccaggccgtggacaggacagttaatgattggacgtcatccaatgagaaagcagtgatgtctttactgcacacgttggaggagctgaagtctgacttgagcaggcccacctcctcccagaaaaaaatggcagcagagctgcagttccagtttgtggacgtcctgctgaaagacaatgtttccctcacaaaagcgctcagcacggtgacccaggagaagctggagctgagcagagccgtgtctaagcttgagaagttgctgaagcaccatctgcagaagggctgcagcccaagcaggtcggaaaggtctgcttggaagccagacgaaacggctccacagagttccctgaggcgcccagaccccggccggcttccaccagctgccagcgaggaagcacacaccagcaatgtcaagatggaaaaattgtacctgcattacttgagagcagagagctttagaaaagctctgatttatcaaaagaagtatcttttgctgttgattggtggattccaggattctgaacaagaaacactctccatgattgcccatttgggggtatttccttccaaagcagaacggaaaatcacatctcgtcctttcaccaggttccgcacggccgtcagggtggtcattgcaatattaagattacgttttttggttaagaaatggcaagaagtagatcggaaaggagctctggcacaaggcaaagcccctcgcccaggtgggactccagctgctgttgaccgctggactcacaaacctttctttctactcttgtttttcattcactttgggtcatttttcagtgttgatggggacgtaataaagcacgtctacatctgtggtttcacgggacgctccctaggaccagttgacagaagacgaaaaaatacaggtttgttctaccaacggatccatacggcccttaaccagttacccaggccctctagcattgcccatggctccatgtatattctcaccttgggctacttcttccacaaaaaagtggacgaccaggagctctgcctgaaattctgcctattgagaggatatgcccttatcaccatttttcaagaatggtttctccagaagcagacgctgcgactgagtttggggtacgaggatgttgacatggtatcaacacccgtgaaaggaaggggaaggaagcaggactgggcggaggaagaagggtatgcgcctcgggccgcaactaagcagcctgcccgcctcaagcccgccaccctcaagcaggcccagcgcagagcctgtcgggagcggcgctctcccgcctctcccaatgggagcccggagcggcatcgacgcgtcttcggggccaatggaagcgaggctctggtgttgctgggcggggccgggagggctgcgcgggcccgagacccactgcgcacgcgcgctcgctacccgcccttcccgccgcgcacgcgctcccgtggccggccgggcgctcaggagcgcgcggggcagcggcggcgcggcggagccatccgcgctcgtgcccgcgcggcctctgcccggacgctagccggcctggccatggctgaccgcgggtgcccgctggaggcggcgccgctgcctgccgaggtgcgggagagcctggctgagctggagctggagctgtcggaaggttggaagaagaagcttaacagtgacaaagatgctgtcttcaacagaaactggtaa

SEQ ID NO: 4448 - DNA, 10447 bp, Homo sapiens
  SIMILAR (53)..(9976): 1001254mologous to Homo sapiens kendrin,accession number U52962,Smith-Waterman Score=16668.
gctctgtgtcagccccgtcaccgccgggcggcccgcgcggagtctgagggagatggaagttgagcaagagcagcggcgcagaaaggtggaggccgggaggacgaagcttgctcacttccgacagagaaaaacaaaaggtgacagttcgcattcggagaaaaagacggcgaagaggaagggctcggctgtcgatgcgtctgtccaggaggagagtccggtaaccaaggaggacagcgcactctgtggaggaggggacatttgcaaaagcacatcatgtgacgacacccctgatggggcaggaggggcctttgcagctcagccggaggactgtgatggagagaagagagaggacttggaacagctgcagcagaagcaagtcaatgaccatcctccagagcagtgtgggatgttcacagtcagtgaccacccaccagaacagcatgggatgttcacagtcggtgaccacccaccagaacagcgtgggatgttcacagtcagtgaccacccaccagaacagcatgggatgttcacagtcagtgaccacccaccagaacagcgtgggatgttcacaatcagtgaccaccaaccggaacagcgtgggatgttcacagtcagtgaccacacaccagaacagcgtgggatcttcacaatcagtgaccacccagcagaacagcgtgggatgttcacaaaggagtgtgaacaagaatgtgaacttgccattactgacctggagagcggccgtgaagatgaggctggcctgcatcagagtcaggccgtgcatggccttgagctggaggcgctgcgcctgagtctgagcaacatgcacacggcgcagctggagctgacacaggccaacctccagaaggagaaggagacggcattgacggagctgcgggagatgctcaacagccggcgtgcccaggagctggccctgctacagagcaggcagcagcacgagctggagctcctcagggagcagcacgcacgggagaaggaggaggtggtgctcaggtgtggacaggaagcagctgagctgaaggagaagttacaatcagaaatggagaaaaacgcccagatagtaaagaccctgaaggaagattgggaatctgaaaaagatttatgtttagaaaatctacgcaaagaactgtctgcaaagcatcaatcagaaatggaggatttacaaaaccagtttcagaaagaattggcagaacagagagctgagttggagaagatttttcaagacaaaaaccaggctgaacgggcccttaggaacctggagagtcatcatcaagcagccattgagaagttacgtgaagacctgcagtccgagcacggccggtgtttagaagacttggagttcaagttcaaagagagcgagaaagaaaaacagctggagttagagaatcttcaagcatcatatgaagacctgaaggcacaatcacaagaagagatcaggcgcttgtggtcccagcttgattctgccaggaccagtagacaggaattgagtgagctacatgagcaactcctggcgcgcacctctcgtgtggaagatttagaacagctgaagcagcgagaaaaaacccagcatgagtccgaactggagcaactgaggatttattttgaaaagaagttaagggatgctgagaaaacttaccaagaagacctaaccctgttacagcagaggctgcagggggcgagggaagatgctcttctggactctgtggaagttgggttgtcctgtgtgggtttagaagagaaacctgagaaaggaagaaaagatcacgttgatgaactcgagcctgagcgacataaggagagcctgccacgcttccaggcggagttagaagaaagccacaggcaccagctggaagcgctggagtctcccctctgcatccagcacgaggggcatgtctcagacagatgctgcgtagagacttcagcattgggacacgagtggcgtctggaaccctctgaagggcacagccaagagcttccctgggtgcatctccagggtgtgcaggacggggacttggaggccgacacagagcgggcagccagagtcttgggtctggaaactgagcacaaggtgcaactttcgcttcttcagactgagctcaaagaagaaattgaactcctaaaaatagaaaatagaaatttgtttgagaagttgcagcatgaaactcgtctgaaggacgatttggagaaggtaaaacacaatctaattgaagaccaccagaaggaactaaataatgctaagcaaaagactgagctgatgaaacaggaattccaaagaaaagaaacggactggaaagttatgaaggaggagctacagcgggaagctgaggagaagttaacattgatgctacttgaactgagagaaaaggctgaatccgagaaacagaccatcataaacaagttggagcttcgagaagctgaaatgaggcagcttcaggaccaacaggcagcgcagatcctggatctggagaggtccttgacggagcagcaggcccgcctgcagcagctggaacaggacctcacttcagacgacgccctgcattgcagccagtgtgggcgggagccgcccacagcccaggacggggagcttgccgcgctccacgtgaaggaagactgcgccctgcagctgatgctggcccggagcaggtttttagaggaacgtaaagagatcgccgagaaattcagtgcggaacaagatgccttcctgcagctcctccaggagagacaccagcagcagctcctgtcagtgacggcggagctcgaggccagacaccaggccgcgttgggcgagctgacagcctccttagagagcaagcagggggctctgctggctgcacgtgtggccgaactgcagaccaaacacgctgccgacctcggcgctctggagaccagacatctgtccacccttgattctttggaatcctgttacctgtctgaatttcagaccatccgtgaggagcacaggcaggccctagagctcttacgagcagactttgaggaacaactgtggaaaaaggactctcttcaccaaacgattttgactcaagagttggagaaactgaagcggaaacacaaaggggagctacagtctgtgcgggaccacctgcgaaccgaagcgagcacagagctcgccggaaccgtggctcacgagctgcagggagtgcaccagggtgaatttggaagtgaaaagaaaactgctttgcatgaaaaagaggagacacttcggcttcagagtgcacaggcacagccttttcaccaagaggagaaagagtctttgtctctgcagcttcaaaagaagaatcaccaagtccagcagctgaaagaccaggttttatccttaagtcacgagatagaagagtgccgctccgagttggaggtgctgcagcagaggcgggagcgggagaaccgggaaggcgcaaacctcctctccatgctcaaggccgacgtcaacctgtcccacagcgaaagaggggccctccaggacgccctgcgcaggctgctgggtttgtttggagagacgctgagggcagccgtcaccctgaggagccggatcggggagcgcgtggggctctgcctggatgacgcgggcgcaggcctggccctgtcgacagctccggcgctggaggagacatggtctgatgtggccctcccggagttggacagaactttgtctgaatgtgcagagatgtcttccgtggctgaaattagcagccacatgcgtgaaagctttctcatgagcccagaaagtgtgcgggagtgtgagcagcccatccggagggtcttccagagcctcagcctggccgtggacggcctcatggagatggccctggactccagcaggcagctggaagaagcacgccaacttcattctcgttttgaaaaagaatttagttttaagaatgaggagacagcacaggttgtcaggaagcaccaggagctgctggagtgtttgacggaggagagcgcagcaaaggcagagctggcgctggagctgcacaagactcagggtacccttgagggattcaaggtggagacagcagatctgaaggaggtgctggccgggaaggaggattccgagcaccgtctggtgctggagctggagagcctgagacggcagctgcagcaggcggcccaggagcaggcggcgctgagggaggagtgcacccgtctgtggagtcggggggaggccacagccacggacgccgaggccagagaagctgctctccggaaggaagtggaggatctgaccaaagaacagtcggagaccaggaagcaggctgagaaggaccgctcagccctgctctcccagatgaagattttggagtctgagttagaagaacagctgtctcagcatcgcgggtgtgccaagcaggcggaggccgtcactgccctggaacagcaggtggcatctctggacaagcatttgcgcaaccagcggcaattcatggatgagcaggcagccgagcgggagcacgagcgcgaggagttccagcaggagattcagaggctggaggggcagctccgccaggcggccaagccgcagccctggggccctcgcgacagccagcaggcgccgctggatggagaggttgagttgttacaacacaagttgagagaaaagttggatgaatttaatgaattggctatacagaaagagtcggcagatagacaagtgttaatgcaggaagaagaaattaaacgtctggaggagatgaacatcaacatcaggaaaaaagtggcccagctccaggaagaagtggaaaaacagaaaaacatcgtgaaagggctggaacaggataaagaggtgttaaagaaacagcagatgagtagcttgcttctggcgtccacgttgcagtctacactagatgcaggcagatgtcccgagcctccttcgggcagccctcctgagggtccagaaatacagttagaggtgacacagagagcactcctgcggcgcgagagcgaggttttggacttaaaagaacagctagaaaagatgaaaggtgacttagaaagtaaaaatgaagaaatactacatctgaacttaaaattggacatgcagaacagccagactgctgtcagcctcagagaacttgaggaagagaacacgagcttgaaggtcatatataccagaagttctgagattgaagagctgaaagccactattgaaaatctgcaagagaatcagaaacgattacaaaaggagaaagcagaggaaattgaacaactccatgaagtcattgagaagctgcagcacgagctgtccctcatggggcctgtggtgcacgaagtcagcgacagtcaggctggcagtctgcagagcgagctgctctgctcccaggccgggggccctcgtgggcaggccctacagggcgagctcgaggctgcgctggaagccaaggaggccctgagccggctgctggctgaccaggagcgcaggcacagccaggccctggaggccctgcagcagcgcctccagggcgcagaggaggctgcggagctacagctggctgagctggagcgcaatgtagccctcagggaggctgaggtcgaagacatggcctcccggatccaggagttcgaagcggccctgaaagcaaaggaagcgacgattgccgagagaaatttagaaatcgacgctctgaaccagcggaaggcggcccactctgccgagctggaggccgtcctgttggccttggcccgcatccgccgcgccctggagcagcagcccctggcagccggggcggcgcctcccgagctgcagtggctccgagcgcagtgtgcccgcctcagccgccagctgcaggtgctgcaccagcggttcctgaggtgccaggtggagctggacaggcggcaggcccgcagagccacagctcacacacgggtgcccggggcccacccacagcctcgcatggatggtggcgccaaggcccaggtcaccggcgacgtggaggcctcccatgatgctgctttggagccggttgtccctgacccacagggtgatctgcagcctgtcctggtgacgttgaaggatgcacctctctgcaagcaagaaggcgtgatgtcagtgctcaccgtctgccagaggcagctgcagtcggagctgctcttggtgaaaaatgaaatgcgcctgagtctggaggacggcggcaagggtaaagaaaaagtactggaagattgtcagctgccgaaggtcgatctcgtagctcaggtgaaacagcttcaggaaaaactgaaccgtttgctgtattccatgaccttccagaatgtggatgctgccgacaccaaatctctgtggcccatggcctcagcacacctgttggagagcagctggagtgatgattcctgtgacggagaagagcctgacatatcaccccacatagacacatgtgatgccaatacagccacggggggtgtaactgatgttatcaaaaatcaggccatagacgcgtgtgatgccaatacaaccccagggggtgtaactgatgttatcaaaaattgggattccttgataccagatgaaatgccagattctcccattcaagaaaaatcagaatgtcaggacaggtctctttcttcaccgaccagcgtacttggtggctcccgccaccagagccacactgcagaggctgggccccggaagagcccggtcgggatgctggacctgtcttcctggagctcccctgaggtcctcaggaaggactggaccctggagccctggcccagcctccccgtgacaccccactcaggagccctgagcctgtgcagtgccgacacatccctgggggacagggcggacacctcgctgccacagacccaggggccggggctgctttgttccccaggcgtgtctgcagcagcgctggcactgcagtgggccgagtctccgccggctgacgaccaccatgtgcagaggacggctgtggagaaagatgtcgaagattttatcacaacatcctttgattctcaagaaacattaagttcacctcctcctggattagaaggaaaagctgatagaagtgagaaaagtgacggctcgggttttggagcaagactgagcccggggtcaggaggccctgaggctcaaactgctggtcctgtgacccctgcttccatctctggaaggtttcagccgctgccggaagccatgaaggagaaggaagtgcgtccgaagcacgtgaaggctttactgcagatggtgcgtgacgagagccaccagatcctggcgctgtcagaaggccttgcacccccaagcggcgagccacacccaccccggaaggaagacgagatacaggacatctcgctccatgggggaaagacgcaggaagtgcccaccgcgtgccccgattggagaggggaccttctgcaggttgtgcaagaggcctttgaaaaagagcaggagatgcagggggttgagctgcagccccgactcagtggctcagatctggggggtcacagctccctgctcgaaaggctggagaagatcatccgtgagcagggagacctgcaggaaaagtccctggagcatcttcgcttgccggaccggagcagcctgctgtccgagatccaggcgctgcgtgcccagctgcgcatgacgcacctgcagaaccaggagaagctgcagcacttgcgcacggcgctgacaagcacagaggcgcgcgggagccagcaggagcaccagctgcgcaggcaggttgaactgctggcttataaagtagagcaggagaagtgcattgctggtgacttgcagaagacgctgagtgaagagcaagagaaggcaaacagcgtgcagaagctcctggcggcggagcagactgtagtgcgagatttgaagtccgacctctgtgagagcaggcagaagagcgaacagctgtcccggtccctctgcgaggtgcagcaggaggtcctccagctgagatccatgctgagcagtaaggagaacgagctgaaggccgcgcttcaggagctggagagtgagcaggggaaggggcgtgccctgcagagccagctggaggaggagcagctgcggcacctgcagagggagagccagagtgccaaggccctggaggagctgcgggcgtctttggagacacagcgtgctcagagcagtcgactctgcgtggcactgaaacacgagcagacggccaaggacaacctgcagaaggagctgcgtatcgagcactcacgctgcgaggccttgctggctcaggagcggagccagctctctgagctccagaaggaccttgcggctgagaagagccgcaccctggagctgtcagaggccttgcggcacgagcggctcctgaccgagcagctgagccagaggacacaggaggcttgcgtgcaccaggacacacaggcccatcacgctctgctgcagaagctgaaggaggagaagtcccgggtggtggacttgcaagcgatgcttgaaaaggtgcagcagcaagccctgcattctcagcagcagcttgaggctgaggctcagaagcactgtgaggcgctcaggagagagaaggaggtaagtgccacactgaagtcgacggtggaagccctgcacacccaaaaacgagagctgagatgctctctggagagagagagggagaaaccagcgtggttgcaggcagaattagagcagtcacacccacggttgaaagagcaagaaggacgcaaggctgcgaggaggagcgcggaggccaggcagagcccagcggctgcggagcagtggaggaagtggcagagagacaaggagaagctgcgagaattagaactgcagcgtcagcgtgacttgcataagatcaagcagcttcagcagacagtgagagacctggagtcgaaggacgaggtgcctggcagccgcctccacctaggttctgcccgcagggctgccggctcggatgcggaccacctccgggaacagcagcgagagctggaggcgatgaggcagcggctgctctctgccgcccggcttctcaccagcttcaccagccaggccgtggacaggacagttaatgattggacgtcatccaatgagaaagcagtgatgtctttactgcacacgttggaggagctgaagtctgacttgagcaggcccacctcctcccagaaaaaaatggcagcagagctgcagttccagtttgtggacgtcctgctgaaagacaatgtttccctcacaaaagcgctcagcacggtgacccaggagaagctggagctgagcagagccgtgtctaagcttgagaagttgctgaagcaccatctgcagaagggctgcagcccaagcaggtcggaaaggtctgcttggaagccagacgaaacggctccacagagttccctgaggcgcccagaccccggccggcttccaccagctgccagcgaggaagcacacaccagcaatgtcaagatggaaaaattgtccctgcattacttgagagcagagagctttagaaaagctctgatttatcaaaagaagtatcttttgctgttgattggtggattccaggattctgaacaagaaacactctccatgattgcccatttgggggtatttccttccaaagcagaacggaaaatcacatctcgtcctttcaccaggttccgcacggccgtcagggtggtcattgcaatattaagattacgttttttggttaagaaatggcaagaagtagatcggaaaggagctctggcacaaggaaaagcccctcgcccagggccccgagcacgacagccgcagtctccacccagaaccagagagtcccccccaacccgggatgtaccctctggccacaccagggaccctgccagaggccgcagactggcagcagcagcctccccacacagtgggggaagagccactccatccccaaattcaagattagaaagatccctgactgcttctcaagatccaggacattccttgacagagtatattcaccatttagaagtgatccagcaaagattgggaggggtactaccagattctacttcaaagaaatcctgccgcccgatgattaaacagtgaataaaatgccgtggctctttcctgcgacaattctatttgaggaaaagatttgtttttcccttttcccaaggaagctcgtgggacagcatgggcactactcttcatgtgcggggacaccagcccccagatgccttgaattaagtgtcctcacctttatgcatgactgcaaagccagctggagcattttctatggagcctccgtaggttttaggcccatgaccttcgggaggggaggggcactcactcccatgagccctggctgtgtgctgttgtgtgcctataggcagatccatccttcctgcctccaaggaggatactcagagaattgctttcctgttgttttgtttattttcttaacgtgtacagatggaaacttcatttaaaaataaaacccaaacaactcaaaaaagaaaaaaa

SEQ ID NO: 4449 - DNA, 5675 bp, Homo sapiens
  SIMILAR (3111)..(5204): 611254mologous to Homo sapiens kendrin,accession number U52962,Smith-Waterman Score=1824.
ggcgccgctggatggagaggttgagttgttacaacaaaagttgagagaaaagttggatgaatttaatgaattggctatacagaaagagtcggcagatagacaagtgttaatgcaggaagaagaaattaaacgtctggaggagatgaacatcaacatcaggaaaaaagtggcccagctccaggaagaagtggaaaaacagaaaaacatcgtgaaagggctggaacaggataaagaggtgttaaagaaacagcagatgagtagcttgcttctggcgtccacgttgcagtctacactagatgcaggcagatgtcccgagcctccttcgggcagccctcctgagggtccagaaatacagttagaggtgacacagagagcactcctgcggcgcgagagcgaggttttggacttaaaagaacagctagaaaagatgaaaggtgacttagaaagtaaaaatgaagaaatactacatctgaacttaaaattggacatgcagaacagccagactgctgtcagcctcagagaacttgaggaagagaacacgagcttgaaggtcatatataccagaagttctgagattgaagagctgaaagccactattgaaaatctgcaagagaatcagaaacgattacaaaaggagaaagcagaggaaattgaacaactccatgaagtcattgagaagctgcagcacgagctgtccctcatggggcctgtggtgcacgaagtcagcgacagtcaggctggcagtctgcagagcgagctgctctgctcccaggccgggggccctcgtgggcaggccctacagggcgagctcgaggctgcgctggaagccaaggaggccctgagccggctgctggctgaccaggagcgcaggcacagccaggccctggaggccctgcagcagcgcctccagggcgcagaggaggctgcggagctacagctggctgagctggagcgcaatgtagccctcagggaggctgaggtcgaagacatggcctcccggatccaggagttcgaagcggccctgaaagcaaaggaagcgacgattgccgagagaaatttagaaatcgacgctctgaaccagcggaaggcggcccactctgccgagctggaggccgtcctgttggccttggcccgcatccgccgcgccctggagcagcagcccctggcagccggggcggcgcctcccgagctgcagtggctccgagcgcagtgtgcccgcctcagccgccagctgcaggtgctgcaccagcggttcctgaggtgccaggtggagctggacaggcggcaggcccgcagagccacagctcacacacgggtgcccggggcccacccacagcctcgcatggatggtggcgccaaggcccaggtcaccggcgacgtggaggcctcccatgatgctgctttggagccggttgtccctgacccacagggtgatctgcagcctgtcctggtgacgttgaaggatgcacctctctgcaagcaagaaggcgtgatgtcagtgctcaccgtctgccagaggcagctgcagtcggagctgctcttggtgaaaaatgaaatgcgcctgagtctggaggacggcggcaagggtaaagaaaaagtactggaagattgtcagctgccgaaggtcgatctcgtagctcaggtgaaacagcttcaggaaaaactgaaccgtttgctgtattccatgaccttccagaatgtggatgctgccgacaccaaatctctgtggcccatggcctcagcacacctgttggagagcagctggagtgatgattcctgtgacggagaagagcctgacatatcaccccacatagacacatgtgatgccaatacagccacggggggtgtaactgatgttatcaaaaatcaggccatagacgcgtgtgatgccaatacaaccccagggggtgtaactgatgttatcaaaaattgggattccttgataccagatgaaatgccagattctcccattcaagaaaaatcagaatgtcaggacatgtctctttcttcaccgaccagcgtacttggtggctcccgccaccagagccacactgcagaggctgggccccggaagagcccggtcgggatgctggacctgtcttcctggagctcccctgaggtcctcaggaaggactggaccctggagccctggcccagcctccccgtgacaccccactcaggagccctgagcctgtgcagtgccgacacatccctgggggacagggcggacacctcgctgccacagacccaggggccggggctgctttgttccccaggcgtgtctgcagcagcgctggcactgcagtgggccgagtctccgccggctgacgaccaccatgtgcagaggacggctgtggagaaagatgtcgaagattttatcacaacatcctttgattctcaagaaacattaagttcacctcctcctggattagaaggaaaagctgatagaagtgagaaaagtgacggctcgggttttggagcaagactgagcccggggtcaggaggccctgaggctcaaactgctggtcctgtgacccctgcttccatctctggaaggtttcagccgctgccggaagccatgaaggagaaggaagtgcgtccgaagcacgtgaaggctttactgcagatggtgcgtgacgagagccaccagatcctggcgctgtcagaaggccttgcacccccaagcggcgagccacacccaccccggaaggaagacgagatacaggacatctcgctccatgggggaaagacgcaggaagtgcccaccgcgtgccccgattggagaggggaccttctgcaggttgtgcaagaggcctttgaaaaagagcaggagatgcagggggttgagctgcagccccgactcagtggctcagatctggggggtcacagctccctgctcgaaaggctggagaagatcatccgtgagcagggagacctgcaggaaaagtccctggagcatcttcgcttgccggaccggagcagcctgctgtccgagatccaggcgctgcgtgcccagcatgcgcatgacgcacctgttgaattaggagaagctgcagcacttgcgcacggggctgagaagcgcagaggcgcgcgggagccatcatgagcaccagctgcgcaggcaggttgaactggtggcttataaagtagagcaggagaagtgcattgctggggacttgcagaagacgctgagtgaagagcaagagaaggcaaacagcgtgcagaagctcctggcggcggagcagactgtagtgcgagatttgaagtccgacctctgtgagagcaggcagaagagcgaacagctgtcccggtccctctgcgaggtgcagcaggaggtcctccagctgagatccatgctgagcagtaaggagaacgagctgaaggccgcgcttcaggagctggagagtgagcaggggaaggggcgtgccctgcagagccagctggaggaggagcagctgcggcacctgcagagggagagccagagtgccaaggccctggaggagctgcgggcgtctttggagacacagcgtgctcagagcagtcgactctgcgtggcactgaaacacgagcagacggccaaggacaacctgcagaaggagctgcgtatcgagcactcacgctgcgaggccttgctggctcaggagcggagccagctctctgagctccagaaggaccttgcggctgagaagagccgcaccctggagctgtcagaggccttgcggcacgagcggctcctgaccgagcagctgagccagaggacacaggaggcttgcgtgcaccaggacacacaggcccatcacgctctgctgcagaagctgaaggaggagaagtcccgggtggtggacttgcaagcgatgcttgaaaaggtgcagcagcaagccctgcattctcagcagcagcttgaggctgaggctcagaagcactgtgaggcgctcaggagagagaaggagcgagaattagaactgcagcgtcagcgtgacttgcataagatcaagcagcttcagcagacagtgagagacctggagtcgaaggacgaggtgcctggcagccgcctccacctaggttctgcccgcagggctgccggctcggatgcggaccacctccgggaacagcagcgagagctggaggcgatgaggcagcggctgctctctgccgcccggcttctcaccagcttcaccagccaggccgtggacaggacagttaatgattggacgtcatccaatgagaaagcagtgatgtctttactgcacacgttggaggagctggagtctgacttgagcaggcccacctcctcccagaaaaaaatggcagcagagctgcagttccagtttgtggacgtcctgctgaaagacaatgtttccctcacaaaagcgctcagcacggtgacccaggagaagctggagctgagcagagccgtgtctaagcttgagaagttgctgaagcaccatctgcagaagggctgcagcccaagcaggtcggaaaggtctgcttggaagccagacgaaacggctccacagagttccctgaggcgcccagaccccggccggcttccaccagctgccagcgaggaagcacacaccagcaatgtcaagatggaaaaattgtacctgcattacttgagagcagagagctttagaaaagctctgatttatcaaaagaagtatcttttgctgttgattggtggattccaggattctgaacaagaaacactctccatgattgcccatttgggggtatttccttccaaagcagaacggaaaatcacatctcgtcctttcaccaggttccgcacggccgtcagggtggtcattgcaatattaagattacgttttttggttaagaaatggcaagaagtagatcggaaaggagctctggcacaaggcaaagcccctcgcccagggccccgagcacgacagccgcagtctccacccagaaccagagagtccccccccaacccgggatgtaccctctggccacaccagggaccctgccagaagactgcagactggcaggcagcagcctccccacaacagtgggggaagagccactccatccccaaattcaagattagaaagatccctgactgctttctcaagatccagaacattccttgacagagtatattcaccatttagaaagggtcccacccaagaattgcgagggggcctacccccattctacttcaaagaaatcctgccacccgatgattaaacagtgaataaaatgtcatggctctttccctggcgacaattctatttgagggaaaagatttgtttttcccttttcccaaggaaagctcgtggggacagcatggggcactacctcttcattgtgcgggtggacacccagcccccagatgccttgaattaagtgtcctcacctttatgcatgacctgcaaagcccagctggagcattttcttatggagcctccgtatgttttaggccccatgaccttcgtgaggtgacgggcactcactcccatgagccctggctgtgtgctgttgtgtgcctatcggcagatccatccttccgtgcctccaaggaggatacacagagaatggcttcctgttgttttgtttattttcttaacgtgtacagatggaaacttcatttaaaaataaaaacaaaacaactcaaaaaggaataaaatttaatcactgttttgtttgtgaat

SEQ ID NO: 4450 - DNA, 766 bp, Homo sapiens
  SIMILAR (153)..(419): 701254mologous to Homo sapiens Membrane-bound protein PRO1158,accession number AAY66747,Smith-Waterman Score=289.
  misc_feature (1)...(766): n = a,t,c or g
gaattcggcacgagccacccccaacctcaagttgccgccggaagagcgcgagaagccccttcctcggcgctgccaacccgccacccagcccatgggaaccccgggctggggctgcttctggcgctgggcctgccgttcctgctggcccgctggggcgagcctgggggcaaatacagaccacttctgcaaatgagaatagcactgttttgccttcatccaccagctccagctccgatggcaacctgcgtccggaagccatcactgctatcatcgtggtcttctccctcttggctgccttgctcctggctgtggggctggcactgttggtgcggaacttcgggagaagcgncagacggagggcacctaccggcccagtagcgaggagcaggtgggtgcccgcgtgccaccaacactgcccaggactgcgggttgctggcttgtacaccgcagctgccaccgagacaccagcctctgatggctcaggaggacttgtggggagaggctgggggcaccatgtggtgggctctgtgcanatgttgcctctgcttggtgtgctgcagctcagggtgtggggccgggacccaccccctcctttctttaagtnctcccatgaagccgaggccgggccctcaggactcaaggaaacggtgagggtgctgcaataaggnccctccctgattgttcttattgtgtgtacttggnaaggagtgcttctggagtantaccagtgtaangaggnanagnctaancttgcctnggaaaannt

SEQ ID NO: 4451 - DNA, 577 bp, Homo sapiens
  SIMILAR (419)..(243): 571254mologous to Homo sapiens Human signal peptide containing protein HSPP-90 SEQ ID NO:90,accession number AAY87313,Smith-Waterman Score=152.
ttttttacatctcactactaattttatataaatatataaaagtgaatagccccatcctctcttgacctcaggggcagagtctttgaagtaccttcttccctgctattaagcactgggtggatctgactgcccagagagggcactgcctttccccaaggtcacacagcaatgaagggagacagatgcaggagaggggacctagatgggcaggcagccctgcaccgtctccttggagtcctgaggggcccgggcctcggctgcatgggagaactgaaagaaaggagagggggttgtggggcctgctggacacacagagaaaagttggttccgcaagcaggggggtgggtcccgagccccagcacacatgagctgcaggcacagccaagcagaggcaacatgctgcacagagcccaccacatgggtgcccccagcctctccccacaagtcctcctgagccatcagaggctggtgtctcggtggcagctgcggtgtacaagccagcaacccgcagtcctgggcagtgttggtggctgcagcaggccccagcgttcagatgagccgctcttccggcggccgc

SEQ ID NO: 4452 - DNA, 747 bp, Homo sapiens
  SIMILAR (389)..(535): 1001254mologous to Homo sapiens Membrane-bound protein PRO1158,accession number AAY66747,Smith-Waterman Score=248.
cgacggaccgagggtgtcgagggagggacactttccatgaacctgagctaggtcaaagacgcccgggccaggtgccccgttgcaagtgcccctggccggagatgcggtaggaggggcgagcgcgagaagccccttcctcggcgctggcaacccgccacccatcccatggcgaaccccgggctggggctgcttctggcgctgggcctgccgctcctgctggcccgctggggccgagcctgggggcaaatacagaccacttctgcgaatgagaatagcactgttttgtcttcatccaccagctccagctccgatggcgacctgcgtgcacaagccatcactgctatcatcgaggtcttctacctcttggctgccttgctcctggctgtgggggctggcactgttggtgcggaagcttcgggagaagcggcagacggagggcacctaccggcccagtagcgaggagcagttctcccatgcagccgaggcccgggcccctcaggactccaaggagacggtgcagggctgcctgcccatctaggtcccctctcctgcatctgtctcccttcattgctgtgtgaccttggggaaaggcagtgccctctttgggcagtcagatccacccagtgcttaatagcagggaagaaggtacttcaaagactctgcccctgaggtcaagagaggatggggctattcacttttatatatttatataaaattagtagtgagatgtaacaaaaaaaaaaaaaa

SEQ ID NO: 4453 - DNA, 1046 bp, Homo sapiens
gcgaccgcagggcttccccgcctggcgcctgccctccaggcgtggggctacgcctgggcggttaccccgcagctagccccggccccatccccgcccagagccgggcgttcgtgtgggtccgtgggtgataattgagagcgtcagacccaggactgttcagggaggagccccggtcagactcccacgtgtgaagaccgggccccaagtggcaagggctcggccttggggcggggcagcttgggtccttggacgttgataggaagcggaagggggaatcgccgggaaagctgggcccaagtccaggtcccgcaaaggctttctgaagaagaaggaagggcgagtaaggttgcacctggaccgcttgatggttggccaaggattgctcaagcttgggccaggaagggcaagcaccttgcttgggggaccggtggctcctggcccccctctcatgccccaggacaccagcttgggttccagcttaagcagccacttgggaatcagagggaatgggggcagaacttgggcattcaggacctttgaggacaagttgaccccaacccgcccaccgccactatcaggccccggggaccggcacttgacagggaaaccttccggtcgtgagggagcactttcccaggggccgcagggacgacactctccagggaggccccagcaacaagcatcatcttcttgctgtgagaggtctcaccccgggctacctcctgtcactactcactgccctggggtccagtgggcaagttgcccagggtgggggtgcctagccaggtgcagtccccgccccgcctagtcctcgggcgtcgacgcaatgctcacctcgcctcttccccactaacatcccagactttaaaattcagtaaatcagatgcacgccgagaatacacttaattatttaaatgaacaatgggggggccctttaaaaaaaacccttgggggggccaaattttacgggggcaggaaaagtaaagttttttcctttttggggggtgaatataaaaacaacttgggaattttgggaaagaaccttt

SEQ ID NO: 4454 - DNA, 664 bp, Homo sapiens
  misc_feature (1)...(664): n = a,t,c or g
ccctctcctaaatttaaanggatataatacataaattatgttctccctacacaatagaatgaaattaggaattgatatagtttgaatttttgttcactcccaaaactcatacttaaaagttaattccccattttggaaggtgtcgggaggtgggaactttaagaggtgttggggtcatgagggttatgtgctcattaatgggttaatgcccattatcacagaaatgtgttcattatcacaggaggagtactgttataaaagggcaggtctggcctccccttgctctctcttgcctttccacctcccaccatgggatgatgcagcacaagggtcctgccagatgctgccccctcattcttcggatttcccagcctccagagctgtgctaaataaatttctgttcattattaaatacccagtcttaagtattttgttatagcaggacaaattggaataagacagaaatcaacaggaaaaaatttggaaaactcccaagcatatggaaattgagcagcactctactaaataaccaatggatcagaggaaaacaaaagggaaataaaaaaataccctgacataaatgaaaatgaagacacaacatatcaaaatttatggaatgaactgaagcagtgttaaatgtctagctgcacatgcgtataataag

SEQ ID NO: 4455 - DNA, 773 bp, Homo sapiens
  SIMILAR (262)..(161): 641254mologous to Homo sapiens Human secreted protein, SEQ ID NO: 7879,accession number AAG03798,Smith-Waterman Score=93.
ttttttttttttttgagatggagtctcactctgttgccaggctggagtgcaatggtgggatctcagcttactgcaacctctgcttcctgggttcaagcaattctcctgcctcagcctcctgagtagctgggattacgggtgcccaccacgcccggctaattttttgcatttttaatagagacagggtttcactatgttgtttaggctggtctcgaactcctgacctcatgattcacccatctcggcctcccaaagtgctggggattataggcgtgagtcaccgcgcccggccctcttgtcttctcttagcctacttctcagagtttgtttctaagtggaagcagtcctccaccaaagcactaccatgtggttttagaatgctctgccctgttttaacacctgttgagaaataaaatgtttggacttatgaagtaagccccaccaagacaaaatattgggatgtcaataataacctttttaaaaatggctggttcttcagacagagaaaataaaaatcaccatacatttctaccccagattaacttccaaaaaaacaaataactagctagacctgttcaggagtatggtagcccacatgtgtgtggggtcccctagttttcctcatttttgtctctgtcctgaccaagtaacacatggtgccttgacccagccagctgatgttttcctctgcaggtctgaaccccagcctgggccttgaacattcctaggcactgataacggtgcttaggttgttgctggaaacactgaaagat

SEQ ID NO: 4456 - DNA, 884 bp, Homo sapiens
cctacctgtccatacatcaggtctatggcaaagaggcttgtattccatgcgggcctgggagtaaaaacaatcaggaccattcggtttgctatagtgactgctttttctaccatgaaaaagaaaatcagagtttgcactatgactttagcaacctcagcagtgtgggctcattaatgaatggccccagcttcacctccaaaggaacaaaatacttccatttcttcaatatcagtttatgtgggcatgaggggaagaagatggctctctgtaccaacaatataacagactttacacgtaaaagaaatagtggcagggtcagatgattacacaaatttggtaggggcatttgtatgccagtcaacaattattccttctgaaagtaaggggtttccgagcagccttatcatcacaatcccatcattctggcagatacattcataggagtcacagttgaaaccacattgaaaaatattaatataaaagaagatatgttcccagttccaacaagccaaataccagatgtgcatttcttttataagtcttctacagcaacaacatcttgtattaatggccgatcaactgctgtgaaaatgaggtgtaatcctactaaatctggagcaggagtgatttcagtccccatcaagtgcccagcaggtacctgtgatgggtgtacgttctatttcctgtgggagagtgctgaagcttgccctctgtgtacggagcatgacttccatgagattgagggagcctgcaagagaggatttcaggaaaccttgtatgtgtggaatgaacctaaatggtgcattaaaggaatttctttgcctgagaaaaagttggcaacctgtgaaacggttgacttttggctgaaggtgggagccggtgtg

SEQ ID NO: 4457 - DNA, 2700 bp, Homo sapiens
  SIMILAR (153)..(1517): 951254mologous to Homo sapiens Human SEC10 protein sequence (clone ID 1795045.0.77),accession number AAB48377,Smith-Waterman Score=2431.
gctgttcggtcaaggagtgcctgcaggccagtgccaagctgccttcagcccctgcttcagtctctctcctgtgcttgttggtggccaaagtctggaggaggctgaggtggcaggaagctgctttctcctgtgcttctggagagtatctagaaatgaagaaccaggtatgcagtaagtgtggtgaaggcacctattccttgggcagtggcatcaaatttgatgaatgggatgaattgccggcaggattttctaacatcgcaacattcatggacactgtggtgggcccttctgacagcaggccagacggctgtaacaactcttcttggatccctcgtggaaactacatagaatctaatcgtgatgactgcacggtgtctttgatctatgctgtgcaccttaagaagtcaggctatgtcttctttgagtaccagtatgtcgacaacaacatcttctttgagttctttattcaaaatgatcagtgccaggagatggacaccaccactgacaagtgggtaaaacttacagacaatggagaatggggctctcattctgtaatgctgaaatcaggcacaaacatactctactggagaactacaggcatccttatgggttctaaggcggtcaagcctgtgctggtaaaaaatatcacaattgaaggggtggcgtacacatcagaatgttttccttgcaagccaggcacattcagcaacaaaccaggttcattcaactgccagagttgcaaaataattgacccatttctgaaacgctttttttatgttgcagaggaaggatccagtgagtgtacagagcgccctccctgtaccacaaaagactatttccagatccatactccatgtgatgaagaaggaaagacacagataatgtacaagtggatagagcccaaaatctgccgggaggatctcacagatgctattagattgcccccttctggagagaagaaggattgtccgccttgcaaccctggattttataacaatggatcatcttcttgccatccctgtcctcctggaacattttcagatggaaccaaagaatgtagaccatgtccagcaggaacggagcctgcacttggctttgaatataaatggtggaatgtccttcctggcaacatgaaaacttcctgcttcaatgttgggaattcaaagtgcgatggaatgaatggttgggaggtggctggagatcatatccagagtggggctggaggttctgacaatgattacctgatcttaaacttgcatatcccaggatttaaaccaccaacatctatgactggagccacgggttctgaactaggaagaataacatttgtctttgagaccctctgttcagctgactgtgttttgtacttcatggtggatattaatagaaaaagtacaaatgtggtagaatcgtggggtggaaccaaagaaaaacaagcttacacccatatcatcttcaagaatgcaacttttacatttacatggggcattcccagagaactaattcagggtccaagataatagacggttcatcaatgacatggtgaagatttattctatcacagccactaatgcagttgatggggtggcgtcctcatgccgtgcctgtgccctcggttctgaacagtcgggttcatcgtgtgtcccctgccctccaggccactacattgagaaagaaaccaaccagtgcaaggaatgtccacctgacacctacctgtccatacatcaggtctatggcaaagaggcttgtattccatgcgggcctgggagtaaaaacaatcaggggaagaagatggctctctgtaccaacaatataacagactttacagtaaaagaaatagtggcagggtcagatgattacacaaatttggtaggggcatttgtatgccagtcaacaattattccttctgaaagtaagggtttccgagcagccttatcatcacaatccatcattctggcagatacattcataggagtcacagttgaaaccacattgaaaaatattaatataaaagaagatatgttcccagttccaacaagccaaataccagatgtgcatttcttttataaaacaatttatagacagataatagatatcaagtgcccagcaggtacctgtgatgggtgtacgttctatttcctgtgggagagtgctgaagcttgccctctgtgtacggagcatgacttccatgagattgagggagcctgcaagagaggatttcaggaaaccttgtatgtgtggaatgaacctaaatggtgcattaaaggaatttctttgcctgagaaaaagttggcaacctgtgaaacggttgacttttggctgaaggtgggagccggtgtgggagcttttactgccgttttgctggtggctctgacctgctacttctggaaaaagaatcaaaaactggaatacaaatattccaagttagtaatgacgactaactcaaaagagtgtgaactcccggctgcagacagttgtgctatcatggaaggagaagataatgaagaggaagttgtatattccaataaacagtcactactaggaaaactcaaatctttggcaaccaagactgctatcggtgtttttggtggcccctggagcttaggatatgtcatatcctgtcagtactctgagacaagatcaagttgtattatttctgtgcatgctaaaaatgaaattttagcgattgaagaggaataa

SEQ ID NO: 4458 - DNA, 1872 bp, Homo sapiens
  SIMILAR (664)..(1146): 681254mologous to Homo sapiens step II splicing factor SLU7,accession number AF101074,Smith-Waterman Score=517.
aattttgactccaagagacgaattactgtccggaatctcaggattcgagaagatattgcaaaatatttgaggaatttagatccaaattctgcccactatgatccaaaaactagagcaatgagagagaatccttatgccaatgcaggaaagaatccagatgaagtgagttatgctggagataactttgttaggtacacaggagataccatttcaatggctcagacacagtgtaagtgtttcctctatgtcaagccattttatatcagctcataagacgtttgggattgtttaaagcttgttttcaagaagcatacagtaatgcagctgccaactcactaagatgtttcgaattactctagtgtttgcatgggaagcctaatgacaagggatctgaaagtgcatctaccaggcagatccttacaaagctagagctgttgtataagtcccttcaaagtcaaaaaaagaagatttcaaagaacagcagaaagaaagcatcctggaaaagtatggtggccaagaacatttggatgcccctccagctgaattgcttttagccccagactgaagactatgtggagtactcaagacatgggacagtcatcaaaggacaggagcgggctgttgcctgctctaagtatgaggaggatgtgaagatccacaatcacacacatatctggggatcgtactggaaagaaggccgcagggggaaccaaatgctgtcactcttttttcaagtattcctattgtactggagaagctgggaaggagattgttaactctgaggagtgtattataaatgagataactggggaagaatctgtgaaaaaacctcaaaccctcatggagctgcatcaagaaaaactgaaagaggaaaagaagaagaagaaaaagaaaaagaagaagcatcgaaagagcagttcagatagtgatgatgaaaaaatggggcatgttaaatcgaataaggcactgaacgcataggaggccacgccttcttcatgtcaaggagaccattgcagatttgatgagaggaagcggcctttacaatagcatgtattaaacttcaagaccttattgaagaggaaatggaggcatatagaatgaaaccgtcagaggccagatgaccccatggcctctttccttggacagtagcaactagtcagaagaccatccaagatagatgcagctgatacattcttttcagcttcttattgatgattgtagataggaaaaatccttgtttattcttcttgctgcctggctttaataaatattttcagatgcctcacagttaagttcactcctttccatactgaggaaacaagaaaagaagaagaggcacatgaagtgtgcttttgggaatagaatttaaaattggattaagattttatttccagttttttttatttatttatttttttttttgagacggaatctcactttgtcgcccaggctgaagtgcggtggcgcgatctcggctcactgcaagctccacctcccaggttcacgccattctcctgcctcagcctccctagtagttggggactacagggcgcccgccaccatgctcagctaattttttgtatttttagtagagacgcggtttcatcgtgttagccagggatggtctcgatcttcctgaccacaagcaatccgcccacctcggcctctcaaaatgctgggattacaggcgtgacacccgcggcctgggcctgtcacaggtttgttttttttttttctgttttttgagatggagtcttgaaaaaaaataaataaataaaaaaaactggaaataaaatcttaatccaattttaaattctattcccaaagcacacttcatgtgcctcttcttctttttcttgtttctcagtatgg

SEQ ID NO: 4459 - DNA, 2312 bp, Homo sapiens
  SIMILAR (937)..(1614): 711254mologous to Homo sapiens RNPEP-like protein,accession number AF300795,Smith-Waterman Score=728.
  misc_feature (1)...(2312): n = a,t,c or g
gcgcaccagcccttaaggtcatcctgcggtacacctagaccgacgcccccgccatctggtggctggacccagagctgacctatggctgcgccaagcccttcgtcttcacccagggccactccgtgtgcaaccgctccttcttcccgtgctttgacacacctgccgcgaagtgcacctactctgccgtcgtcaaggcgccatcgggggtgcaggagctgatgagtgccacccggagcgcatacatggaggaagaaggcgtcttccactttcacatggagcaccccgtgcccgcctacctcgtggccctggtggccggagacctcaagccgggagacatcgggcccacgagccgcgtgtgggccgagccatgcctcctgcccacggccaccagcaagctgtcgggcgcagtggagcagtggctgagtgcagctgagcggctgtatgggccctacatgtggggcaggtacgacattgtcttcctgccaccctccttccccatcgtggccatggagaacccctgcctcaccttcatcatctcctccatcctggagagcgatgagttcctggtcatcgatgtcatccacgaggtggcccacagttggttcggcaacgctgtcaccaacgccacgtgggaagagatgtggctgagcgagggcctggccacctatgcccagcgccgtatcaccaccgagacctacggtgctgccttcacctgcctggagactgccttccgcctggacgccctgcaccggcagatgaagcttctgggagaggacagcccggtcagcaaactgcaggtcaagctggagccaggagtgaatcccagccacctgaggaacctgttcacctacgagaagggctactgcttcgtgtactacctgtcccagctctgcggagacccacagcgctttgatgactttctccgagcctatgtgggagaagtacaagttcaccagcgtggtggcccaggacctgctggactccttcctgagcttcttcccggagctgaaggagcagagcgtggactgccgggcagggctggaattcgagcgctggctcaatgccacaggcccgccgctggctgagccggacctgtctcagggatccagcctgacccggcccgtggagggccttttccagctgtggaccgcagaacctctggaccaggcagctgcctcggccagcgccattgacatctccaagtggaggaccttccagacagcactcttcctgggaccggctcctggatgggtccccgctgccgcaggaggtggtgatgagcctgtccaagtgctactcctccctgctggactcgatgaacgctgagatccgcatccgctggctgcagattgtggtccgcaacgactactattccttgacctccacagggtgcggcgttttcctgggagagccagatgtcacgcatgttacaccatcccgctgtacgaggacctctgcaccggtgccctcaagtccttcgcgctggaggtcttctaccagacgcagggccggctgcaccccaacctgcgcagagccatccagcagatcctgtcccagggcctggggttccagcacagagcccggccttaggagcccagcacgggagctgggcaaggctgaagcagacacagactcggacgcacaggccctgctgcttggggacgaggcccccagcagtgccatctctctcagggacgtcaatgtgtctgcctagccctgttggcgggctgaccctcgacctcccagacaccacaattgtgccttctgtgggccaggcctgccatgactgcgtctcggctctggccatgagctctgcccaggcccacaagcccctcccctgggctctcccaggcagggagaatggggagagggacctccttgtgtctggcagagacctgtggacctggcctccccactcccagctctcttgcactgcaggccctggggccagcccgcacacaccatgcctcctgtctcaacactgacagctgtgcctagccccggatgccagcacctgccaggtgccgccccggggcaagggccccagcagccctatggtgaccgccacactgtgccttaatgtctgccgggggcccaggctgtgctgtccctgcagcacgcctccttggnagggatctgagccaccctccccgcacagccctgcaccccgcccctaagggttggcagcctcagttggcccctggcagaggaacaaggacacagacattccctcagtgtggggggcaggggacacagggagaggatggttgtccctggggagggccctctggccccaggcaaccttagcccct

SEQ ID NO: 4460 - DNA, 851 bp, Homo sapiens
  SIMILAR (1)..(393): 791254mologous to Homo sapiens hypothetical protein,accession number AL133084,Smith-Waterman Score=544.
ttcatgggaggcgtaaacagagctgatgaaaacattgataagtatcgggcatcaatccgtggaaagaaatggtattcaagccctcttttgttctgtttcgaattggtcttacaaaatgcttggcaattgcataaaacatatgatgagaaaccagtggattttctggagtttcgtcgacgtgtggtatgccattatctggagacccatggtcatcctccagaacctggccaaaaaggaagacctcagaagcgtaacattgactcacgttatgaagggccataaatccaggtggatagtccaaaccagggaaaagcaaacccgatgccgctgaatgtcataagaacacaacttttccgatgtgaaaaatgtgatgttgcccttacatgtgaagtgttcccgttgaatatcacactgaatagcaggtgtcaccacctcctgagataagaaacatagttttatacattatgtacagtgtagcagtggttttgcctagtgttccaattttggattttcttttaacaatggaacataataaatttttttttctcttcaaatttttggtgcttgaatttttctagggaacatatatgaatttcatgcaaaaattcaaaaaattgtaacctcagacataaatgggttaaagatgttttcttagagagcacattgccttcttttaaataacaaagctgagacacaaatgaagactaattctgcttcctgctctgcacacacctttcattcttggctctgggcataattgtctatatcagtcttaatttactccatgagatctgcactcctaactgagggtatttcatctgctcagatgtgccaattaagtttacccagat

SEQ ID NO: 4461 - DNA, 1673 bp, Homo sapiens
aaaaagttttcctgtggtttaaaaaaaatctttcatgaaaagaattgtcaatcaacgtgacaaatttcattattgtcttattttaagaaactgcaacagccaccccaactttcaagcaccaccttgatcaacagccatcaacattgaggcaaaaccctccaccagcaaaaagattatgactcattgaaggctcagctgatggttagcagtaaaaaatattaactttaatcatctcgaccattcagtactcatctaatattctctataacaaaatgggaaatgcacataaagcacttctgctacatgctgaattatgattgttgtctccaggaaaagaacttgtgggaacgtttgagttgtaagctgaactaactagctgcttttttcatgaaataccgcttttactggaaagaactgacagataaactgaggtattcaaacctagatatttggcagacattttcgtgaaaataaatatgttcgtgccacttcaaggaacataattctcagtacttgttgccaataatgttggaattttcatgcaaaaattcaaataaaaaacaaacttaaaaccatcaagaacttggtgactttatgtggaagccagtgctacaatactttagcttcccaatacttaaaaacttttctgatgagattactagtgatattaacaatgtgattgatattgaataatgaaatgttttagcatttggaagatctgtttaattcagtaaatcagtattttccaaatgaccaatgcatgacatttcaacatcacgcacaggaaaataggcattcgaggtacagtcaaaaataatgagttttaatgtaacaagtacaaaatgtccattgaagtggtttcaaattccaaatagtaattggaaaatccaccactcgtgttttggggtagtagtatcgaaaaagaataaccaagataatttgaaaaggctattaaaaaatacttctcaattttaaaactgcatacagcaggtgctcattcatttctttgtaacattgatgagaaaaagactcccagccaggggcactgtctttgtggtgtttacgtgttctcgccacacctgcataggttttctctgggtgctgcagttcttgccacatcccagaggtgtgcacgtgaggtgaactgggggtgtcttccactgtccccagtctgagtgtgggtgtgtgagtggccctgtgatggaatggcgtcctgtccagggctggttccctctttgtgccctgagctactgaaaccaggcttcagctacacatgacccagaactggaataattaagtaataattatctttttattcatctttcttaaatgtatgtatagctcacatttatttcaatgtttaatattagaatacttttggcctttagaagcttagtgatttttttttttccttggccagaagtatgctttaggaacttaatccttattttttagcctctggtaaaattggttttgctatacgttgtttcacttaaaagtcctgattcccaagaacgcactgacagcagtgaggacttgctgcgcatgcgggaggccagattttcttatctgtgtgaagccagacatgaaagagatctgtcaacacataaaacaaaatcaaagtctgttttttgtctggaaaagatttttaataaaaatataacttatgttaa

SEQ ID NO: 4462 - DNA, 391 bp, Homo sapiens
  SIMILAR (4)..(252): 311254mologous to Rattus sp. reverse transcriptase homolog,accession number S80119,Smith-Waterman Score=45.
  misc_feature (1)...(391): n = a,t,c or g
tgtagattcaatgcaatttcaagcaaaattacagcagactttacggtttttggtggttttttgctagaagttcacaaagtgattctaaaatgtaagtggaaatattacataatctagaatagtcaaaacaggttttaaaaagacacaattaagtgacttatactacataataacaagacttaatatacaagcataataatcaagacagagttgacaaaatatcgacataagaatggagaatccagaaatagacctgcatagatttgatcaaatgattttcgatgaaggcatcaaagtaattcaataaggaaaggaaagacttttcaaccaatggtgctggagcagattacgttgtatatgtttgaagttttctataacaaatggtcaaaan

SEQ ID NO: 4463 - DNA, 387 bp, Homo sapiens
  SIMILAR (157)..(261): 481254mologous to Homo sapiens hypothetical protein,accession number AL390173,Smith-Waterman Score=87.
caccttcccaaatttgatgacaaacatgaatctacaaatccaagaagctcaatgaattccaagttggaaaaactcagagcatcacagtaagacacctcataatcaaactgttgaaaatcaaaggtaaagaaagaatcttgaaagtagcaaaagctcatcacgtacaagggatgctcaataagattaagaggtgatttttcaccagaaaccactgaagctagaaaatagtgggatgacatattcaaagtgctgaaagaacaagtatcaaccaagaatttgatattcagcaaaactgttctttagacatgaagtttcattctcaaataaacaaaaatggaaagaatttgtcacaagcagacctcttctacaagacatattaaatactga

SEQ ID NO: 4464 - DNA, 494 bp, Homo sapiens
  SIMILAR (146)..(295): 961254mologous to Homo sapiens Human secreted protein sequence encoded by gene 3 SEQ ID NO:69,accession number AAY91348,Smith-Waterman Score=246.
attagtccagtctggtggaattcctcatttaaaactcataaccagccggtgaggtcggtacttcgctcctcctcattctgcggaggggaaagcagcacggaaatgccctgtgactggcagcggaaaaggcgaccaccgcttgtgtatcttcagtttagatcttggaggcatatcaactgtggttctaaatggctatgatgtagtaaaggaatgccttgttcatcaaagcgaaatttttgcagacagaccatgccttcctttattcatgaagatgacaaaaatgggagactcattgaaaaagcttcagtcaacagaaagcctcagctacctcagcattttgttgatgcttatttagatgagatggatcaaggtaaaaatgacccatcatctactttctccaaagaaaacctaattttctcagtgggtgaactcatcattgctggaactgaaactacaaccaatgtgctacggtgggcgattcttttcatggccct

SEQ ID NO: 4465 - DNA, 2097 bp, Homo sapiens
  SIMILAR (1285)..(2082): 301254mologous to Human herpesvirus 6 U88,accession number X83413,Smith-Waterman Score=341.
tttttttttttttcctcacatattagctcccctttttattttttaaaaactcttcccattctgacctcagcctcctccattaagttttctgcatccgtgcgacaagtctggggccatggctgctccttgaggctgctgcctttgaggtgctcttgtcatcaatttggatgtataaactactaatgttgactcatggcctagggaaagctaattcaaaggcaaggacagatgattccacagagtagtcacttgaggctcacaaatcatcagacacctgaaatggttttctcctatgatcactttcttcacttttcatatccattttaagtttttccctttgcagctcagtagtaaaatgctctctgatgaatttttatggatgtccatattgtgtattccattctcttcttgttcaaatcttgacattgagaattctcttcatctcagaaagagctccatttggatagaatgcttgcaatttatttggataattatcccagtaaaattcctgaagatctggtttgcagaacgttgaactgtctccagatgaagaactggttgggccttgctatttcttctcatcttcacatccaccatgggcaagctaaagaaaagccaatgatgtcactgattggctgaagctgcagagctggcttcgagcatggccggattggctgctagctcttctggtgcctgcctgctcgggcagcggttgaaccagatactttctgtctctcttgttgtcgtttgaagcaaatcttgttcagcccagctgtgtctccatagtagtggcaccctaagagagagtctccctcctgcttcccacagctcgtctgtgaggcggtcgctgctgtgaaataccagctcttggtaccaagcccagacagcgttctcagatccatggtgctttctccaggtgtgcccatggccacccatgaaccaatcaacatgcacttcctcccctctgaagcccataaaaactctggactcagccagactcaggcaaacaatgggatggcctgcctgcagataggagctacccagtccaggtttcctctctgttgaggggtccttctccatcttcacacacttcactccaatctctgcttccatcatcccatctcctctgaacttcactcttttaaagaccctggtgattatactgggccttctgtgcaatccaggataatcttcttgtctcaagattcttaatataatcacattagcaaagtctctcttgctcttttggatataagcgtttgttattaccttttggatacaggcatttgttattgccttttggatataagcgtttgttattgtcttttggatataagcatttgttattgccttttggatacaagcgtttgttattgccttttggatataagcgtttgttattgccttttgaatataagcatttgttattaccttttggatacaggcatttgttactgccttttggatataagcgtttgttattgccttttggatataagcgtttgttattgccttttggatattagcgtttgttactgccttttggatataagcgtttgttattaccttttggatattagcgtttgttattgccttttggatataagcgtttgttgttgccttttggatattagcgtttgttattgccttttggatataagcgtttgttattaccttttggatattagcatttgttattgccttttggatataagcgtttgttactgccttttggatataagcgtttgttattgccttttggatattagcatttgttattgccttttggatataagcgtttgttactgccttttggatattagcgtttgtaattgccttttggatataagcttttgttattaccttttggatattagcgtttgttattgccttttggatattagcgtttgttattgccttttgggtataagcgtttgttattaccttttggatattagcgtttgttattgccttttggatattagcgtttgttattgccttttggatataagcgtttgttattaccttttggataatagcgtttgttattgccttttggatattagcatttgttgttgccttttggatattagccat

SEQ ID NO: 4466 - DNA, 514 bp, Homo sapiens
  SIMILAR (283)..(513): 941254mologous to Homo sapiens Human secreted protein sequence encoded by gene 3 SEQ ID NO:69,accession number AAY91348,Smith-Waterman Score=395.
acacgatatatagcctatatttccatagaacgcccggaggataaaaaatctgaatctggatgcatctatatcctattggcttgttataggttatcagagcactggctactgttagtacaagatatatagcgtatatttcaatagaacgcccacataataaaaaatctgaatctggatgtatctatatcctattggctggttataggttatcctttattttattccagagggaaataactttaggtataattctaagaactgcataataacttgaatactttttctctgacaggacaagttcagaaagagattgatttacttatgggccctaatgggaagccttcttgggacgacaaatgcaaaatgccttatactgaggcagttttgcatgaagttttaagattctgtaatatagttccattagggattttccatgcaacctctgaagatgcagttgtacgtggttattccattcctaaaggcacaacagtaattacaaatctttattctgtac

SEQ ID NO: 4467 - DNA, 1474 bp, Homo sapiens
  SIMILAR (2)..(1339): 551254mologous to Homo sapiens Human secreted protein sequence encoded by gene 3 SEQ ID NO:69,accession number AAY91348,Smith-Waterman Score=943.
  misc_feature (1)...(1474): n = a,t,c or g
cagtctagatcttggaggcatatcaactgtggttgtaaatggctatgatgtagtaaaggaatgccttgttcatcaaagcgaaatttttgcagacagaccatgccttcctttattcatgaagatgacaaaaatgggaggcttactcaaattcaagatatggccgaggatgggttgatcacagacgattagctgtaaacagttttcgatattttggatatggccaaaagtcttttgaatctaaaatcttgggaaggaaaccaaatttttcaatggatgctattggaaacatacaaaggtaggaccttttgacttttaaacagtttaataacggatgctgttttcaaacataaccaatctgattcatttttgggaggaacgatttcactttatgnaaggacaccgatttttcaggcacatggattggagttattttaggtggaaaatgtggaactaagctgccagtgcctcagtcttcttgtataatgcctttccatggantgggcatcctgccttttggaaaacatcaacagctgtttaggaaatgacagctgtagtctatgattttctctccagactcattgaaaaagcttcagtcaacagaaagcctcagctacctcagcattttgttgatgcttatttagatgagatggatcaaggtaaaaatgacccatcatctactttctccaaagaaaacctaattttctcagtgggtgaactcatcattgctggaactgaaactacaaccaatgtgctacggtgggcgattcttttcatgggccctttatcctaatattcaaggacaagttcagaaagagattgatttaattatgggccctaatgggaagccttcattgggacgacaaatgcaaaatgcccttatactgaggcagttttgcatgaagttttaagattccggtaatatagttccattagggattttccatgcaacctctgaagatgccagttgtacgtggttattccattcctaaaggcacaacaagtaattaccaaaccttaattcctgtaccaccttggatggaaaaaagtaccgggagaagacccccagaaagtgttccccatccctgagcgatttcctgggaccagcagtgggatattttggccccaagaagggaagctttgggttccctttttccccctaggaagaagacattgtccttgggagaacactttggctcggatggaaatggtcttgtttttttccagcattgcttcagaggtttcatttgcattttcccacatgaactagttccagatctgaagccccaggttaggcatgacattgcagccccaaccctacctcatctgtgctgaaagacgctgaaactgcctgggatgttttcgggaacaagaatgtatatttgccttatccctgaacttggtttaatcaaatcaatgtgtgtattagaataaaagtcacagcatcaaaaagccaaatgaaaaaaaaaaaaaaaaa

SEQ ID NO: 4468 - DNA, 286 bp, Homo sapiens
  misc_feature (1)...(286): n = a,t,c or g
ctaagaatcccanggtctttgggagcgtccagcatgttaattagcgtatcattacatactgctatccctttccatttctttttgttccatcactcttctctcaacctgtgtttctttttttactgaggagttagtccccattagttcttgtatcacattttcatttgcacgacattactcgcaggtggtggggagcctggttcccagcattgcctcctcctagcccctctagtccagtttgcctcccttaccctcattttccaaacctctanggncanatagancc

SEQ ID NO: 4469 - DNA, 1569 bp, Homo sapiens
cttaacacccttcctgaggttcccttcacccctctctcttgccttccttccctttccctttcttcctgactagccccaagtcccttcatttgcatctgctatgcaatagtccctctcctttccttcttcttccctcagatttagctgatccttcctcccaccctggccttcctttcctctttcctcctcactctccccgtcatgctccctctgccccgccctcaaaaaaaaaaaaaaaaaaaaaaaaaaaaaaaaaaaaaacaacagcacctgtccaggcttccttaggtacatcttctttgtatccattgggaggctctgagactggccccacttggtcctaagaatcccaaggtctttgggagcgtccagcatgttaattagcgtatcattacatactgctatccctttccatttctttttgttccatcactcttctctcaacctgtgtttctttttttactgaggagttagtccccattagttcttgtatcacattttcatttgcacgacattactcgcaggtggtggggagcctggggcttttcggggaaccagggcttcctctggtccccagcattgcctccttcctagcccctctgagtccagttttgcctcccttaacctcatttttccaaacctcttgtaccctcctctccctcccccaggtgggtatgtaagtgtcttgaaagttcagtatgttatgatgggaccaataaattctgccacttcgggtttctccctaacatttcctggctccccagtttttcatgtgggggtaattcaactgaacatttcccatgggggtttcccctcccatctgcctgatccacctccatcctcccaccagggagagttggggggttgggccacaattgatcctcttgtgagaggggtgggctaccagtgtgtgtgtgggggtcatcactgccttggggaaggaagtggggcagggcagagaatccccccaatttcctggcctggaaatctctgggccttcacccctgctgggggtttgggattgaaaacccttcctccccaatttggggggggtgtttgccccattcaattgcccagctcctctggactggccccccctgaaatttagggtggggggtactaagtcaactgccaatgtgtgtaatgggactttgctgggaaaacgggggatgcttgccccttttccaggactatttgagcccagaagagagctgtcctctcatttgggtgaactgattgaggaagggtctattgtctttttaaatggcaccaatttttaaggggttttgagggtacagtccctttaacctggccacggggaggggggcccccaaactttcttccccccacacttctggttttctgtgtggagggggagcagggatatctaagctgtggtgtgaaagggtaggagagatgctggaggtgggggtgctgtgttctagaccccccatattatcccagtgtcccctgcccccctcttcccccaccccatgcccccaattctgtggcgcatccagattgtgaaaatgtacaataaatgtgtaatgagtaaccaaaaaaaaaaaa

SEQ ID NO: 4470 - DNA, 1042 bp, Homo sapiens
  SIMILAR (1)..(342): 491254mologous to Homo sapiens transcriptional coactivator ALY,accession number AF047002,Smith-Waterman Score=158.
gggcgccggggccgcggccgggccggctccagggccggccgccgcggtggggcgcaggccgccgcgcttagtgaatcgaggcggcgggcccatccggaactatttcggacgttgccggcggcgccgccggcggcaggcggcaggataccgaccggcgccctacagcaggccaaaacaacttcccgacaagtggcagcacgatcttttcgacagtggcttcggcggtggtgggccggcgtggagacaggtgggaaactgctgggtgtccaatctggattttgggagtctcagaacgccgatattcaggaacctctttgctgaatttggggaacgctgaagaagggcggctgtgcactatgatcgctctggtcgcagcttaggaacagcagacgtgcactttgagcggaaggcagatgccctgaaggccatggaagcagtacaacggcgtgccctctggatgggccgccccatgaacattcagcttgtcacgtcacagattgacgcacagcggaggcctgcacagatgcgtaaacatgaggtggcatgactagaaaccgtggcgctggagggttttggtgggtgggtggatggcacccggaaaggcaccccgtggaggcgccccgtggaagaggcagaggtgccggcaggaattcaaagcagcagctttcggcagaggagctggatgcccagctggacgcctataatgcgagaatggacaccagttaaacagaccagcaaatccgcgtgcggaacaggacccaggcgtctccgtcttgctccctggttggggggcggtggctggggctgtgcggccaatgatggatttgtttcttttatgttttaaaataggatttaaaaactcatgtaaaggtttttttttttttccttttttttttttttaattctgaaacagacctgttttgtaccgagttatttttgggataaattttactggttgctgttgtggagaaggtggcgtttcccccttttccataataaaatagaaatgtgtgtaaaaaaaaaaaaaaaaaaaaaaaaaggg

SEQ ID NO: 4471 - DNA, 370 bp, Homo sapiens
  misc_feature (1)...(370): n = a,t,c or g
acctgcttcctctgcatccggggctggacctactgagggcttctgtgccaggcatcaggcccacaggctcctgggtggcctgcagggttaggtaggagaggtcagggcagtcccaacctcccagtgcctcccaggccagtccctgcctaggacctggccacacctgccatgcccttggaagattcctctntaagttccactcccactccagtgagggccacctgagacccacctgcgagagcctcccccagggccctgtcccccatctctgtgccttctccctaccaagggttcctccagccaggaggaagagctgggggcgacagggattgatgtctaggactcggcactggggctgacttcctgcctg

SEQ ID NO: 4472 - DNA, 669 bp, Homo sapiens
  SIMILAR (15)..(305): 531254mologous to Homo sapiens Human myelin oligodendrocyte glycoprotein gene,accession number AAZ29204,Smith-Waterman Score= 182.
ttttttttttttttttttttttttgagacagagacttgctctgttgcctaggctggagtacagtggcgcgatcttgactgattgcagcctccgcctcccgggttcaagcgattcttgtgcctcagccgccccagtagctgggattacaggtgcacatcaccatacctggctcatttttggatttttagtagagacggggtttcatcatgttggccaggctggtctggaactcctgacctcaagtgatccgcccatctcggcctcccaaagtgctgggattacaggcgtgagccactgcacctggcccaaattaactacttctactttgatgaatgtcttcccactaaatatcattttattatacctagtaatattagccaaataacagtgtttaatacaactaatttatcagaacaaattacaactattcataataaacactacatataaaaatgatttttaaaagtctcagtattaacacaaatagaagaaacctaagagctgtcagatttctgcccactctttccattttccctctcctggtttggtttaaggaccccagatttattctggaaaatgcaacaagatgttgggtgaaaaatattaaaactaaatattaaacctaatacctgtaacttacatccaccttgatatgctgcttaattttgt

SEQ ID NO: 4473 - DNA, 1714 bp, Homo sapiens
  SIMILAR (79)..(381): 581254mologous to Homo sapiens Human secreted protein sequence encoded by gene 112 SEQ ID NO:282,accession number AAB56188,Smith-Waterman Score=269.
aagctcctgacctcaagtgacctacccacccttggcctcccacagtgctggaagccactgcacctggctcagaatacttttttttttgagatgcagtcttgctctcatcacgcaggctggagtgcagtggcgtatctcggctcactgcgacctccacctcccgagttcaagcgattctccttcctcagtcccccaagtagcttggattataggtgtgcgccaccacgtacagctaatttttgtatttttagtagagatggggtttcgccatgttgaccaggctggtctcaaaacgcctgacctcaggtgatccacccacctcggccccacaaagtgctaggattacaggtgtgagccaccatgcccggcccagaatactttttaaaagaagagcaggttagaggaaagaaaaaaattgatgctgaatgtggtgatgaaagcatgtttctaaaatgggaagcagatgcttaaagaggaaagactaatctgggattttgccccatttctctggtttttcactcctatatttaattctcacaatcgtgtcgtcacatagtgcaaaaaacaaaattcttgtaaagtccccagggagttttatggcttggggtgaaagttttagcctgagtattttcttcctcttaaaaaaggtggggaaatgaggacattgagggaattaacatataaatgtctgctatggggtttaaggaggaactgggcgtatttggaatgcttcttacactaacactgtctcattgtaaaatataaaaccccttactctaactacatttttattcctcctggtagtgtggtatccagggcaacatatcacttctgctatgtaattctaaggaattctcatttctaggagtacctgaggccaaacaaatacacaacgggaaggctggcagctgttatcatcactaggcaattttgctccatccattatttactacccttggaacccagggttttcccgcccatgcttttggaaggcaaaaatcagtctcctttgcatgaaaaagagccttagatttttaaacatgttagttaccagaatgctaaaatacccagttggattacccaaaattattttggaaatcctatcccataaatggaagtcctacaacaaacaccataaaacagattacacctaagagctgagaaattcaaaggaactgaagattctgagagataaactgttcaagtcttagcaatgatactgcacttctctttgacaggttctgggcttaagttagaggccctactggttccaaaccatattcccgctgactttgcaagtaaaataaatttgattctgaaataggaaacaaaaaaaggagaaataaccgaatagtagaagaaaaactgtttgtaggaagacgattccagatggaatgatgtggacattgagttacccatgtcaataaaatactataaaccaaacttaaaatttgtgaaaataaggaagttggtaccttttgttgttacagtgtataaaaacaatttcggaactgctgttgcaaaaagacatatatagttttgcttccttctggtgttaagctgtttatatttcagtttcagttttaacttctaagttgccttgtaattgggactgtgtttcagcatcacaaaaaccaaatatttattaatggatgcatctgtatcagcaattaaaaaataaacaagtaaaagtgaaaaaaaaaaaaaaaaaatt

SEQ ID NO: 4474 - DNA, 645 bp, Homo sapiens
aacctgtttaggattcttccaaatgttcttcctggggtctttgatatttgtttgttacatcctgctgaagttcgactgtgtttttattttttcatccaacctggggtctttgatatttgtttgttacatcctgctgaagttcgactgtgtttttattttttcatcccaacttccatttttcactttttacatggattactcaaatcccttggggctgtccatgtcatctcttaggatttcttaaaagacattttaaatgtatggttaggttttatatttttattttttaaaaaagaaatagtcagtgttttcctcctttcaaccgagactatttctggattgtgtgctcctcgtcagttgacttgttttgcacacttttctttacttcatgtccccatcaacaaccgtcctgctccccacctcccccaggaaataaggggcctgctcctctccctactgtgaccctggaggctcttaagatgatgatggttttttttattgggctgagttcacgaattaggggcaggagctggaagtcgccctaggaacaccagatttcctggttctgttcaagaagagcattccctgttcggaataaactatttcttggacataccttctcaaaaaaaaaaaaaaaaaaaagtt

SEQ ID NO: 4475 - DNA, 1882 bp, Homo sapiens
  SIMILAR (232)..(285): 441254mologous to Homo sapiens Human secreted protein, SEQ ID NO: 7253,accession number AAG03172,Smith-Waterman Score=41.
  misc_feature (1)...(1882): n = a,t,c or g
ttaagagacagtgtctcgctctgtcatcacctacgctgtcacgtgcagcctcaaactcctggacttgtgatctcccgcctcagcttacctagtagctgggaccacgaatgtccacagatgcactccacctacccggctaattattttttgtataattagctcggggtctttaccatcatgcccagggctggtctctaactcctgggaaacattcttattgcaaaggtagattctgctgtcatggttctgttatgaaatttaggccaggcgcagtggctcacgcccggctaaagggaatttttgtagtggtccccagtacagggccagcatttcctatttctgtaacatacagccctataatctttgcaaagctgaagtacacttgaaataggcaaacagaagacaccttttaaacaaataagacccccccaaaacccttcaaatatggtatatgtacacaaaatattcaaataattaaaaattcacaacccctatggaatgctaactagtagccacaggaaaaataaagcatggaaaatatcctcatatatccagtacctcttctatctcaagcatgtccagacaaaaattaaattacacactaagccataaaaattttaaaggcaaaaccatcccacccaaaaaaaaggaaaagtgcttattaatggccattcaagcagtgggggtgaagcgggctgacacaatgcacagtatgggaaataagtaaccttggctacagtttccaaggacacggggctcctggctgacaagaagagctgaggtgaagctgaatgcagcgttgagccattttaataaaccgtttataaagaaaagcagcgcaaccgtgtcccacactccttggatccctattggtggcatctaattaaacatttcaagtattcaagagatatgaaaggtagtgaatacttttcatagcaaaggctttttttctgttgacatctgctgaattttcctgtggcacctcccaaggagtgactaagcctaccatccttggtaaggaaaatggggattatactacaggaattttatctgaggcattctggaatttctcaggaatagaaaccagcccagctaccaagtgagctttttaaaatgttgatactgggccactgtgacatgacaggcatctatatagcatttcaaaaaaatgcttcagcaatacaaattcaaactgggaaactttttttttttttttttttaagagacagtgtctcgnctctgtcatcacctacgctgtcacgtgcagcctcaaactcctggtacttgtgatctcccgcctcagcttacctagtagctgggaccacgaatgtccacagatgcactccacctacccggctaattattttttgtataattagctggggtctttaccatcatgcccagggctggttctctaactcctgggaaacattcttattggcaaaggtagattctgctgtcatggttctgttatgaaatttaaggcacaggcgcagtggctcacgcctgtaatcccggtactttgggaggccgaggcggggcggatcgcatgaggtccggagttcaagcctgggccaacatgggagaaaccctgccttttaccaaaaattacaaaattagctggggcttgggttggtgcaagcttgttaattcccagttattcacgagggttgagggagggagantcgttttgaacccgggaggttctataatctttgcaaagctgaagtacacttgaaataggcaaacagaagacacctttaaacaaataagacccccccaaaacccttcaaatatgtatatgtacacaaaatattcaaataattaaaaattcacaacccctatggattgctaactagtagccacaggaaaaataaagcat

SEQ ID NO: 4476 - DNA, 372 bp, Homo sapiens
  SIMILAR (234)..(371): 581254mologous to Mus musculus putative,accession number AK002988,Smith-Waterman Score=126.
  misc_feature (1)...(372): n = a,t,c or g
annnnnnnnnnnnnnnnnnnnnnnnnnnnnnnnnnnnnnnnnnnnnnnnnnnnnnnnnnnnnnnnnnnnnnnnnnnnnnnnnnnnnnnnnnnnnatnnnnnnnnnnnntnnnnnnnnnnnggggggggcccccccnnnnnnnnnnnnnnnannnnnnnnnngatcagacaaagaaaagctaaattggtcgttttggctttcaacagacggggtttgaggaaacctgatttttttactatgctggggtgggtaaaattgttaaaaaaaaatacagtggcttttttattgaactggtcacaacatgcggaaaaaactacttaatgtgcgcgctggctgtcattgatccacgcgactctaacatcattagaagct

SEQ ID NO: 4477 - DNA, 523 bp, Homo sapiens
  SIMILAR (78)..(209): 811254mologous to Homo sapiens PRO2550,accession number AF130089,Smith-Waterman Score=169.
tgggttcaagcaattctcctgcctcagccaccccagtagctgggattacagatgtgcgccaccacacccaactaatttttgtatttttagtagagccagggtttcaccatgttggccaggctggtctggaactcccgacctcaggtgatctgcccgccctggcctcccaaagtgctgggataacaggtgtgagccaccacccctggcctatgagtgctttaaatagcaaaaatgtgagatgaaaaatggtagttctatcactgccaacagttaaaagataatgaaaccttacattaattcatattagggtaagtaccaagtttgcctctattatgtgtgcccaagtaagcagctctctgaaaaattatttaacaaatgtgctaagttaaaaacattctacttagcagattgagataacaaagtatttcctttagacttttctctcttagtgtgaagcatgatgatttagggtggggaatcgtaatgaggcataaatcctatgcagtttgtaaacaggactatg

SEQ ID NO: 4478 - DNA, 851 bp, Homo sapiens
  SIMILAR (138)..(296): 561254mologous to Homo sapiens Human secreted protein, SEQ ID NO: 7867,accession number AAG03786,Smith-Waterman Score=134.
tctcccgagacagggtcttgctctggcgcccaggctggagtacagtggcatgatcttggctcacttcagccttgacttgggctcaagtgatcctcctacctgagccttctgagtaactgggactacaggtgtgcactcctcgcctggctaattttttattttttgtacaggcaggatcttgccaccttgcccaggctggtcttgaactcctgagctcatgccatctgcctgccttagtctcccaaaatgctgggattacaggagtgagccaccatgcccgggctggcagttgcatggaagagaacacctctttatggcttaccctctagaatttctaatttatgtgttctgttgaaatttttgttttttttacctttattgaaacaacaaaaagtcagtattgaaacatatcttcctgttttctgttgtcaaatggatggataatgtgccatgatgttttatatatatcattcagaaaaaggtttatttttttaataacattctattaacattattttgcttgccgctggcatgcctggaggaatgtatttggctttggattacacaataagttttttgtaataaatttgacctcattaaaaacctttttttttttaaaaaaaaaaaaaaaagaaaatctcattagtgaacttatcttggcagctgagtacttaaattctttttaaaaagataccctttggattgatcacattgtttgacccagtatgtcttgtagacacgttagttataatcaccttgtatctctaaatatggtgtgatatgaaccagtccattcacattggaaaaactgatggttttaaataaactaattcactaatattaaaaaaaaa

SEQ ID NO: 4479 - DNA, 8862 bp, Homo sapiens
  SIMILAR (8052)..(8336): 631254mologous to Homo sapiens Human myelin oligodendrocyte glycoprotein gene,accession number AAZ29204,Smith-Waterman Score= 257.
aaagtgtatgttctggtatttttaattttcttactgggtccattttacttaaaaaaaaatataaaacatttttaatgtatcttagaaaaattagcaaaaaattgagaaagttgagcatattacattgtacaatgttttcatacgaatgttttaaaatcataaatatttggtttcccctcaacatagcacatcacaaaaatacatttcaaaaacttttttcatatataattcctgtaaatgatcatatccctacttattaaggaaaacacctgatgacaagcactcaaacactcttgaaattttctgtacagtaattacaaaagtaaaaccaagagttctgttggccctttaacaggtgaaaccattttaaatagtatcaaaatataattccaaatgggatatacttagttcatttctgtgctatctttgattcacaagtatctatcttagccaaagcactgtttaaaaggatattgcctcctagacatagtgccactgaaaaccaagatgtaaatcggtaacactatgcattaaacagaaagcttttgcacaaccacatatgtaaccgcttagtcgtatcaaggtccacatgtgaccagaaagcaggcagtccttaggtggatggccaggggccaggcagtgtgaggtctccaagaacccagggctagagcagctaagccccaggtcatgttatcagctacagctgtggaataagccaggtttaaagaaggacattctgcaaaagtgcaggacctatttcacaacttctagaagtagaaattcacatattccatcatgatcctccccaccatgcagagactatttgactcctaaggccacactgtttccatcccatagatttcacagaggtgattaggttctttgtagaatactttttcctcattctggaatgagggatactggagtcttctggtgtgatgtgcagtcaaaccacaggaaaggttccattccttacctaagtctcgtttgtctaatacacctgccagctactgaataaaatgataatactgataaatggctgggcagaaatccaacacccaaatcagctgtcaaatttcaaaggcacatgatacaaaaatattttagacaatacactttataaaggcaactataagaaaccgttaaagttacatttttattaaacagccaaaaatcttaagacaaatacctacagaccatttcttcattggcaaatattttccagtcataaaaggtgataatttatgggattatattccaataatttatgggattatattccagtttcctctcatgtaaataaatacatacactgaatctctaataccactctctctagatgtatacatctatttggaattgctttcttagtatgcactcagcaagcactagcataagaacacctgaggttctctgtcctcatttaatacctgtaagagaaaaggactttattctactgaattctgccctttttttgcaacaactgaattatccccatatttatttacaattttaagcttgattgctgtccacggagttactgttgcttctcaattataactagtgttagaaggcttgatttcataaatgttctttttaatccaaagatagatcatatatgaaaaccttcctcaatactcctttcaaatcagatgcatataaactatgatcccaatttccctgttagacgtatttctgttggatatttcctccgttgtcaccacagaggaagggaaaaagcagaaaagctgcccacctaacaaaggctaacataatggctaggctaatatattgacatgctatcatctttatgatgttttgaatctaactagcagacatacagtcaacttcctgttgaccatgtgcatctaatctgctttcttaattatacaaataatttttatttcaaattagcttctttctactactcagtataatcctctcacagcctggcatatacttggtagcacatcattcactagagagagtacgagagaaaattaggttgacaatatggggcaaaggggtagtctcctttaaggtgaggggaaaggagatgggaatgaaacatgccaagtgtatgatggttagggaaagaaatatcttagtagaagctagaaaacctctactaacaggatcacattccaaaagggcaaccaggaaatggcaatgactccatgacttctctgtcagagcaccaatggtcaaaggcattccatgtcaagtgtcaggaaatggaaagcgaaccggccaatctagtttaacagcacatactcggaaaaggaaacacgctgccaaaggaaagagctgacatccagtccacagaggttctgagtacccagtggcagtgagcccctccaaactctgcagagctgactgtgctgtctgcaccctgcctcatttggggaagaatctgagagagctaaaagacaaatttcagaaggtgatgttttcaaagaaagagtaaacaaacagcttgacaatgttgactttttttttcttttcaggtaacccttgtttgcaggaagataaataagaaggcttccttaggatactgacccacttagagaggcacagaaggaagaagagttaaaagcagcaaagccgggtttttttgttttgttttgttttgttttgttttgagatggagtctcactctgttggcccaagctggagtacaacggcatgatctcagctcgctgcaacctccgcctcccacgttcaagtgattctcctgcctcagcctcccaagtagctgggattacaggcgcccgccaccacgctcaggctaattttttttgtatttttagtagagacagggtttcaccaggttggccaggctggtcttgaactcctgacctcaggtgatccacccgcctcggcctcccaaagtgctgggattacaggcgtgagccaccatgcccagccccagcttgatcttgaacctcctgtgtgtgggcagagagacatggccctgctactgcttgaacggcttccggagacagtgacttgtttcctttttccctctgaactatgccgtagggccaggtgagctgctgtgaaggactcattcttggtagccggcagttactggcaacttgtgagcttggtgggctcctactaacgcacctgggacaccaggctgctgggctcccctctaggcagcctcccctccaggcagcctcaccagcagctcccctgagccatggagaccccagaggtccccgtgggctcgctaatcgactttgggcctgaggcacccacctcttctcccctggaggcaccaccccctgtgctgcaggacggcgatggctccctgggggacggtgcatcagagagtgagaccactgagtctgcggacagtgagaatgacatgggcgagtcgccctcgcacccgtcctgggaccaagaccgccgttcctcctccaacgagtccttctcctccaaccagagcaccgagtctacccaggatgaagagaccctggcactcagggacttcatgcgtggctacgtggagaagatcttctctggaggggaggacttggatcaggaggagaaagccaagtttggagagtactgcagcagtgaaaatggaaaaggccgggagtggtttgctcgatacgtgagtgcccagcgctgcaactccaagtgtgtctcagaggcaaccttctaccgcctggtgcagtcttttgcagtggtgctgttcgagtgtcatcagatggatgactttgggcctgccaagaacctcatgaccatgtgcttcacctactaccacatcggaaaaccacagctgctgcccccggagtcccgggagaagcccgcgggcagcatcgactcctacctgaaatccgcaaacagctggctggccgaaaagaaggacatcgccgagcggctgctgaagaacacctcggccaggactgagaatgtcaagggcttcttcggggggctggagaccaagctgaaggggcccctggccaggaggaacgaggaagacgagaacaaaccccaggagaagcggcccagggctgtgaccgcgtacagccccgaggacgaaaagaagggggagaagatctacctgtacacgcacctgaagcaacagcccatctggcacactctgaggttctggaatgcagccttttttgacgctgtccattgtgagaggacaaagcgatctcccactaccagaggggatgctggagaggaggaggagaagagggagaagtggtgccacatgacccaggaggagcgcgacgacagcctccggttcaacgagaacatcaccttcgggcagctgggcacattcacgcacaacatgctggcctttggactgaacaagaagctgtgcaatgacttcctgaagaagcaggctgtgattggcaacctggatgaagagcaatacaagctgcttagtgaccacattgagcaaatggccactgagtaggccccagaggtcgcactccgcaggaggactgaggccatgtgccattctcccgggcccagcgcccggccgtcaccccacccgatgacctgcatgaagccagcagcacccagagccactcctgctgccctagaactagcggttagaagaatccgctgttcctccctcatctcctctgcctgtgtctgcgacccccatccatgtgccaaagtgtcccttgggtcacacagctaaagccgaggtgaccagttgtaccccgagtgccaggcttgtgagatgagaccaagagggaggaggggaaggactccatgggccatcgtgggccaagggctggcgagggtgggggtgggcaagggatgcaggcaggacagccatgaggtggggctgcagccggcacacccagtggtggagggccggcgctgccactcacggtgggtggccgtgggccaccttccctgcaatgggtgcacacgcggctcccatccagccctctcagcgtggggctgtggctggtcctcactattccccagtctcccgctgtggggcaggaacaggaagtgacgggaaccttgaggaggaaacgcctgtgttagggagagagtgggtgcggtgtagaggatgctcttggccggctggagcaagacctggctcccaccagagggacgtgtgtgtgcctgcagacggcccgggagctgtgtgtctccgccagagtcacagcagtgccgaggtgtccgcggcagaccacacagaccgtctgaaatgcgcccgcctggcggacagctcccttctgaagcagagaagcctccatggtcacgaagcagcgttgtgctgtgtgtccctcgcaagaagcacaggaaagagaagtttctttagtagccactagacaaccaccctttctgaaagcaaacagtgctgctctttattccagacaaggcaggaaagtctgagttgggagtgacagtggctggagagaagcagatctgtgcaacgtgcagggcaagccagtggcgtggcctctgcctctaagcgctgagcattgggccccttccccaccagacctttgtagctcctccagcctctgcagagactcccttcacctcgcacttactgcctgggaaccacggcccttctcttctgtgggtctgcaccaggtactccaggccagcccatgggcccggggcctgaccccaacacctgcatgctgggtccagagccttctgtttcaccgtgcgtggacactgctaggccgcctggggtcccctgcctcctgcctgtcgctgccgtggtccctgactgcgaaataggcccgcggggctctccctcctcctgccatcctcccctcccgcccttcctggctacctcctctgacatgcggtcagataagtcccgtcttgtttgtgagtaccacagaaacgcctgagagtcacttacccggccactgcttggaaggtttccctccggggaatgcctccctggaatgttccagagacggaacattctctagagacaacagtctgtgctgcagattggttggatcacagaatgtgtgtctggggcattatctgaaacgtggtgtcatctgatgcatttggaccatatgctgccagactgcagaacgggggagccggggctcagggcccctgactgcatggtgcatgagtgatctcagcctagcgatgccgctggccagaccgtgaccatgctgccagtgtgctcgccatgagctgggtcagggctggggagttgtgcaggctggggtgacccttcccccatcattgggccccaacgggcatgtctccaccgaatccatttagagaaatgtcagagcgaggggtgtgtggacacccctcgctctgatgccaactgcagataatacacacctcctgcagcgtccagccacggctccagggcactgctctcctccttgcaccggtgaaactcaggccacactcaagggctgactgtccaggcgctcccttcagccgcctcgtcgtcagcgttcttagtcatgcattattcgtgttagctgaaatgcattcagactttgttctgcggtgcccacaggacttacccctgtatgtacaggatttttgtatgaaagttttgtttgattctgagactctcttgggaacgctggagagcttgtgcacagcctctggaaggaaaggcagcgctgacttcgttgggcttttttccaagcactttaacttcagaaatggtcttgacacttttttctccacatagactcttgaaatagccatttcaggggaggaaagggttggggttttctttgtttgtttgtttgtttccccctttactacctgttcttgtagatctagctcctcagagttggaggaaggctgacagagaaggtctcctctgtgctccatccacacaggatgccggagagacagccccttgtgctgtgagcagagcaggcagtggctctggaggctgcctgtggtctccttccagctgtggctgacagtggctctggccagggttgcttggagaaggctcagtgtgcctgggacagggcttaccacctgccaccaaggtttcctctcttcccccaggacctgggcagagcaggcatgagctgggctgtggtgcagagcaagcagacccagccacactgctcaaaggtccctgcgtggggaggtgtcacaccaggggcacacccagggccacctgggtgtaggagagctctggtggcccctccgtaaactcaggaagtgtcaggtgatttcctagggagaggttcccagtcccagcaggcagaatgcccaaaaccaggagcacgaaggcctgtcatccatggggccattgcaggcaccctgccgcccgaccttgagggctgtgccaatcctagtgaaccaaaatgcaaacaactcacacaagtgaaaagctccctgctttgaaaacaggacatgttgacaggcagcatggtatgtttttagcctttgttacagttttagcaacattgatgtctaagaggggccgtggtaatagattgcatctgccctgtgcatgcgcatgtttaaccacaggccagagaactcaattctgatgtcgtaagttctctgtaagtgaaatggggtagactgtatgattttcctattgccaaaagaaagaaagggggccaaacagctctgaaatttccaaaaaatggctagagggagagtccagtttctgagctctgtacccaaattaaaatcctgatgttcaggttaatccaagcaacacgcattgggtttaaaaccagcaccgaggcccagtgggggaatcacagacatcaccaagtctcgtcttctttccttcctgtgagttgaaaccaaacaggcctctcgctcactcctcccagcccagtaatgctgaggagttcagttgtgaggaaagaaggctggagctgtgagattcgcttttccctaggctgttccgcgtgggttaccttatcaccctggagcacttggtattccagacccctgacatgaggaatgcaggttcacactgtaaagagtttgtgaaaggtttcagtctaactggggttccttagctggaagccagggctggaagctacaggcctgaccttcctgggtcccactatctgttggcattttttttttttttttttagacggagttttgctcttgttgcccaggctggagtgcagtgacacaatctctactcactgcaacctccacctcccgggttcaagcaattctcctgccgcagcctacctaattagctgggattacaagcacatgccactgcacttggctaattttttgtatttttagtagagacagggtttcaccatgttggccaggctggtctcgaactcctgacctcaggtgatcccccccacctcagcctcccaattacaggcgtgagccacggcccggccagaaacatgtattttagtatagtcaattctataatagtgaaaaggaataaatagtatcattaaaaaatcaaataactaattggaaaattgtctgagaatcgttgctgtgaaaccacttcgatctttgctttagagactcccgctgtcaccatggcactgaacggacagttctgtaagctccattgtaatttaaggcattagaattctcatttcagaactgaatacaggatctggcataataatgcttcagaatgttcatttatttccaaggatttaaaaaattttccataatatgagattctgtataaaagtgtgctgggtgatatggagcgtagtacaatggaaaaaactataggctttgaaatggagggatctggatcgaaatcttgattatggatcctctggcaagtgatttcctttccggtcattagttccccaatcagtaaaacaccttacacaggttgtgtccacaaaggaaagaattttatttattttattcatatatgtatacacccac

SEQ ID NO: 4480 - DNA, 436 bp, Homo sapiens
  SIMILAR (38)..(310): 711254mologous to Homo sapiens Human myelin oligodendrocyte glycoprotein gene,accession number AAZ29204,Smith-Waterman Score= 353.
tttttttgagatggaatcttgctctgctgcccaggctggagtgcagtggcacaatcccagctcactgcaacctccgcttcctgggttcaagcaattctcctgcctcagtctcccgagtagctgggattacaggcgcgcgccaccacacccggctaatttttgaatttttagtagatgcacggttttaccacgttggccaggctggcctcgaactcctgacctcaagtgatctgcttgcctcagcctcttaaagtgctgggattacaggcatgagccaccacggctggccctaggcaacattctaaccaccctgcaaggatgttatctttcccctcccaaattcccatgccttttgcattttgctgatagctactatgttctctttgacatatatttattggcatacctggtttacatactcctttctgacagaaat

SEQ ID NO: 4481 - DNA, 414 bp, Homo sapiens
  misc_feature (1)...(414): n = a,t,c or g
ntcataactaccaccaagtcctgtttattataccccggaaatatccctgtgctctctgttctatatctccctctgcttttagagcagtgttttcaaatttggctgcatattcttatgtccacgttgcacccaacaattaaatcagaatcactgagggtggtgctcaggcatcagtagtttttaaaactccccaagtgtgctgggcacggtggcacacacctgtagtcctagcactttgagaagcagaggtggttggatcacttgagtccaggagttcaagaccagccagagtaacagaaaccaaagaggctgtaacttagtttggtctctcaaactaacgtcaattcttctgacatttgagctggattctataagacaagaagaaggcaaactagttaggaggtggggaagacg

SEQ ID NO: 4482 - DNA, 416 bp, Homo sapiens
  SIMILAR (109)..(153): 661254mologous to Homo sapiens Human secreted protein, SEQ ID NO: 6065,accession number AAG01984,Smith-Waterman Score=46.
cggacgcgtgggcaacaacaaaaaatttggaggcaggatctcgctctgtcgccaggctggagtgcagtgacacaattacagctcattgtaaccttgaactcctgggctgaacgattttctcagctcgacctcccaagtagctaggactacagatgcacatgcctggccaattttttaactttttgtaaagacgagtgtcttgcaatgttgcttcggctggtcttgaactcctggcctcaggggatacccctgcctcagcttctcaaagtattggaattacaggtgtgagccattgagcccagccagaatttgcttctttagagtcctgccttcagctctctacttagaaatatttgtctttgccatctctgtatatctgaaatcctaatgagtaaatgtgattccctccataaagc

SEQ ID NO: 4483 - DNA, 1064 bp, Homo sapiens
  SIMILAR (815)..(1027): 471254mologous to Homo sapiens Human secreted protein, SEQ ID NO: 7253,accession number AAG03172,Smith-Waterman Score=138.
gaacatgtaaaaagggaaaataatcaatggtagctttttaataggaacaagagactgactttaccttatatatgactgcaatacagcaaggagttctgcaacaggaaattccagaactatgtcacacatgctaagcaaatgaataaattatattaagtaactaatcaggccaggcaagtaatgtccaaagaatgtcacagctataaatgagagaataatgagcagaatataagaatatagggtgaatgaatgaattacaaaaaccagctgttattttaaaatagtctaatgtgtatatacaacaaatagaatatatatgaaaattaaaaaaacaaggcaagaagttttttttaaaattttggtccatctagtcttacattgtaagaatgtagtaccttgtgaaaaataacgatccatcagtaaaaatttaaaaaacgattcactgtgaactagagatttagaattcaaactgtccaagatgaaaatgtcatctcaagatccacttatgagtaattgttaaagtttttggaattttcatgctaggaggtgaaatctgttgcaaagctgaatttataaggttaggggggactgtccattaagaatacttcttctttacacagagactaatggcttctttgatggtccaaagcataggcacctgaattctgaaacattatccatcacaaatctccagcattcttcagaggaaacacacaaggcaactttcagcttctttgattacaaatgccaaagttttttttcaggctagtagatttaatgtttcatcccacattttagccctgctacaagaaaatatcttttatttcaatacaaaaccagtgatttgcaagcctggctggtaatcagaatcaccttttaaaaattataaattgccagccaggtgcggtggctcacgcctgtaatcccagcactttgggaggctgaggcaggcagatcacgaggtcaggggatcaagaccatcctggctaacacggttaaaccccgtctctactaagacatacaaaaaaattagctgggcgtggtggcaggaacctggtagtccc

SEQ ID NO: 4484 - DNA, 388 bp, Homo sapiens
  misc_feature (1)...(388): n = a,t,c or g
aagaagatgtgaatagatggagagacataccaagtccatggattggaagagtaagaatagtaagaatgtcagttctttcccaacccaattaataatacatatattaatacagaattcctcatattgatatagtattaatacaggaatactagtattcctatcaaaatttcaggaaggttttttgtactattaagggaaaatgaaaattgaagctgaggtttggatatacccctaggccaactgcctgtagccatgtaactgaaacttaagctttcctccctcagtgtgatagctttacaaagaaagcttatgcagctccacatgcacagtagggaacaatattcttcctcattcatgctttataaactgtgttgtaactgctgtgaan

SEQ ID NO: 4485 - DNA, 449 bp, Homo sapiens
  SIMILAR (211)..(282): 661254mologous to Homo sapiens PRO0657,accession number AF090942,Smith-Waterman Score=70.
gcatatgacgaaacaactggacaactatggcctgaaagttattggggattccttggtcagaggatggggtttaaggaatatggaagatatccctgggtccttctgagaattctccttggaagccaaaatggggggttaatgggggtttagggcagtttaaggaacaattggatagcctgggctctttaaataagtatttttcgagcaaccttaatgaatggagtggtaggtagaatagaaagctatggcgaaatcccatctctactaaaaatacaaaaattaggtgtggtggcgcacacctgtaatcccagttactcaggaggctgaggcatgagaatcacttgaacccgggaggtagaggttgcaggttgcaggttgcagtgagccaagatttcatcactgcactccagcctgggcaacacaggaagaatctgtcttaaaaaaaaaaa

SEQ ID NO: 4486 - DNA, 1945 bp, Homo sapiens
  SIMILAR (418)..(978): 981254mologous to Homo sapiens MJ0495-like protein SelB,accession number AF268872,Smith-Waterman Score=986.
tttcgtgtagcctcagaaagtgcatggtaaagggaaaccagatcatgctgggcacactaccatgcagaatcctcaaaacaccagaaagctaagttgaaagacagtcgaaaagccagaaggagtatcgagctcatcgggcctgggagcagtcagaaggggggggacatttgttctctcatccacttgagcagcaaactgggcatattgtgctactcaaaaacagggaacatgggaggttgggagggagggatgcagctgagagttagctctgaaaactccatgggcaagtccagcagggagagggctgctgctgaccttccccagggtagctgctggcatgagcttccaggaaggctcataaacacaaggatctcgctcaagccccggcacgtctggaatctcagctcggtgctttgccaggtggtgaagaaggtgaagtccatgcagatgttccacatgcccatcacttcagccatgcaaggagaccggctgggcatctgcgtcacccagtttgaccctaagctgctggagcgcgggttggtgtgtgcccccgagtccctgcacactgtccatgcggccctcatctctgtggaaaagataccgtatttccgggggcccctgcaaaccaaggccaagttccacattacagtgggccatgaaacagtcatgggccggttgatgttcttcagtcctgctccagataactttgaccaggagcctatactggactctttcaacttctctcaagaataccttttccaggagcagtacctgtccaaggatttgacaccagcagtgacagacaatgatgaggccgacaagaaggccggccaggccacagagggccattgtcctcggcagcagtgggccctggtggagtttgagaagcccgtcacctgccctcggctgtgcctggtgattggctccaggctagatgcggacattcacaccaacacgtgccggctagcctttcatgggcaatcctgctccacgggctagaggacaggaactacgccgacagcttcctgcccaggctgaaggtgtacaagctgaagcacaagcatggccttgtggagcgggcgatggatgactacagtgtgatcggccgctccctgttcaaaaaggaaaccaacatccagctcttcgtggggctcaaggtgcacttgtccactggggaactgggcatcatcgacagtgccttcggccagagcggcaagttcaagatccacatcccaggtggcctcagccccgagtccaaaaaagatcctgacaccccgccctcaaaaacgggcccgggctggccggtgggaggccaaccaggcaggaggagatccccgagcggagcgaacccccacaagatggggtggctaacccgacctttcaagcgttatgtcttcgacacccacaagcgcatggttcagtctccctgagtgtccggtgacctcccccagggcctccttgcccagcccagtccaggctgcttgtgccaaatcccaaacagccacgcctcaagctttcccagtctcttcctgcagtcctggagcagcaacccccacccccaagttgggtgctgaatcccttgggaggaactgaagggggatgggttgctggggccaggagggtctctcctccagcccctgcacactcccacccaggacagcccccagcccaactaggaaagggccatgggcagagggctggtagccagtatcttccactgccccatctgttggccacctgcaggccagtctcaacccttcccccaggtgggcaggcacttgatggctacaaataaatgtccccgtggccccagcccactctactggtgtctctctctctgtgacttcactaggtccgccgccctccccagctgtgttccaaggggaatctcagaaatcccaagagttccttgccaggtcgggggcccgggaagggacccacactc

SEQ ID NO: 4487 - DNA, 1192 bp, Homo sapiens
  SIMILAR (1079)..(1183): 741254mologous to Homo sapiens Human secreted protein, SEQ ID NO: 7871,accession number AAG03790,Smith-Waterman Score=138.
ggtcaccaaggcttctggacggaaacgggtaatgagttacacatcttacaaatacacgttagcatgtgttgtctcaacagtccaagggtttttattattggactacaggtctaatcttctaaagggaattccccaccattaaagagcatctcaagttagatcaccaagagatcacaagctaaaaccagaagtttttttgtcattgtgggggtggaacagttactaattgcctatatttttaaagggaaacatttttttcactgggctgctccgttgaaaaaaatacaagcttaaacttgcccaaagtcacagtggtcaaactggaaattgcaccaaaacttggcatactggttctgaaatccatagttttagcccttatgtatactggttaatttggaaggaagaaatatatacgttctgaagtgaagagtgagtgaaaggaagaattcagtgaatacattgataccttgatattatctgcattgtggctacatgttacttttcttcacaagagtgatataagtgaaataaagaatgattggactgggagaaaaatggctcagaaaactttgcaaaagtacgactgtatgtaaagataagtattcaacattaaatgggaaggaggagatgcaagcagtttaatatatagaattttataattttaggcctgcaagggaccttataaaacatgagcaatggaacacttttttccaaactaaatttccgtgcagtggaacttggcccgactctgtccttcctctattctaagcaccctactctagcccggctgctctgagttcagtttgttacaaatatggacacgaaagtaccacaggctttgcacagcttaattgaagtttccccttcacaccatggtaaaaaaacatactgggatggaagggcttgtgtctagaacaagaacaagaaataaactcttggtcacttactaatatttcaaaatcacaaagcagaattttgcttggatgtttagtaaatcatccttggaaatttaactgcttgcagcttctacacttcttcattaaatgctgtctggctaataaaaagtgccatgttgcagctttattttattttcattttttggagatagaccctcgctgtgtcacccaggctggagtgcagtggtacaatctctgctcactgcaacctccacctcctgggctcaggctgaggc

SEQ ID NO: 4488 - DNA, 1021 bp, Homo sapiens
  SIMILAR (36)..(320): 441254mologous to Homo sapiens PRO1722,accession number AF119851,Smith-Waterman Score=149.
ttttttttttggtaggggacagagtctcaactattaccccagtgcagtggtgcaatcacagctcactgtagcctctaactcccaggctcaagtgaacctcccacttcagcttcctgagttcctgagaccataggcacataccccatgcctggctattttttttttttaatttattttttgtagagacagggtcccactatgttgctcaggctggttttgaacccctgggttcaaatgatcctcctgcctcagcctcccaaattactggggattacaggcatgaggcatcacagccggccagagctgctgcctttgacagtccctatgagctgggaaagtcaggatggggagacagaagacttctgtgctatggagacttggaaagtgaacataacatgtttggctcagactccccgcctataaaatggaactaaaacactcttgttttaggttaagaaactagaacagatctttgacatctctaatgagccctagattattcctggtgtcagggagattaggaaacaccttcatataccgtactctattcttgccaaaaacctcaatgaatgcttaaagtaagatctattcatgaaactgacttcacattacttcctaaataaaagaaggctattcccacattgcccccagcacttgtgtttgaacaccctggtgacttaggaacacagccttacctaaagcagcgtccttagcagtgcaggtctaataaggtggaactgaaatctgactttgacctatgagtctcagacatctttaaacatctttaaacattaactaagggcttactcttctgagtgcccatctgaaggtacctgaacgtgtcgggtttcccactagaccatgatctccttggaagcagggacagtaacttccccctcttagcatttgcagagcctagcacagcattaggcctggagtgagagtttcctaaacacttgtctgacaaagaaattaataaaacactctaacattccctgtgatacttcgcctgtgccgaaat

SEQ ID NO: 4489 - DNA, 1880 bp, Homo sapiens
  SIMILAR (1276)..(1494): 491254mologous to Homo sapiens Human secreted protein sequence encoded by gene 112 SEQ ID NO:282,accession number AAB56188,Smith-Waterman Score=150.
  misc_feature (1)...(1880): n = a,t,c or g
ctagkgagagttgarggatgcagtagatwcatgcataaaatttgtaagggtttataatattattcccaaatacactttatcttgaagcaaggcacattacaatttggacattattggaggagaactagttttttttttttttttttttttttttttttttgagtgtcactgatgctttatttacgatgcgtcaccatctcttttacaaactagattacggttttaagtggaatacacaaggcaatatctacaaacacccaaggaaagttaaagtactgccatctgctatttcatttggaaaggggaagattccccaaatcaaactggttttgatcccttaagaaaggctggcagagttaattcatgggcaacatatgggttaggacaaaatcctcagtaaggaatgcccatatgataggtgttcgcatttgaaaggaaggatggagggtgcttcaaaatcaaaagtctcaactgcttgactctcagggtgtttaaatatgggccacacacccatatttagttcctagattaatatgggattatgagccaagggaattgaaacagataacgatagtttttacagatactgtatacagatttttttttcccattcatgcaaactttttttcttaaaaaaagttaaacatgtggaagcccaaaatgcacaatacatttttttaaatatttaactaatttttctggtcctccttcacatttgtttacatttcccatgtacataatgtgcctgggacaagtatacaagagaagactggattgccaggcaatgagataattttagagaaataagtgacccagacacatagttccttaaaagcagccgcacacgtatttctggagtgtggcaaagaggcctcatgacccaatcattcatcaaagagraaatacaaacagatacaaactaaacaagaggaaaatattccattcatttaaactgcataaaatgttacccacttaagatttagataaaatatactcttttatttgggcatccggcttcaagacctcatttgacaggcatgattccatcagaacttcacttcctctagtagtactctgcctccccaggtctctgagagaggctagctttttcgtacctctttactggtgattgcatttctaccaaaaaaaaatttttttttttaacattatgcctaatcatacaatgttcacccaaatacagcaagaaaaataaaaccagagttcagagctgttagggtttcctttttgctttcagagaggatgagtaacatttttttttttttttttgacacggagtttcactcttgttacccaggctggagtgcactggccatgatcatcgactcactgcgatcctcgccttcctgggttcgaacagattctccctgcctcagcctcccagagtagctgggattcaccagcatgcgccacccatgccaggctaatttttgtatttttagtagagacggggtttctccatgttggtcaggctggataacatttttatttcccctcgcaagtccttggcaccaacatggaggacttctttttgactggcttaattcttcatggccttttccaagaagattcaaatgctccttattctttaaagtggggttcactaaggtagagggcaaagtctgttccccaccatctttaaaactgcgtaacaagtttgggaagccaccctgaaaatcacaccctgaggcggggcaatactttgtcctngaagtagtaagccatggtgatcctctcctcagggtggggaagcaacacacacaatgctaaaaattaacaccaaaaacaaacacaaagtccgccttgtactacacatgtgtgactgatcctcccattaacaggagtgacaagcttctgaattt

SEQ ID NO: 4490 - DNA, 1186 bp, Homo sapiens
  SIMILAR (1)..(105): 941254mologous to Homo sapiens bA465L10.2 (novel C2H2 type zinc finger protein similar to chicken FZF-1),accession number AL162458,Smith-Waterman Score=167.
  misc_feature (1)...(1186): n = a,t,c or g
cggacagtgaccaatcaggaggaagccgcctacatccaagagatcaccacggcagatggccagaccgtacagcacctggtgacctccgacaaccaggtgagctactagctactgttaatcccctcagctgtgacctcctaccctcccaaagacctaccttggggaggaatgatactttccaaaccacccctcctggggtccatgcttgccaacaactgcattgttgctggtggctgttcctagtcttccactctgccttcttagctaagctcctggcgagtggggcctcagcacctgcctcgccatgcccgccccccccaccaacaggtgcagtatatcatctcccaggatggtgtccagcacctgctcccccaggaatatgttgtgggtccctgaaggccatcacatccagggacagaagggcagaatcacacacatccagtatgaacagggagccccgttccttcaggagtcccagatccagtatgtgcctgtgtccccaggccagcagcttgtcacacaggctcaacttgaggctgcagcacactcagctgtcacagcagtggctgatgctgccatggcccaagccccagggcctgtttggttacaagacgaagacaagtgcccgaaacacaattcaaacaagctgcagcaccccagggcatcgaagtacgacgtcatcacccctggccgatgacttgaaccccgagggcccaacacaagatcatggatttgcgggccagctctccctgggggtagggggccacccaggactcacctccctcttcatttaggatctcccagatactggatagccagcatcctctcattcccagggagccagacctgtgctgttggggttaggggtcagccatgggccccagccaggacatgctgggtgccccagcctgcaggcaggctttgggagagaaatttatttttgtttgggtggacccactggccttgccagtctcaataaaggggaccggagtccagtcaaaataaaaaaaatnnnnnnnnnnngggggggggcccttttaaaaaaaccaattttaataaaccgggcttggaaaggaaaaatttttttaaaggggccccaaaaataaaatcaagggccggggttttaaaaacggcggaaagggaaaaaaaccctggggttaccaaaaaaaaatcgcctttggaaaaa

SEQ ID NO: 4491 - DNA, 405 bp, Homo sapiens
  SIMILAR (1)..(198): 901254mologous to Homo sapiens similar to Homo sapiens transcription factor IIIC63 mRNA with GenBank Accession Number AF,accession number AY007123,Smith-Waterman Score=301.
tacgcccccagtgacttgccggtcaaagcagagcgcagcacctacaactacagcctccccatcaccgtcaagaagacatccagccagcttgtcaccatgcatgacctgaagcagggcctgggcccgtcggggacgagtggtgctcggaaaccagcttccagcaagtacaagctcaaggtcagccttcagacactgagggtgagaactcgggtgcaaagccccagggctgtgtgtgttggggacatctggcgaagaggtggtgacaagtctcagggaagtctggcaccagcagctgcatgtggttgtccttctcgagccctttgggagcctgggcccccactgagccacgtgaccactccgggaatgatcggaattgggcacacacaggaggacagagccagagca

SEQ ID NO: 4492 - DNA, 458 bp, Homo sapiens
  SIMILAR (317)..(457): 1001254mologous to Homo sapiens transcription factor IIIC63,accession number AF133124,Smith-Waterman Score=235.
tttcgtgtttgtgtcttattatcctccgggtccctcgctgtttagtaggagagactggtgcttgccccgcccggtggactaactcgcttaattttaaataaaaagtcgaggacacggcggtcgttttcccgaagacatgggccctcccatgggccatttgctccctggaggccctcgcgtcttgctgagcccggggagttaggatgacgcgagcggtgagggagcccggaacgattccttcgcggaacgattgaggcgaggcctttgggagtactttgtgggacggaccctggcgggccctgccagacgcacagggatggcggcggaggcggccgatttggggctgggggccgccgtccccgtggagctgaggcgggagcgacgcatggtgtgcgtggagtacccgggagtggtgcgtgatgtggctaaaatgctgccgactctgggcggcgaggaag

SEQ ID NO: 4493 - DNA, 1725 bp, Homo sapiens
  SIMILAR (29)..(790): 521254mologous to Homo sapiens similar to Homo sapiens transcription factor IIIC63 mRNA with GenBank Accession Number AF,accession number AY007123,Smith-Waterman Score=537.
cttaattttaaataaaaagtcgaggacacggcgttcgtttttccgaagacatgggccctcccatgggccatttgctccctggaggccctcgcgtcttgctgagcccggggagttaggatgacgcgagcgggaaggctacaacaatccccccatctcaggtgagaatctgattggcctgagcagagcccggcgcccccacaatgccatctttgtcaactttgaggatgaggaggtgcccaagcagccactggaggctgcagcccaagacgtggaggagagtctgcacctaacccccgtggaccggaaggtggaggaggagctgaggaaggcaagtcctgcgctgcgcctggccccgctgtttgacatccgtcccatctggtcccgaaatgctgtcaagggccaacataacggtccaccccaacaggttcaaggcctggcttcctttcatagcctattacatgattaacaggcccctggcgcagcctatggattcgatttgggtatgaccccccgaaaaaacccagatgccaaagatttattcaagtcctcgatttcccgaatccgttgtggaatgaaacaaggttacggccccaagtgacttgccggtcaaagcaaagcgcagcacctacaacttacagcctccccatcacggtcaagaaaacatcacagccagcttgtcaccatgcatgaccttgaagcatggccttggccccgtcggggacggagtggtgctcggaaaccagcttccagcaagtacaagctcaaggtcagccttcagacactgagggactctgtctacaatcttccgggaaggggccttgccaccctattcggcagatgttctaccagttatgcgacttgaatgtgggaagagttgcagaagatcatttcaccgcaatgacgggggcagaggatttccttgcacaggaacggggatggggtgggtgccttccccaaggaccaggcgacgagtttcaggggacaccatgtcccccatgattcgggaagacaatcggctccaagaggcctgctctcttttccagctcagccaaggctgatggcggaaaagagcagctgacgtacgagtctggggaagacgaggaggatgaggtggaggaggaagaggaggaggaggacttcaagccatccgacggcagtgaaaacgaaatggggaaccaaaatttctgacttacgtgtgacggggcccaaggctgggcctccctgacccggccagactggtgtctggcctaatgagggagccggggctccccattgccacccacagtgcccggaatggcccctaggaggccctctgaggagagctagagtcccagcaaagggtgcagctgaccctagcactggctgtgacatgctgcttggtgctgcctctggtcctgaggggttagggacatcccataagggtataccctggctctgccacccatgaaccagcccagcatccagccagtgagtgggcacccaatgcctctcaggatgagaccagtaaatgccggaggtggagctgggcagctgtggagccccaggccacaggccagtctcgcttggctctcatgactgtggtggtggagatagtgtggggagcctcgcccatggtctcacgtggcaagaagtgccttttagctctggatcccaaccgtttggcacagctttggccacagccaggcccctctggaattgtccttattaaaccagtttcccgagaaa

SEQ ID NO: 4494 - DNA, 425 bp, Homo sapiens
  misc_feature (1)...(425): n = a,t,c or g
ggaagggctccatgcgcagctgctccactgcccgaaggtagaagatcaggtcagtaattcaagttctgggaaccaacgataaagacagaggaatatgagcacaatcaaagcaccgcannnnnnnnnnnnnnnnnnnnnnnnnnnnnnnnnnnnnnnnnnnnnnnnnnnnnnnnnnnnnnnnnnnnnnnnnnnnnnnnttttaagcagtttaagaattattctttttcagaatatctacctctactgggataagatcacgtttctttactgtgagcacacagtaggtgctcaataaatgcttgttgcaagaatgaatgannnnnnnnnnnnnnnnnnnnnnnnnnnnnnnnnnnnnnnnnnnnnnnnnnnnnnnnnnnnnnnnnnnnnnnnnnnnnnnnnnnnnnnnnnnnnnnnnnnnnnnnnnn

SEQ ID NO: 4495 - DNA, 391 bp, Homo sapiens
  misc_feature (1)...(391): n = a,t,c or g
ncgnnnnnnnnnnnnnnnnnnnnnnnnnnnnnnnnnnnnnnnnnnnnnnnnnnnnnnnnnnnnnnnnnnnnnnnnnnnnnnnnnnnnnnnnnnnnnnnnnnnnnnnnnnnnnnnnnnnnnnnnnnnnnnnnnnnnnnnnnnnnnnnnnnnnnnnnnnnnnnnnttttaagcagtttaagaattattctttttcagaatatctacctctactgggataagatcacgtttctttactgtgagcacacagtaggtgctcaataaatgcttgttgcaagaatgaatgannnnnnnnnnnnnnnnnnnnnnnnnnnnnnnnnnnnnnnnnnnnnnnnnnnnnnnnnnnnnnnnnnnnnnnnnnnnnnnnnnnnnnnnnnnnnnnnnnnnnnnnnnn

SEQ ID NO: 4496 - DNA, 133 bp, Homo sapiens
  misc_feature (1)...(133): n = a,t,c or g
ttcaaagtttttaaggttcanaaatttattggtattttaagccagtggtccncaacctttctggtaccagggaccggttncacggaagacaatttttcacggactcgnggtagcgggatgggggtgggggatg

SEQ ID NO: 4497 - DNA, 1438 bp, Homo sapiens
  SIMILAR (537)..(4): 1001254mologous to Homo sapiens hexokinase IR,accession number AF016365,Smith-Waterman Score=887.
ttagctgcttgcctctgtgcgtaaccgcacgcccacggccgtgatgagggcggcccccttgccgctgccatcctcagacaggaggaaggacacgttacattttggtgacagttccttcaccgtctggtgcatgattctggagaagtgtggatgaagcttgtagagtgtcccgtccactcccacagtcacattcagacggtccagtcctctgttctcgcggatcttatccacaaccgcagccatgcctgcgccacacagctgtgcggccctcctggacaccaccccgcacactgtcttgacgaggatactgtcatcgcaggtgctattcagacctagctgctggaggatagcccggacctggagcagtgctaatcggtcactctcgatctgagagagaaacttggtctcaaagatgccccgggtcttcagcgtctcagagatctgccctcggaagaggaatcccttcttggtgaagtcgattaagatgttgcggacgatttcacccaggtacataccactgatcatcttctcatacctgggctccagccaggaaagcactaacccgtagcccctggaaagccgcaggctggccaggagctctggtggctgggctggaatcacaggcactcccatgaacattttcacagggccagatcctgggccatctgagaggtctgcacaacccagggtgtgggacagcacctgctgccttaagagcaactgctggttccggaaggtcaaggccaccacgccaccaatgagctccatgatgaggcagatcccaaggatgtacatgaatgcttggagaaggtacaggttgtcacggagggacgccagcacaccaatgaaggagaccatgaacatgacgacgcccaggaggatgaggatgatggctggagccaggaaggcactttcaagggttttatatttctgccgctcaacctctgcatagatgcccacagacaggaccagggccccaatcagacctgtaatcccagcactttgggaggccgaggcgggcagatcacgaggccaggagatcgagaccatcttggctaacaaggtgttctattactcaacaggaatcttcaaggatgcaggtgttcaacagcccatctatgccaccatcagcgcgggtgtggttaatactatcttcactttactttctaatcactataatgggatgagctttgtctgtattggggctatcttggtctttgtggcctgttttgaaattggaccaggccccattccctggtttattgtggccgaactcttcagccagggcccccgcccagctgcgatggcagtggccggctgctccaactggacctccaacttcctagtcggattgctcttcccctctgctgctgatcattgtgattacaccgggcccccttggacaatcctgacaatctcccagactcaagatctttaa

SEQ ID NO: 4498 - DNA, 398 bp, Homo sapiens
  misc_feature (1)...(398): n = a,t,c or g
nnnnnnnnnnnnnnnnnnnnnnnnnnnnnnnnnnnnnnnnnnnnnnnnnnnnnnnnnnnnnnnnnnnnnnnnnnnatccaaaagcagaccaatagcaagtaacaagattgaagccataataaaaagtctcccagcaaagaagcccaggacctgatggcttcgctactgaattttaccaaacatttaaagaagaactaannnnnnnnnnnnnnnnnnnnnnnnnnnnnnnnnnnnnnnnnnnnnnnnnnnnnnnnnnnnnnnnnnnnnnnnnnnnnnnnnnnnnnnnnnnnnnnnnnnnnnnnntcnnnnnnnnnnnnnnggggaaatttttaaaccatttttttggaggaacttttttggaaaaattttctttaaaaaaataccaactggattttacg

SEQ ID NO: 4499 - DNA, 1627 bp, Homo sapiens
  SIMILAR (1461)..(661): 1001254mologous to Homo sapiens C33 antigen=type III integral membrane protein,accession number S48196,Smith-Waterman Score= 1413.
tttttttttttttttttgagacggagtctctttctgtcccccaggctggagtgcagtagcacgatctcagctcactgcaacctccgctcccgggttcacaccattctcctgcctcagcctcccaagtagctgggactacaggtgcccgccaccgcgcccggctaaattttttttgtatttttagtagagacggggtttcaccatgttagccaggatggtctcgatctcctgacctcgtgatccacccgcctcggcctcccaaagtgctgggattacaggcgtgagccaccgcgcccggccccctcctccccaatttttcatacagttgcccctatacaatatacacacccttgagggcaggtagaagttccagccaacctgcggccagggacgctgtggggagcatttttctctgagttgctaagagaaccctgatgggcggtgagcagaggaaccacagaacagccagggctcaaggctggcagcggataggccaggagagatcgctaggccccagaaagccccctactttcagtcagggtgggcaagagggtcttcgcagtgaagtgggaggcaggccctggaggagggagccagggagacccctgggagccctgaggttgggggccaggcagggagatggggatagcagctgcctcagtacttggggaccttgctgtagtcttcggaatgcacgtgccggcacaagcagatggacaggaccatccccaggagctcgaccatggccacacccacgcccacgccgaggatgatgcccaggttctcctgcagccacgcctgcaccttctccatgcagccctcctggtacacaggccagtcctcagggtggttgccactctgggtcctgttgccgggggcctcgcagaagcccttcctcacagaaaggctgttgtcctcttcccccttgacttcgcaggaacaggggtaggtgacctcagggcgattcatgagctcagcgttgtctgtccagttgtagaagctgacccagccgcagcacttcacctgagcctgcacgtagtcccaggcatcctgcaggctgtcctcgcgactgctgttgtagtctcgaatgagctcagtcacgatgccacccatctcctgcttcagcttgcccatgttgaagtagaagagggccccggccgtcacctgggcaatgaggatcaggagcaggaaagcaaagtacagccccagcaggcagcggacctcgttgacggcgccgatgcagcccaggaagcccatgagcatagtgactgcccccacgccgatgaagacataggcccccatcctaagcgagctggaggaggtttgcaggacagagatgaaactgctcttgtcggccaggatccacaccccgaagcccaggatcactgcgcccaggataaagaagatcaagttgaagaggaagagaaagtatttggtgactttgatacaggctgagcccatcccgccagtcctggagcttccttccacgaaaccagtgcagctggtcacagggcccacttctgcctgtgcccacgtgtcgtccacacagcagcagggaggactctgcgggttctgctttctgctccgcgctgcaggcccagcgtcacccgctcgtgcctcagtcggc

SEQ ID NO: 4500 - DNA, 1864 bp, Homo sapiens
  SIMILAR (428)..(108): 571254mologous to Homo sapiens Human secreted protein, SEQ ID NO: 7879,accession number AAG03798,Smith-Waterman Score=255.
  misc_feature (1)...(1864): n = a,t,c or g
caatcctcccacctcagcctcctgagtggctgggactacaggcgcctgctaccatacccggctaatacttgtttgtagagacagggtttcgccatgttgcccaggctagtctttttcttttttttttgagacagagttgcccaagctggagtgcaatggcatggtctcggctccacctgccaaccctcctgccctcctgggttcaagcgattcctcctgccctcagattctcctgccctcagtcccccaagtagctgggaatacaggcacccaccaccacgccccagccaattttttttgtatttttatagtagagacggggtttcaccgtgttagccaggatggtctcgatctcctgacctcgtcatctgcccgccttggcctcccaaagtgctgggattacaggcttgagccactgcgcccggccggtcgattcattccttgcaacaagcatttactgaggcacctactgtgtgctcacaggtaaagaaacatgatcttattcccagtagaggtagatattctgaaaaagaataattcttaaaactgcttaaaacaggggtccccacccccaggggcacaggaccagtaccagtccatgggcactggttaggaaccaggccacacagccagggggtgaagcggtgggtgaagtgagcacagcttcatctgtatttaccagctgctccccagagctttgcattactgcctgagctctacctcccggtcaggtcagcagcagcattagaggtctcatgggagtgcgaaccctgttgtgaactggcacatgcngagggatctaggttgtgcactccttatgagaatctaatgcctgatgaatctaatgcctcatgatctgaggttgaatagcttcgtggccgaaaccatcccccacccccatcccggtaccccggagtccggtgaaaaaattgtcttccattgaagccggtccctggtaccagaaaggttggggaccactggcttaaaataccaataaatttttgaaccttaaaaactttgaagaacaaggtaaattggtgttttatttaatgtcctaccctttaatttgttgcattttcctatactctttacactattttatcccaaactatgtatatgaggtgaaaatatatatggaaaaggggatactggaaggaatatttagtttaaaattaattttctttacgatcacgaggcacatgggtgggcataattacaaaggcttgggaagtattcaaataggaaaatcaaaggtgtttcaatacagtagaatcccaggactggcattttaaaatcgcctcacagatcacactcggctggtggcaaatatcattcatcgttgctaagggaccagaaaatactggatgggtgttttaactaactgggtatattgatccatgggaggctgcaacagaaagaaccctgcggcccaggagggggcattgtcaagtggctgcttctccctgagctcccacgcccttcattgcagctgccatgttcggatacaatacaccctgcttcacagccccatgggacatccccctacagggtacctgtcatgtgaagccttgccctagtagttctctcccagggcaaatgaagctcaacatgtttttgcaaggtggaaacctcttattcacatttgctttgaattccccgatggagtagactgcctttgttccatacaggcaaagtaaggatattttaatatcatcctacttcttattagcatttcatttgtctatgtactgtatttcatttgtaatgtctcctgaaacatccaaatagagaacataagaacactttatgtacaatctggaaaaaaattacctggagaaatcaattaaagatttattacccttta

SEQ ID NO: 4501 - DNA, 413 bp, Homo sapiens
  SIMILAR (247)..(411): 921254mologous to Homo sapiens alternative Hermansky-Pudlak syndrome associated protein,accession number U96721,Smith-Waterman Score=256.
  misc_feature (1)...(413): n = a,t,c or g
tttcgtcacgcccgggctcctgcaggcggggcgctgtgcgcgccgcgatccggtacgtgcgcctccgggctgtcccctctgggggcggcgagcctccctccggagccccccttcaaccctcctggaagtgagcatttgcacgaccagggatgctgcgctgctctcccatgagccaggcaccgagtcggtctgctgcagtcctttttgaacctctggccgagtggatgctccactgtgcttgacaagatgaagtgcgtcttggtggccactgagggcgcagaggtcctcttctactggacagatcaagagcttgaagagagtctccggctgaagttcggccagccagagaatgaagaagaagagctccctgccctggaggaccagctcaacaccctcctagcctcggtcataan

SEQ ID NO: 4502 - DNA, 790 bp, Homo sapiens
  SIMILAR (139)..(273): 531254mologous to Homo sapiens PRO2550,accession number AF130089,Smith-Waterman Score=100.
gctctgtcgcccaggttggaatgcatgggcacagtctcggctcactgcagcctctaccacctggactcaagtgatcctcccacctcaacctcccaagtagctgggactataggcacgcaccaccacacctggctaatttttgtattttttttgtagagacagggtttcgccatgcgtgcccaggctggtctcaaatccctgagctcaagcaactggcccaccttggcttcccaaagtgttgtgattacaggcgtgagccaccgcgcccagccttgttaaactttttaggttacagaaactgatggctccaaagttcttctgttacgtgataaaattcgacttcttcttgccctcatttagtccagagaggactggtggggtgtgggggtggggtcaccgagctcagagcatcaagaggccaacctcttcttcctcattctctgactgcccgaacttcagccggagactctcttcaaactcctgatctgtccagtagaagaggaccctctgcgccctcagtggcccacccaagacgcacttcatccttggcaagcacagtggagcatccagacggccagaggttcagaaagggctgcagcagcccgactcggtgactggctcatgggagagcagcacagcatccctggtcctgcaaatgctcacttccgggagggttgaaggggggctccggagggaggatcgccgcccccagaggggacagcccggaggcccacgtaccggatcgcggcgcgcacagcgccccgcctgcaggagcccgggcgcgcttccg

SEQ ID NO: 4503 - DNA, 932 bp, Homo sapiens
  SIMILAR (76)..(258): 631254mologous to Homo sapiens Human secreted protein encoded by DNA clone vq3 1,accession number AAB34695,Smith-Waterman Score= 185.
cggacgcgtgggaaacaagatttacagtctttaatacaatcttaattttggaattcatgaaggaatgactaagttctaatttttttttttttttttttgaaactgagtctcgctctgtcgcctaggctggagtgcagtggtgcaatctcagctcactgcaacctccgtctcccgggttcaagtgattctcctgcctcagcctgttgagtagctgggactacaggtgcgtaccaccaagcccagctaatttttttatatttttagtagagacggggtttcactgtgttagccaggatggtctcaatctcctgacctcatgatccgcccaccttggcctcccaaagtgttgggattacaggcatgagccactgcccctggacagatctaattttttaatagtgtaagagagatacactgtgcattccatctatgtccctgagttagtaattcaaggtcccaaaaggtaatttaatatggaaactccttggaaaattcgggggcttaccacttggaattcaaaatgcctatttttggattgtttaaaagttacttaaaccctgagctttaggacctttaaaaatctccagcatgccttttaagctagtacttttcctgttttgagctctagcaaaccttcagcaagccaaggtggtagccctttttcaacacaatcaaaatagagaggtcaccagttgtttacataccttatggtaaaatgcccggatcaagatccatgtatcccccccatattgtgatgatgcaatcaaagcatagtttttttctactttctgaaatattactgatgaaatcactttacatttaagaggagaaaacagactgccttggattttttttttgtcttgagagaaaaaacaaaatatttagtattgcaagcataaacatttggactcaataaatgacaaattatgaaa

SEQ ID NO: 4504 - DNA, 608 bp, Homo sapiens
  SIMILAR (2)..(55): 421254mologous to Homo sapiens Human secreted protein encoded by gene 44 clone HTDAD22,accession number AAY02693,Smith-Waterman Score=38.
gagatggaatctagctctgtcacccaggcttaagtgcagtggcatgatcttgccttactgcaacctccgcctcccaggttcaatcgattttcctgcctcagcctcctgagtagctgggattacaggtgcccgccactaagcccagctaatttttgtatttttagtagagacagggtttcattgtgttggccagactggtcttgaactcctgacctaatgatctgcccgcctcggcctcccaaagtgctgggattacaagcgtgacgcaccgcatctggtcaaaaatattctttagagtagacaatgatcattactacatcttgttttcttcaatggaacttaacgttccaactattgttctatgttatcatccacagtcaagcaacatgtattcctaagcacagtactatactgagatcaactgacaaaacacctcaaaaaatgacaacttttccaaatatatcagaacttatatttctagatgaattgtatactttgcttttgaattatgtatataaagtgtattcataaatattgacaatttgtcaattatgaggatccctttgaaattgtctcgaaagtctacttacacgtcttttaaaagaatg

SEQ ID NO: 4505 - DNA, 244 bp, Homo sapiens
  SIMILAR (232)..(2): 901254mologous to Homo sapiens Human secreted protein sequence SEQ ID NO:236,accession number AAY87197,Smith-Waterman Score=356.
tgagtacgttcaaagtgatgtaggaaaggcttgtggaccagtaactgtcaatggctaaaaccaccgaataggagccaatgactccacaagtcagtatgttcagtattcttaggcagcccatgaaaactactggaatgaggatagctatgcaagagaaagtgacccagaatacaccatcatcatgaaaaatctttaggtttccatcatacttgataggtgtcagtcttgtaatcagtatataaaa

SEQ ID NO: 4506 - DNA, 661 bp, Homo sapiens
  SIMILAR (379)..(218): 1001254mologous to Homo sapiens Human secreted protein sequence SEQ ID NO:236,accession number AAY87197,Smith-Waterman Score=278.
tagtagatttttatcttcatcttaaaattttaaatgctttactcccatgatcctgagttatcataacagagggttctcacagcattgtatgctgtgttccctccttttgtcccagttgactttctttaaatttagtttccaagtgctctggttagcataggtgggtcaagactcctactgtgctgtcacactggtttttggatttaagagtcttaccattagtttgaaaaggcacatttgtgaaagctctgtggaaatccttgttgagcgctctcttgagtacgttcaaagtgatgtaggaaaggcttgtggaccagtaactgtcaatggctaaaaccaccgaataggagccaatgactccacaagtcagtatgttcagctgtggaagagtggaagagtttaggcatcatccatgttagaacaaaaatagtttataactctccactggcttcaatcacaggcaatcacatctgctccctcaggcatgaaaaaggaccagacccactcagagctgaacagaagttccctggaaagataaactgaaaacaaccttcaacatccatatgagttcttaaaacacagttcagcttatccaaatactatggaaaatatcttccatatgaaggaacttcaacaataaaatctaattagaggaagaatc

SEQ ID NO: 4507 - DNA, 2120 bp, Homo sapiens
  SIMILAR (2063)..(822): 551254mologous to Homo sapiens seven transmembrane protein TM7SF3,accession number AB032470,Smith-Waterman Score=912.
tttttttttttaatttctcgagacagggtctctgtcacccaagctggagtgcagtgacacaatcaaggctcactgtagcctcaatcttcagggctccagggatcctcccatctcagtctccttgggagctgggagctaggcatgttccaccatgcctggctaattttttaatttttttgtagagatggggtcttgtcatgttgcccatgtcggtctcaaactcctgggctcaagcgatactcccaccttggcttcccagtattgggattacaggtgtgagccaccatgtctggcttgcttctctttttgtattctaaaattcaaaggcctaagtatcaaatccctaaatctccaaatactgtcacagataaagactcaataataaactccctccgaaagtttagacaggctcaggtgagagacttgtttcaaggggttataaaaagaaacaccagtgctctgcagaagaatcagtttttaatttttttaaatgtatctatttaatggaataagttgatcataacatctgcaaaccaaaaggctatttctcaagtatttgggaaataagaaaaagcctccctaccaccaaccgttttggtcatcgtttctcattctcttacaatcatcctaatcccctagtacacccttaccatatatcaataagggcacccataattattatgcaaaggaccggatatatatgcctaatctcttattagacttgcacccagagaactgttgaaccactccaggggcatggaactcccaaagctgagggcacaactgacccaaaccccctggggattctacaggaaggcaaagggcgtttctctctccagctgggctgcttcccttctgggaaggaggcccttttaatctggggtttaatcgggccataagaggcctctctctcaatgggaggggatgtgggtaggctaggggtccagaatgtttgtcaactcggcgctctctctcttgccttcccataacttgttatgggtgggggaagggaagaacggtcgtcctctctctcttcgaatctggtacgtaattccacttacagccagcatgcccccatactgcccaggataatgaagtcattagtttgaaaaggcacatttgtgaaagctctgtggaaatccttgttgagcgctctcttgagtacgttcaaagtgatgtaggaaaggcttgtggaccagtaactgtcaatggctaaaaccaccgaataggagccaatgactccacaagtcagtatgttcaggtattcttaggcagcccatgaaaactactggaatgaggatagctatgcaagagaaagtgacccagaatacaccatcatcatgaaaaatctttaggtttcccagtggagtaaagaaagtcactgacgagatgaggaaccccagcactagtccaacacagagcatgcagatcgagaggattccaaatcgccaccacacatgctaccaagaacattccaccgacgcttccagtgacagctgtcagaatcagatctcacatcatacttgataggtgtcagtcttgtaatcagtatataaaagaagaatcccatgatgataaagcctatgaagaataattctgttttccagaatctgtgtccaaagaaacaaatgaagaaaccaagcagggcaaaaagagtgaagaacactttggaagacactccttccctagggaagcacaactaccctctcccctgccctcaaaagctgcaaaccgtaatgtgtgaaaccaggaatgtaggcagcagatgtatttagaaacgggtccccaaacaatgaacattgtataatgacaccttgtcccgggagggaggagaaggaaacacttgtccttatcaattaagctgttagggtaaccaccttgagagcactggccttcacctggggcacactgaccatcctctgcagatgcttcagcaacatctcctcagtgaggtcattctcaggcagaaaatactgatagacatcatactgcaacctccacctggagtcctggtctgtcccagcgtcacatggtgggggatctacgcctctcgcatagcctagggtttgctggggcaaacttgatagtcgtttcaaagaaattatactccaagtaaatgt

SEQ ID NO: 4508 - DNA, 1320 bp, Homo sapiens
  SIMILAR (959)..(1285): 581254mologous to Homo sapiens PRO2550,accession number AF130089,Smith-Waterman Score=291.
tttttttttttttttttcaggtcaatttcactgtcttttatttgacagctagcgcagtctttggggaaatttgtgggtgatttgagtagtaacagcaaggacatcactgtaattatgatagtgccttatatttttctagcacctctcccaaggacttatgaagacttttagattcttcatcccttcacacaacattgcttcaaggtagggccaaggcagaaattatcatcactgttttacaaggaaagacactcctgtgcggtctcaaagcaaatgcttttaagagctaaaaattcatttcctagttctgttcaccaaatgatgccttctttaaacataaatacaaattgtaatgttaggcagggtgctatttacagagagaaacaaagagaattttacaatagtcgccaacactgcagctgccaaaaaatccctagctcagaaatttaaagcagcaatcccattttccctacagaaatgaaaacatattgaactttcttttgtatttagcagtaatccagcaaaatataagctttaatatagcgactgaggagtggtagtttgagccatgaggtacgggggagccagaatccacttagtgaggacagtgatgaccagcaggtggcagaagtaaattccaagcagccaaaaaaccaaaaacattcggagaatttttccccccgttcctgagggacaggatggagttttggacaggaagaactgtaagaagccaagatctgcgacagtcccaacaaatacagtctggtcacatggatacaggaaggacgatctggggaggcataccaacaagaaacgaagccagggacctgaatgcaaaactagcctcaggtgacatgttctcctggcacttagaaggcactgggcaaaaccatggcccacatagaggggggcagacacatgtctggggtttcaagtttctgcagaccttcatcatttgttttcctttttgttttgctctgttgcccaggctggagtgcaatggcgcaatctcggctcactgcaacctccgcctcctgggttcaagctattctcctgcctcagcctcctgagtagctgggattacagacatgcaccaccacacctggctaattttttgtatttttagtagagacagggtttacaccgtgttggtcaggctggtctctaactcctgacctcaggtgatccgcctgccttcagcctcccaaactgctggggattatagggcatgagccacctcgccagccctatttatctggattattttaagtaaaactttaataaaccatgacctacatttctatggcatttttaaggtat

SEQ ID NO: 4509 - DNA, 498 bp, Homo sapiens
  SIMILAR (45)..(185): 951254mologous to Homo sapiens Human secreted protein, SEQ ID NO: 8128,accession number AAG04047,Smith-Waterman Score=242.
ttgaccgatcgaaagctctgggacgacccacgcgtccgacgaagatggcggctgcgcgcttggcagctgtggcggcctgtgtaccttgtcggagctggggctgggcagccgtccccttcggtccccaccgtggcctcagcgtgctgcttgcacggatacctcagcgggcgccacggtggctcccaggtcagtgtccgaaaggcgggagtaggatgcgttctttcgaacgcctcgggttccgtcagttaccgtgcctgtgcagtgcgtctttggcgcccggttcaaaaatgctcctccccctttctcaacaccccagttctaggcgctttgtagacttctggtgaaggctgtgaggagagctctgccgcggccctgcggcattctgggcaccccgggccctcgctggcgttttacactgtgcagattaaagagctcctgctccttacctgcctcccctgcattaaaggccaacactataaaaaattaccatgtgcattt

SEQ ID NO: 4510 - DNA, 504 bp, Homo sapiens
  SIMILAR (21)..(305): 601254mologous to Homo sapiens Human secreted protein, SEQ ID NO: 6953,accession number AAG02872,Smith-Waterman Score=282.
ttttttaaggcacaatctcgctgtcacccagcctggagcgcaatggcgcctcctcagctcactgcaacctctgcctcctgagctcaagccatcctcccacttcagccttccgagtagctgggagtacaggtgtgagccaccacacccagctaatttctgtatttttagtagagacagggtttcaccatgttgcccaggctggtcttgaattcctggcctcaagtgatcctcccacctcagccttcctaaatgctggggttacaggtgtgaaccacagtgcctggctgtgtttctcatatttgctgtgaaccccacctcccctcacttacccaacaatggtcttcctgcccaccccagagccggcactgtcaactatgatctccaagactgctgcacagcactcaccttccaaacctcacctcctacttagcttcactgctgctctgagccacagggcactgacggttaggtgagtggataactggggtccataacaattatatg

SEQ ID NO: 4511 - DNA, 712 bp, Homo sapiens
  SIMILAR (236)..(358): 631254mologous to Rattus norvegicus rab-related GTP-binding protein,accession number M94043,Smith-Waterman Score=128.
atcaccgaggcgaaagtgtttggaacatctgcaggtggggaacattgcgatgaggaaagattgggaaaatgacaagagcccattgtctggaattcataggtgcattgattgtcttcagtatcaccagcccagccccatttgaagcagagccaaagtggaaaaatgatttggactaaacgttaactcatggcagaccagtttctgtggttctgttggccaagaaatgtgaccatgggaggatgaatgcagaaacagcagcctcaagatgggccagatctacatggaacatagttttgtaggataaattgaaacatcagcaaaagaaaatgtgaactttgatgaagcctccaggtgcctggatgccaaatagacaaatacagaatataagaaaacacaataagagtcattggccccgtgcctatttggcatcattgcaagaaacctggggtagtaatagtggacgtatttagagagtgaggcataagctcacctaaacagcctagaaaatgtttactatgagagtaagaaggaagaacacaagtggatatacgaggagtccttgcaatctggcccatcacgcaccctttgcatatctctacctacttgtgcataattcagcatccagcagaggaagacaaaatgttgcggacagttcctctaccagcagcatgcctcccccaggacaagcgcaaagtgaagactggtcgtcgct

SEQ ID NO: 4512 - DNA, 501 bp, Homo sapiens
ttttttttgatttcattcattcatttattcaattttttttaaaaaagctattacgttaaactcttaggatgaggacaagccttacaatggtgtgtgagtgtgagtatgtgttcatgcatacactcacatccctgtgtctgagtgttgtgggtgtgtgtgatgtctgtgcatttctatgtggtatgtattcatatgcatgtgtattggggtacactaaatttggggtttgcacagaaaagaataaacagaattgtactgggaataggtctacccaggggcttcctctaaggaacaggcacacaggctcattcaggttttggctggattttcatcctctggcatcccccaaaggcacactgaggtctctcctatcaccttgacaatggggatttgacccccaaccatctccaccgcagttggactgacaaggcagcaggtggtgctcatcaaagacagctctgaggaggctttcgggcgacacccaggtggtcgacgcggccg

SEQ ID NO: 4513 - DNA, 400 bp, Homo sapiens
aactcagagggggctgcctggatccagcccccagcaggagaaccgacctggggacaaagcggaggcacccaaagggcaggagcaatgccgcctggagactattcgtgatcccaaggacacccctttctccacctgctcctcctcctctgactcggaacctgaaggatttttcttaggcgagcgccttccccagtcctggaagacccccggaagcctccaagcagaggacagcaacgcctctaagacgcactgcaccatgtgctagtggcgcagctcagagaggggatgctgggacagccccgtccccaccatcctcctcccaagccaattaaatgatcacagcacgcgtgacagttaccggctggagagccggaggtgggaccgggagcaggggaccgta

SEQ ID NO: 4514 - DNA, 991 bp, Homo sapiens
cttcgtcgcgcacggcccaggggctgggcggggcgggaggctgggcctcacccccactagctgcggtgtaggtccagctccgcggctctgagaccagcgtttccgacccggcccggaacaggggagactggactcgaccgaactgaaggaagggaccaaacctcggtgaactctgcaaccctctcccgaacactccttctcgctgctgccggcggttccagcctgcaaactcagagggggctgcctggatccagtccccagcaggagaaccgacctggggacaaagcggaggcacccaaagggcaggagcaatgccgcctggagactatttcgtgatcccaaggacacccctttctccacctgctcctcctcctctgactcggaacctgaaggatttttcttaggcgagcgccttccccagtcctggaaagacccccggaagcctccaagcagaggacagcaacgcctctaagacgcactgcaccatgtgctagtggcgcagctcaaagaggggatgtgagtgggaggaaaggggtctgtaaagcgggagaacaaggctagcctccccctaacaatcctagactgagacgcagtcaggcgcacgcccgcaagaggcggcgaggtgacaagtttggagtgcgcccccttcagtactgcgcgttctaagacttttggcggagactttcttggcaaaacccattccccaaagctacgcttcccctgctgagatagcccctacccccacctctacaggctgggacagccccgtccccaccatcctcctcccaagccaattaaatgatcacagcacgcgtgacagttaccggctggagagccggaagtgggaccgggagcaagggaccgtaggaaccgggccgcgcttccttcccctcctaggagtttcgtgggagggcgcagcagaggggccgttccctctttccggatgttcggattaagcgaacagcgctccccattgccggccggtagcagc

SEQ ID NO: 4515 - DNA, 880 bp, Homo sapiens
  SIMILAR (236)..(15): 561254mologous to Homo sapiens Human secreted protein, SEQ ID NO: 7870,accession number AAG03789,Smith-Waterman Score=200.
ctaaatgaagtccacatgaccgactgaccgacctggggaacatagcaagaccccatctctacaaaaatgtaaaaaataaaaattagccgggtgtagtggtacatgcctgtaatcctagatactcgggaggctaaggcagaaggatcacttgagcccaggagttcgaggctacaatgagctgtgatcgtgccactgcactccatcctgggtggcagagtgaggccctgtctcaaaataaataatccagtcccccccaagaaaggaatgaagttctataatgagaaaaatcctagtaactaacatatagtagacagtggagagtggttctctttcgttttcttaggggcagacagatggggtgctggagtcctctatcaaagagtcagagctctatcccagatgtgtaatgaacgtggtcacaaacatatttgtcccattaccatttaccttccctataaaccactgtgcctcccagccttgtagaatagacacataggagcgcaggaatacgtctaaaaataggagtgagagagggcagggcatgcccgttcttgtggtagaagaaaagaatgtcaaagaaagcagctgggactaatgaactttacattagccatattccattatttcagcttaagtccaatgtcaggtcctcatgaggcaactggctttgacaggagctacgctaattaccacttaccaaccctttaatttctgggtaaaagcaaaagagaaaaactaatggatttttcattttccagagagacaagaataaaataatagtagtctgtagaaaaaagaaaacctgcatcaattacaagaattattaatgtatctttaataaataaccacattatttagctgtttaatttcctaaaaaaaa

SEQ ID NO: 4516 - DNA, 2536 bp, Homo sapiens
  SIMILAR (260)..(307): 871254mologous to Mus musculus putative,accession number AK011160,Smith-Waterman Score=69.
atttcgtggagccgagagacccgagtgcacgtgtggagtatcttttgcacaagcgcggcggcgggagacactcccgcccccatcagactcaagccctcactcgactctcgcggccttcgttgctcgcacagctccctgcccaggctaggaggccggcttgcggggttgagtggcccgagctaagggtgcggagacccaagggcggcgactacgacggcgttgatatcggtggtaacgacggcctcagcaggcggggaagatgaaaggtagccggatcgagctgggagatgtgacaccacacaatcttttcaactgtttaatattgtgtggtgtcacatctcccaatattaaacagttggaaaagattgaatcaggtcatctttccagtcagctacaatgacaagttctacaaggatgtgctggaggttggggagctaacaaaaacttgcctatttcaatgatattgctgtaggtgcagtatgctgtagggtggatcattcacagaatcagaagagactttacatcatggacactagggatgtctgggcaccttaccgaagcttagggattagggaactaaaatgttaaatcatgtgtttaaaacatctgttgaaaaagatggtactttttgacaacatttttctgcatgtccagatcagcaatgagtcggcaattgacttctacaggaagtttggctttgagattattgcgccaaagaagaactactataagaggatagagcccgcagatgctcatgtgctgcagaaaaacctcaaagttccttctggtcagaatgcagatgtgcaaaagacagacaactgaacaaattacaaatgaactttcttgcacttgcttgtcgccaaataaaagagaggcccattgattcctccccccaccccaacactttttttttaaagcttttctccctccttgttcttgtttttctttcttcctttccttttctctgagagttttaatactttcaaggactttaaaaaaataatcatgtttgaattgttttctcttatttttgtgaggtggtttgaaggaaggacaaggtagatctgtttagttttgcagttgaagttagatggtcctaaacatttaattgtcaaataatttcaaatttaatgtcctgctttcacattgaagggcagagcctacaaaacattgtatatttcaaaagacaaaaagaagcagcagcagtatcttgttctctaattcatagacaagttgagtgtgtttgtggtactttgggtttttaaacactttgggatactaatccctagacattgccttcactccacctttagtcccttctgagcactctctcgggagttggaacattgttatcccttgtaagaaatactaagcttatgttgatttttaagtaattatatcttctcttcttgctggtgggtggggcagtttggtttagtgttatactttggtctaagtatttgagttaaactgcttttttgctaatgaagtgggctggttgttagcaggtttgtttttcctgcctgttgattggtactagtggcattaacttttagaatttgggctggtgagattaattttttttaatatcccagctagagatatggcctttaactgacctaaagaggtgtgttgtgatttaattttttcccgttcctttttcttcagtaaacccaacaatagtctaaccttaaaaattgagttgatgtccttataggtcactacccctaaataaacctgaagcaggtgtttttctcttggacatactaacaaatacctaaaaggaagcttagatgggctgtgacacaaaaaattcaattactgtcatctaatgccagctgttaaaagtgtggccactgagcatttgattttataggaaaaaaatagtatttttgagaataacatagctgtgctaattgcacatctggttggaaggacatcccagattttgccttatactccagtggcctgtgatattgagtttaaggatttgaggcaggggtaattatttaaacatattgcttctattcttgggaaaaatagaagtgtaaaatgttaataataccaaatgtcactggtgacctcctccactggagaggactgggtttatgccagatcattttccggcacacacggaggggctttgacagattgataactttgtaagatgggagacatctgaaatattcatgttttccttttgtagtcccatctccactatttaggaaatgttctcagactttaaaaataatgccacagggcttgagctttctgtgcatttgactttaaaaggaagtttcattcatatttatcctcttatgtaaaattggcgggtataaaagtctccatttcccaaatatgttaaatgacaaaattattttataaaatggtttatgccacactttataaccttaagtttttaatttgagaatgtgaaagtacaaagtgccagtaggacttcaacaatcttgagtgcccaaggaataatacagaaaaagaagacagttgatgaatgagtttatagggttctaatctt

SEQ ID NO: 4517 - DNA, 376 bp, Homo sapiens
  SIMILAR (18)..(116): 481254mologous to Homo sapiens Human secreted protein, SEQ ID NO: 7214,accession number AAG03133,Smith-Waterman Score=91.
  misc_feature (1)...(376): n = a,t,c or g
gaagacttttataaaaggcctcaagaaaaatgcaaattgaaactacactgagatactatctctcacctatgagactggcaaaaatgcaaatgcttatcaacacatcctgttggcaaagtcacaggaaacgagaacactcatatgttagtggtaggaaggcaaaatggtgcaacccctcagcaaaggaatttggccatatctaatacaagcnnnnnnnnnnnnnnnnnnnnnnnnnnnnnnnnnnnnnnnnnnnnnnnnnnnnnnnnnnnnnnnnnnnnnnnnnnnnnnnnnnnnnnnnnnnnnnnnnnnnnnnnnnnnnnnnnnnnnnnnnnnnnnnnnnnnnnnnnnnnnnnnnnnnnnnnnnnnnnnnnnnncc

SEQ ID NO: 4518 - DNA, 498 bp, Homo sapiens
  SIMILAR (54)..(80): 1001254mologous to Homo sapiens Human ORFX ORF138 polypeptide sequence SEQ ID NO:276,accession number AAB40374,Smith-Waterman Score=48.
gtccagcggactaggcaattggtaacttcaccgagtccaatgagttcttctgacggcaaagttcttcccctcaatgtacagtcccatcaaaactgctggtggacccgcttcaacatgagttctctaaatgtggtgaaaatgacaacaatatccctcacacccagcaacagtaacacccctcttaaacattctgcctcattcatcagtgctacaggaacaacagaagaatcaaggagtgttccacagatcaagaatggttctgtcgtgtcgcttcagtctcctgggtccaggagcagcagtgcggggggaacatctgctgtggaagtcaaagtggaacccgaaacatcatcagatgagcatcctgtacagtgccaagagaactctgatgaggctaaagctccccagacacctagtgcccttttggggcagaaaagtaatacagacggagcactgcagaaaccttcaaatgaaggtgtcattgaaataaaagcaactaag

SEQ ID NO: 4519 - DNA, 589 bp, Homo sapiens
  SIMILAR (41)..(274): 1001254mologous to Homo sapiens unnamed protein product,accession number AK024757,Smith-Waterman Score=397.
cctctaattatacagcccggatgaatctcactcagattttgaaccttccactgtttttcctagtgccaacccacaaaatatgatcgattccagcacttctgtttatgagttccaaacaccatcttacctcaccaaaagtaatagcaccggtcagatcaatttttctcctggagataatcaagcacaatcagaaattggagagcaacaattagatttcaatagcactgttaaagacctgttgagtggagacagcttgcaaaccaaccagcagctgaaataccctgatgtattaggagaatgaagatttaaaaacaaaattttgttttccacacagcttttcaagcatatttcatacagtgttcttgtccttcctctctgctggctggaatgcaaatgtgatggctagaactcaagcagccctcctggacttcatgttaaagacacatgctgaggatgattgagcaacaagatacaaggtgcccagggcatgatgactttggaagggaagatgcccaactagtcctgactgcttacctctggatgtgttttacatgagagaaataaatgtctttctggtttaactcacaaa

SEQ ID NO: 4520 - DNA, 520 bp, Homo sapiens
  SIMILAR (1)..(285): 871254mologous to Homo sapiens Human secreted protein, SEQ ID NO: 8128,accession number AAG04047,Smith-Waterman Score=479.
atggcggttgcgcgcttggcagctgtggcggcctgggtaccttgtcggagctggggctgggcagccgtccccttcggtccccaccgtggcctcagcgtgctgcttgcacggatacctcagcgggcgccacggtggctcccagaccttccaaacctggcttataagaagctaaaaggcaaaagtccaggaattatcttcatccctggctatctttcttatatgaatggtacaaaagcgttggcgattgaggagttttgcaaatctctaggtcacgcctgcataaggtttgattactcaggagttggaagttcagatggtaactcagaggaaagcacactggggaaatggagaaaagaatgttctttctataattgatgacttagttgatgggccacagattcttgttggatctagccttggagggtggcttatgcttcatgctgcaattgcacgaccagagaaggtcgtggctcttattggtgtagctacacgctgcagataccttagtgacaaagtttaa

SEQ ID NO: 4521 - DNA, 3902 bp, Homo sapiens
  SIMILAR (250)..(2418): 211254mologous to Saccharomyces cerevisiae mal5, sta1, len: 1367, CAI: 0.3, AMYH_YEAST P08640 GLUCOAMYLASE S1 (EC 3.2.1.3),accession number Z38061,Smith-Waterman Score=262.
atgatgaggttggaaggagctgaaccttctgggcagcttcaaaatattgatgaagaagttatctcttctgcttgccgtcttgtgtgtgagtgggcccagaaagtgttaagccaaccatttgacaccgtcttggaattagcccgcttccttgtaaaaagtcactatataggcaccaagtcaatggcagctctaactgtaatggcagcagcaccagcaggaatgaaaggaattacccagccttctgcttttatacctacagctgaaagtaattcctttcagcctcaggtgaagactttgccatctccaattgatgctaaacagcagttgcaacggaaaatccagaagaagcagcaagaacagaaactacaatcccctttgccaggagaatctgcagcaaaaaagtcagaaagtgctacaagcaatggagtgactaatcttcctaatggaaatccttcaatcctttctcctcaacctattggtatcgttgtggcagctgtccctagtcccattccggtccagcggactaggcaattggtaacttcaccgagtccaatgagttcttctgacggcaaagttcttcccctcaatgtacaggtggtcactcagcacatgcagtctgtgaaacaggcaccaaagactccccagaacgttccagccagtcctggtggggatcgttctgcccggcaccgttaccctcagatcttacccaaaccagcgaacaccagtgcactcaccattcgctctccaactactgtcctctttactagtagtcccatcaaaactgctgttgtacccgcttcacacatgagttctctaaatgtggtgaaaatgacaacaatatccctcacacccagcaacagtaacacccctcttaaacattctgcctcagtcagcagtgctacaggaacaacagaagaatcaaggagtgttccacagatcaagaatggttctgtcgtgtcgcttcagtctcctgggtccaggagcagcagtgcggggggaacatctgctgtggaagtcaaagtggaacccgaaacatcatcagatgagcatcctgtacagtgccaagagaactctgatgaggctaaagctccccagacacctagtgcccttttggggcagaaaagtaatacagacggagcactgcagaaaccttcaaatgaaggtgtcattgaaataaaagcaactaaggtctgtgaccagaggaccaaatgtaaaagtcgctgtaatgaaatgctgccaggcacgtcaacaggcaataatcaaagcactatcactctatcagttgcttctcagaacttaactttcaccagcagcagctcaccacctaatggtgactcaatcaataaagaccctaaattatgcactaaaagcccaagaaaacgactgtcttctacattgcaggagacccaggtgcctcctgtaaagaaaccaattgtggaacagctttcagcagctaccatagaagggcagaaacaaggcagtgttaagaaggaccaaaaggttccacattcagggaaaacagaaggttcaacagcaggtgctcagattcctagcaaggtatcagtaaatgtcagttcacacataggagcaaatcaacccttgaattcctctgcccttgttatcagtgattcagctttggaacagcaaacaaccccatcatcatctccagatataaaagtaaaacttgaaggaagtgtctttctcttggacagtgattcaaagtcagttggcagctttaatccaaatggatggcaacaaatcactaaagattctgagtttatatctgccagttgtgaacaacagcaagatatcagtgttatgacaattcctgagcactctgatatcaatgacttagagaaatctgtttgggaattagaaggaatgccacaggacacatatagccagcagctacatagccagatacaggaatcttctttaaatcaaatacaagcacattcttcagatcagttacctctgcaatctgaactgaaggagtttgagccttctgtttcccagacaaatgaaagctactttccttttgatgatgaacttacacaagatagtattgtggaagagctggtgcttatggagcagcaaatgtcaatgaacaattctcattcttacggcaactgtttgggaatgacccttcagagtcagtcagtaactccaggagctccaatgtcatctcacacttccagcacccacttctatcatccaatccacagcaatggcactccaatccacacacccacacccacacccacacccactcctactccaaccccaaccccaaccccgacatctgaaatgattgctggatctcagagtctgtcacgggagagcccttgctccaggctagcccagactacacctgtggatagtgctttaggaagtagccgacatacacccattggtactccacattctaactgcagcagtagtgtcccccccagccctgttgaatgcaggaatccgtttgcattcactccaataagctccagtatggcatatcatgacgccagcattgtctcaagtagtcctgtgaaaccgatgcaaagacccatggccacacaccctgacaaaaccaagcttgaatggatgaataatgggtatagtggggttggtaattcatcagtttctggccatggtattctcccaagctatcaggaactagtggaagaccgtttcaggaaacctcatgcttttgctgtgcctggacagtcttatcagtctcaatccagacatcatgacactaattttggtcgtttgactcctgtctctcctgtgcagcatcaaggtgccactgtaaataacaccaacaaacaggagggttttgcagtccctgcccctcttgataataaaggaactaattcatctgccagcagcaacttcagatgccggagtgtgagccctgctgttcatcgccaacgtaatcttagtggaagcaccctctatccagtatctaatatcccacgatctaatgtgaccccctttggaagtccagttaccccagaagttcatgttttcacaaatgttcacacagacgcatgtgccaacaacatagctcaaagaagccaatcagttccattgacagtcatgatgcagacagccttcccaaacgctcttcagaagcaagcaaacagtaaaaaaataaccaatgttttgttgagtaaacttgattccgacaatgatgatgcagtgagaggtttgggaatgaacaacctgccctctaattatacagcccggatgaatctcactcagattttggaaccttccactgtttttcctagtgccaacccacaaaatatgatcgattccagcacttctgtttatgagttccaaacaccatcttacctcaccaaaagtaatagcaccggtcagatcaatttttctcctggagataatcaagcacaatcagaaattggagagcaacaattagatttcaatagcactgttaaagacctgttgagtggagacagcttgcaaaccaaccagcagctggtaggtcagggagcatctgatctcactaatactgcatctgatttctctagcgatatcaggttgtcttctgagctctcaggcagcatcaatgatttgaacactttagacccaaatctactgtttgatccaggtcgtcagcagggacaagatgatgaagctacactggaagaattaaagaatgacccattatttcaacaaatttgcagtgaatccatgaattctatgacttcatcaggttttgaatggatagaaagcaaggaccatcctactgttgaaatgttgggttaaattgtgttttataacatgtagcacactgtatctaaagacatatgtattgtatttgtcttaatggaagtgcctcccgcagcagaaatactattaatatgtggaaccaaattttt

SEQ ID NO: 4522 - DNA, 705 bp, Homo sapiens
  SIMILAR (351)..(635): 651254mologous to Homo sapiens PRO2550,accession number AF130089,Smith-Waterman Score=284.
tttttttttttttttggaaaacaatatattaatttattcccaagaaaacaaaacatggaacctcatcgaaaacaaacatcagatacagtagtttcagggcattcccatgggctgtcagaaacccactagcccaaacactatgctcttccaacattaaagtatttaagacacaggagagatgaccaacaacagacatgtaaacatcaattccagaaagatttcttgttctacatgagaaacatccagtgtaaaacggttcctcttctcaggtgctgtcatttaaataagttgaaaagagacaatttttaaactccactgctgaccctgagtgcattcgctatcccctcacctattttgttttgggacaaagtctcgctcttgtcaccaaggctggagtgcagtggcgcaatctcagctcactgcaacctccacctccggagttcaagcgattctcctgcctcagcctcctgagtagctgggatgaacaggcatgcgccaccatgccccagctaatttttgtattttttttagtaaagacggggtttcaccgtgttagccaggatggtctcgatctcctgacctcaaatgatccacccacctcagcctcccaaagtgcaggtattacaggcgttacacttgcgcccagcctctttgttcttatacattaaattttcatggaccgtctggagattgagaacacagcag

SEQ ID NO: 4523 - DNA, 560 bp, Homo sapiens
  SIMILAR (30)..(143): 761254mologous to Homo sapiens Human secreted protein, SEQ ID NO: 7870,accession number AAG03789,Smith-Waterman Score=136.
gctcgacttttttttttttttttaaatagaatcttgctcggctgtctaggctggagtgccatggcacaatctcagctcactgcaacttccgcctcctgggttcaagtgattctcctgccttagcctcccaagtagctaggacttagaggcacgtgccaccacacctagctaatttttgtacctacagtagagacggggtttcgccatgttggccaggctggtctcgaactcctggcctcgggtgatctgcccaccttgacctcccaaagtgctgcgattacaggcatgagcgtgacgcactgtgtccagccagccaccgcgcccagcccacccagcctctttcaccaatgtttgatagtttaatatgtacagatctttgacctctttgattaaatttattccgaagtattttgtgttctattaaaaaatagaaatgggatagttttgttcattatctttttcagacagtttgctgttggtatatagaaacactgatttttgtatgttgatttaatatcctgcaactttcttagatttgtttattagttctaacagtttta

SEQ ID NO: 4524 - DNA, 781 bp, Homo sapiens
  SIMILAR (55)..(474): 561254mologous to Homo sapiens p40,accession number U93569,Smith-Waterman Score=415.
atggttcacatcacaggactctgtgcagacaacctccagtaccaggctggagccagaataatcagtgttcctgaagaagacaattctaaaagcttggaaaacatatttgggggaataattgaggaaaacttccccagccttgctagagatctagacattcaaatacaagaagcgcaaggaacacctgggaaatgtatcacaaaaagatcttcacctaggcacattgtcatcaggttattcaaagttaagacaaaggaaagaatcttaagagctgtgagacagaagcaccaggtaacctatagaggaaaacctatcagattaacagcagatttctcagaagaaaccctacgagctagaagggattggggccatatcttcagcttcctcaaacaaaacgattatcagccaagaattctgtatgcagcgaaactaagcatcatatatgaaggaaagatacagtcatattcagacaagcataatgctgagagaattcaccattaccaatggcaaactactaaaaggagctgtaagtcttgtggtggctctaaaccgttgaaacaaatcctggaaacacatcaaaacacatcaaaacagaacctctttaaagcataaatcacataggacctataaaacaaaaataccattgcatgatgaatacaatgatctgaggtctgctcttagacctgcatctcacacagcctatggaagtatgctaatgatcctgaaaagctcattgactcttttcaagcatggtgatgaggtcgtgggaagaagagcaaag

SEQ ID NO: 4525 - DNA, 505 bp, Homo sapiens
  SIMILAR (241)..(309): 521254mologous to Homo sapiens ORF 3,accession number M69297,Smith-Waterman Score=64.
aaaaaccaaaattatccaaatggccaataaacataggaaaaggcatctagtctcagtagtaagtaaggttgatgcaaaagaaaatcataatgatacaccattatataccacaatggctaaaaacatcaaagtctgatatgattaagtgttgctcgggctatggaacaacagaaatcttcacacactacttgtgtgaatgcaaattattacatctactttggagaatggtttggcttgattctgctaaagttcaagacagatacgccccatgatccagcaatcccactcctaggtacatacccagcagaatgtatgcacatgtaccccaaaggcacacacagcagcactatccataatagtccccagctgggaacaacccaaatatcctcaatagcacaatggtaagtacactggtatattcataaagtagaatgtcatacagcacaaaaacaaagggacagccacatgtaacaacatggatgaatctcgcaaacataaggacgag

SEQ ID NO: 4526 - DNA, 535 bp, Homo sapiens
  SIMILAR (1)..(180): 981254mologous to Homo sapiens BIGH3,accession number AC005219,Smith-Waterman Score=291.
gtgtcccatgtcatcaccaatgttctgcagcctccagccaacagacctcaggaaagaggggatgaacttgcagactctgcgcttgagatcttcaaacaagcatcagcgttttccagggcttcccagaggtctgtgcgactagcccctgtctatcaaaagttattagagaggatgaagcattagcttgaagcactacaggaggaatgcaccacggcagctctccgccaatttctctcagatttccacagagactgtttgaatgttttcaaaaccaagtatcaaaacatgaatcaagcaatccagcctcatgggaagtcctggcacagtttttgtaaagcccttgcacagctggagaaatggcatcattataagctatgagttgaaatgttctgtcaaatgtgtctcacatctacacgtggcttggaggcttttatggggccctgtccaggtagaaaagaaatggtatgtagagcttagatttccctattgtgacagagccatggtgtgtttgtaataataaaaccaaagaaacata

SEQ ID NO: 4527 - DNA, 2811 bp, Homo sapiens
  SIMILAR (346)..(693): 821254mologous to Homo sapiens transforming growth factor induced protein,accession number M77349,Smith-Waterman Score=453.
atggcgctcttcgtgcggctgctggctctcgccctggctctggccctgggccccgccgcgaccctggcgggtcccgccaagtcgccctaccagctggtgctgcagcacagcaggctccggggccgccagcacggccccaacgtgtgtgctgtgcagaaggttattggcactaataggaagtacttcaccaactgcaagcagtggtaccaaaggaaaatctgtggcaaatcaacggcactggggacagctgacgtgaagggggtatcaagcctggcagttagtgtcagcgacttaggaggtgaacaaatgaggaaactgagacccagagagatgatgaaattggctgaggatggcccagctgccctaccactctcaaacctttacgagaccctgggagtcgttggatccaccaccactcagctgtacacggaccgcacggagaaagctgaggcctgagatggaaggggccccggcagcttcaccatcttcgcccctaagcaacgaggccttgggctccctttgccagctgaagttgctgggactcccttggtcagcaatgtcaacattgagctgctcaatgccctccgctaccatatggtgggcaggcgagtcctgactgatgagctgaaacacggcatgaccctcacctctatgtaccagaattccaacatccagatccaccactatcctaattgggattgtaactgtgaactgtgcccggctgctgaaagccgaccaccatgcaaccaacggggtggtgcacctcatcgataaggtcatctccaccatcaccaacaacatccagcagatcattgagatcgaggacacctttgagacccttcggcttgcttgtggctgcatcagggctcaacacgatgcttgaaggtaacggccagtacacgcttttggccccgaccaatgaggccttcgagaagatccctagtgagactttgaaccgtatcctgggcgacccagaagccctgagagacctgctgaacaaccacatcttggaagtcaggctatgtgtgctgaaagcatcgttgcggggctgtctgtagagaccctggagggcacgacactggaggtgggctgcagcggggacatgctcactatcaacgggaaggcgatcatctccaataaagacatcctagccaccaacggggttgatccacttacattgatgagctactcatcccagacttcagccaagacactatttgaattggctgcagagtctgatgtgtccacagccatttgacctttttcagacaagccggcctcggaaattcatctctctggaagtgaggcggttgaccctcctgggttcccctgaattctgtatttcaaagatgggaacccttccaattgatggcccttacaagggatttgctttggaaccacataatttaaagaccagctggcctctaagtatctgtaccatggacagaccctggaaactctgggcggcaaaaaaactgagagtttttgtttatcgtaatagcctttgcattgagaacagctgcatcgcggccccacgacaagagggggaggtacgggaccctgttcactgatggaccgggtgctgatcccccccaatggggactgtcatggatgtcctgaagggagacaatcgctttagcatgctggtagctgccatccagtctgcaggactgactggagaccctcaaccgggaaggagtctacacagtcttcgctcccacaaattgaagccttccgagccctgccaccaagagaacggagcagactcttgggagatgccaaggaacttgccaacatcctgaaataccacattggtgatggaaatcctggttagcggaggcatcggggccctggtgcggctaaagtctctccaaggtgacaagctggtaagttcagcttgaaaaacaaatgtggtgagtgttcaacaaggaaccctgttgccgagcctgacatcatggccacaaatggcgttggtccatgtcattcaccaatgtttctgcagcctccagccaacagacctcaggaaaagagggattgatcttgcagactttgcggtttgagatcttcaaacaagcattcagcgtttttccaggggcttcccaaaaggtctgtgcgactagcccctgtctatcaaaagtatttaagagaggatgaagcattagcttgaagcactacagggaggaatgcaccacgggcagctctccgccaatttctctcagatttccacacgagactgtttgaatgtttttcaaaacccaagtatcaccacttttaatgtaccatgggcccgcacccataaatgagatgtgaagccttgtgcatgtgggggagaagggaaaaagaatgtacttttttaaatccatgttcccccccctaaaccatggcttgttaacccacttgcaatgcaagaaacttgggatgtcacttgcctgacattcactttccaggagaggaccctatccccaaatgtggaattgacttgcctatggccaaggtcccctgaaaaagggagcttcaagtattgtggggcttcataaaacatgaatcaagcaatccagcctcatgggaagtcctggcacagtttttgtaaagcccttgcacagctgggagaaatggcatcattataagctatgaggttgaaatgttctgtcaaaatgtgtctcacatctacacgtgggcttggaggcttttatggggccctgtccaggtagaaaagaaatggtatgtagagcttagatgtccctattgtgacagagccatggtgtgtttgtaataataaaaccaaagaaacataaaaaaaaaaaaaaaaaa

SEQ ID NO: 4528 - DNA, 565 bp, Homo sapiens
  SIMILAR (2)..(178): 501254mologous to Homo sapiens Human secreted protein, SEQ ID NO: 7871,accession number AAG03790,Smith-Waterman Score=132.
tttttttttttaaagagacgtgatctggctgtcgcccagactggagtgcagtggggcgaccatggctcactgcagcctcaaattcctgggcgcaggcaatcctctgaccttagcttcctgaatagctgagaccacagacacatactatcatgctcagctacttttacttctttctagaggtctcactctgctgcccaggctggtctcgaaattctagccacaagcaatcctccagcctgagcctcccaaggtcctgggatttataggcgtgagtcaccacacctggcaaaaagcaactttttgtatatgcttaccagctaataacatcttgtcatgcttaaatatctatagtttcttttatcataaaacaaatcacaattttatcatgaaaacaaaccacaaacaaatataagactacgttataaaagtgaatgtgactcttcaaactgcagattccacctgctctgccggaccctggagcacacacttctcacaaagggagccatgaaatctgtgcttccaaatcactggtctaagcagccttcagctcctactcactcgtgcc

SEQ ID NO: 4529 - DNA, 813 bp, Homo sapiens
  SIMILAR (153)..(326): 611254mologous to Homo sapiens PRO2550,accession number AF130089,Smith-Waterman Score=170.
ccagactattttataattttaccatagagatgaggttctcactgtttgtccagggctgtctcaaaactcccttggctgaagtgatctgctcgtcttcgcttccgcaagtgctgggattacgaggcgtgagctacccacatgccctggcttccattgtctttgtgtgtgtgtgtgtgtgatggggttctgctcttgttgcccaggctggagtgcaatagcgcaatctcagctcactgcaacctctgcctccagagttcaagcaattctccttcctcagcctcccaagtagctggatctacaggcacccaccacctccattgtctttttacttgcccaagttaaaatcctgtggactgtgtactgggatctgggcctggcggttgttcatatttattggatcttgagtccagggcagtgtttttaagtgatatgagttagtagtgaaaattgaaaaggatattttacaaccaaatacaggttttctggtgtcttttgaaaaatccaaagatttggcaactcgacctaggctccgacaaaaccacagttgttgggagctgagccggagccagaactcacaattcaccgtggcccggccacccatcccctacactcccgtggggcttcctggaccaagcaccacgtggcatttcatcatggcttgctttgaagttgaatgttgttgggtgtttatctttaaagtacagcggaaggaaagaaaggggaagtatttccttagacccatgtctctggtccaaatagggcctttccatctgggcatttccggctccaattatatgacttgctgagttccca

SEQ ID NO: 4530 - DNA, 760 bp, Homo sapiens
  SIMILAR (7)..(219): 591254mologous to Homo sapiens Human secreted protein, SEQ ID NO: 7871,accession number AAG03790,Smith-Waterman Score=211.
gaccaggagtgcagtggtgtgatcacagctcactgcagccttgacctctctggctcaagcaattgtcccagctcagcctcccaagaagctgggactacacgcatgtgccaccatgtctgtctattttttattttttgtagagatgaggtctccctatgttgcccgggctggtctccaactcctggactcaagcaatcttcctgcctcagcctcccaaagtgctgggattacaggcatgagcctcacactgggctcagatttcatctttaaaacagacacgcggcacattaatttcttctatttggtcaaggtactccaagttttatgtaaccacccaaattagggcacctttaacctaaaaatgatatatttgatgttttagtgactgcaatacaaaatcacaatggtttcaaaaacatgttgctattttttcagcagctagaatgaaatgtgtttcatctcataatgtgatccataaagaagttaatctttttccatttgctgaaaagctgagccttttggattaaccatgtacatgcaaccagttggtagacaaaacacattttaaacttttggttactaagacattgataaataatcccagattaactcaatttctctgaagtctaattttcaaagttttcacaccattatcataattgagccttataataagcctatgagggtagggattattttctccatttttggaggaagcaacagagaattaatattcaaggaagatgatttaactcgtgcc

SEQ ID NO: 4531 - DNA, 604 bp, Homo sapiens
  SIMILAR (196)..(477): 431254mologous to Homo sapiens Human potassium channel K+ Hnov28,accession number AAY34129,Smith-Waterman Score=188.
cagtaatgtcctgggccttcacattcattcaccactcactcactgactcacccagagcaacttccagtcctccaagccccattcatgagggagaccaagacatcattgttttgaagtttctgaaagtgttgggaggcaaaaattcaggtgcctgggggagaaatggaaggccacaaggcagaagaagaggtgctagatgttctccgactgaacgtgggtggctgtatttacacagcccggcgggagtccttgtgccgcttcaaggactccatgttggcatctatgttcagtggtcgctttcctctaaaaacagatgagtcaggggcttgtgttattgaccgtgatggacgtctatttaaataccttttggattaccttcatggagaagttcagattcccacagatgagcaaacccgcatcgccctacaggaagaggctgattactttggcatcccttatccatacagcctgtctgaccatttggccaatgaaatggagacatattctttaaggctttaacagacttctgtgattcatatggcttagtctgcaataaaccaacagtttgggttctccactatcttaacacatctggtgcaagctg

SEQ ID NO: 4532 - DNA, 1024 bp, Homo sapiens
  SIMILAR (3)..(266): 741254mologous to Homo sapiens PRO2550,accession number AF130089,Smith-Waterman Score=298.
tgagatggagtttcactcttgttgcccaggctggagtgcaacgcgtgatcttggctcacgcacaacctccgcctcctgggttcaagcgattctcctgcctcagcctcccgagtagctggattacaggctcgcgccaccacgcttggctaatttttgtatttttagtagagacgggatttctccatgttggtcaggctggtctggaactcccaacctcaggtgatccgcctgcctcagcctcccaaagtgctaggattataggtgtgccactgtgcccaggtatttcaaggatttttgtacagcaaatggccttagaagacagagatagtatctccctaagattgtggttccttagccgtcatgcaaacctgcagtgtgtaacactttcctgggcctgccagttattgccctgtgggacttggagggcaagggagaccaaggctaacacactgcctgctgtgccctgagcagtagtctctgcccaagtaatcctgtgttttctgccagcattcatgaagctggctccctaacacaagaagttgttgaaagttctactcagcttcttagctgcctcttccagaatcagcaggtgcccttatgggaaaagtagctctaagtcccaggctcacttctcttgagtttccttcgtgtcctgaattttggttctatattgccagctgatgctttcagatagatgctgtttatattttgcacagcttttctagttgttctctatgttcagtgggtccaaatttcgtggtctaccattagtgaaagtggcagatggtgaaggcaattttcaactcaaaggtttcaaggccaccaaaaagagaaatccacatgtactgagaaagaaaagtcaagacctgtaagaagtgtcacaggtttcttaggtcacacatacaaaactgacccatatattcctgaaaatgaacagactgtttagtgccccagacccctgctatggataccctatttgaccttcaggcttagttccaaagccagctatatcttttctcgtgcc

SEQ ID NO: 4533 - DNA, 784 bp, Homo sapiens
  SIMILAR (151)..(345): 1001254mologous to Homo sapiens Human RalGDS (hRalGDS) protein,accession number AAB23176,Smith-Waterman Score=332.
  misc_feature (1)...(784): n = a,t,c or g
atgcgacttttggagctgataacctttttctgctagagatactcagtcctgcctcttgccacaagctgctgagggctcggggttccatctgagctccaggagattcgtgtgctgccactgactgtctgtccctcctctgtcccaccccagtatgagaatgagtcggccctgaacctttatgagacttgcaaggtgcggaccgtgaaggctggcacgctggagaagctggtagagcacctggtgccagccttccagggcagcgacctctcctacgtcaccatcttcctgtgtacctatagagccttcaccaccacccaacaggtcctggacctgctgttcaaaaggtgagcatgagccctccactgcacagggtgcacaggggccctcgnnnnnnnnnnnnacctggcatgcgggtctttggcaatggctgattcancctctctgagctctcgctttgctcatatgaaagagaaactggagtgctaagaaggacctcattgcggttgctaccatgccctcgggcggattgaaggcgttgaaaggtggctccctccacggcctggcctcttgtaggaatgggctgcagggcttgcgggcttgtttttattaatttctgttcccctatgggaagctcttgccccagctctttctgtttgggcctttgtgcgagcagtttccatttgcagaggaatctggtttattatgggtgcgtggagggccaagggcgtccaatcttgggaaggtcggtgggcttttctccacaaatataaacccctcggcgccg

SEQ ID NO: 4534 - DNA, 483 bp, Homo sapiens
  SIMILAR (220)..(393): 741254mologous to Homo sapiens Ral guanine nucleotide dissociation stimulator,accession number U14417,Smith-Waterman Score=218.
ccctctgccagctcaggccaagccggggggttctggagtcagtccctgtttaaacaagagtcatcaggttttgtgaggacctcagcagagtctgtcctcaggcaggagtcattgagaggggtccttggagttctggagctgtattggaggggatctgaggtctgtggctcaagacagtccttgtatgggctctcaagcggtaggggtatcctgcagggcccccaggagcatccctgatcacccctctgcccctccccaccagagctgaagatccctgaaaacgccaacgtcttctatgccatgaactctactgccaactatgactttgtcctgaagaagcggaccttcaccaagggagtgaaggtcaagcacggagccagcttcacccttccttcgcatgaagcagaaaggactcaagattgccaagggcatcttctgagggcatcctcccagggtctggctggctggtagccaagcacttat

SEQ ID NO: 4535 - DNA, 812 bp, Homo sapiens
  SIMILAR (155)..(349): 951254mologous to Homo sapiens Human RalGDS (hRalGDS) protein,accession number AAB23176,Smith-Waterman Score=319.
tgaaattctacttttaaagctgataacctttttctgctagagatactcagtcctgcctcttgccacaagctgctgagggctcggggttccatctgagctccaggagattcgtgtgctgccactgactgtctgtccctcctctgtcccaccccagtatgagaatgagtcggccctgaacctttatgagacttgcaaggtgcggaccgtgaaggctggcacgctggagaagctggtagagcacctggtgccagccttccagggcagcgacctctcctacgtcaccatcttcctgtgtacctatagagccttcagcgccagccaacaggtcctggacctgctgttcaaaaggtgagcatgagccctccactgcacagggtgcacaaggggccctcgcccccacccccacctggctgcgggtcttggcaatgctgaatcacctctctgagcctcgctttgctcatatgaaagagaaactggagtgctaagaagacctcatgggggtggcaccatgcctgggcgggatgaagcggggaaagggcttccttaacgcctggccctggaaggaatgggctgccggggctggggggcgtcgttttaagaatttcctggcccccatggggaggctctctgccccaagcctctcttgtatgtggccctgggccgagcaggtttccacttgtcaggagaatcgaatctatctggggctgttgagggaccaaagggcgctacatactgggaaggactgttggacttatcattggacatttattgaagactactggggctgcccttttagcattaaatattgagaa

SEQ ID NO: 4536 - DNA, 4132 bp, Homo sapiens
  SIMILAR (2725)..(3189): 761254mologous to Homo sapiens ral guanine nucleotide dissociation stimulator,accession number AF295773,Smith-Waterman Score=530.
  misc_feature (1)...(4132): n = a,t,c or g
atggtgcagcgcatgtgggccgaggcggccgggcctgctggcggcgccgagccgctgtttccgggctcccggcggagccgcagcgtgtgggacgccgtgcgcctggaggtgggcgtccccgacagctgcccggtggtgctgcacagcttcacgcagctagaccccgacctgccgcgcccggaggtgggtgggggtcggggccttctgcagaaatcagccagcagggtgggcagtgggggctgccgccgcgccccgtccaacagtagggaccacggctggggttttgcgcccctcaataccgttccagggcctgctgtcaccaaggccgctgcagcccaggtggacctttttctgcggcactgtccctgtttacatcggtggcctgtgccttatttcactcagttcccacccagggcccgcagcgcgtcgttagcctttacgatgcaggctgtaggtctgtgcagccgccagtctgtgccctatctgggaaacaggttacacaggtgcatcccctgcacggtggccaggcaggcccttgacgtccccgcgcccggctgccgggcgttgtcttcacagagctccacgcaggagatcggtgaggagctgatcaacggagtcatctactccatctccctgcgcaaggtgcagctgcaccacggcaggcaacaaggggcagcgctggctcgggtatgagaatgagtcggccctgaacctttatgagacttgcaaggtgcggaccgtgaaggctggcacgctggagaagctggtggagcacctggtgccagccttccagggcagcgacctctcctacgtcaccatcttcctgtgtacctatagagccttcaccaccacccaacaggtcctggacctgctgttcaaaaggtacggtagatgtgacgccctcacggcctcctctaaatacggctgcatcctcccctattccgacgaggatggtggaccccaggaccaacttaaaaatgccatctcctccatcctgggcacctggctggaccagtactcggaggatttctgtcaacctccggactttccctgcctcaagcagctggtggcctacgtgcagctcaacatgccaggctcagacctggagcaccgtgcccactttctcctggcccatctggagcactcggaacccattgaggcagagcctgagggtgaggaggactgggctctgtcaccagtgccagctctaaaaccaactccagagctcgagctagctctaacaccagctcgagcacccagcccagtgccggctccagccccggagccaaaaaccaactccaacttcagtttcaggttcaaagctagaagaaactccggcaccagctccggagctccggcgggctccatagccagctgtgggactagaatcggctccagcgccagctctggaactagagccagctccagaacaggatccagctccctcacaaactctagagctggagccagctccagcaccagttccatcattacagccttcctggccttcacctgtggttgcaaagaacgggctgagtgaggaaaagcctcacctcttggtgttccctccagatctggtggcagagcagtttacactgatggatgccgaactggtcaaaaaagaggggccctaccactggccgggcttcatctggtcccagcgggacaagaagggcaaggagctcctggcgcccacgcatccgcgccactgtcacccagttcaacagtgtggccaacatatgtcatcaccacctgcctcgggaaccgaagcacgaaagccccagacagggccagggtggtggagcactggatcgaggtggccagggagtgccggatcctcaagaacttctcgtcactgtatgccatcctctctgccctgcagagcaactccatccaccgtctgaagaagacgtgggaagacgtttccagggacagtttccggatctttcagaagctgtcagagatcttctcagatgagaacaactactcattgagccgggagctgctcatcaaggagggcacctccaagtttgcgcaccctggagatgaaccccaagagagcccataaacggccgaaggagacgggcatcatccagggcaccgttccctacctgggcacgttcctcaccgacctggtgatgctggacactgccatgaaggactatctgtatggcagactcatcaactttgagaagaggaggaaggagttcgaggtgatcgcccagatcaagctgctgcagtcggcctgcaacaactacagcatcgcgccagatgagcaatttggggcctggttccgggccgtggagcggctcagcgagactgagagctacaacctgtcggtgcgagcttggagcccccatccgagtcagccagcaacaccctcaggaccaagaagaacacagccattgttcaagcgctggagcgaccgccaggccccccagcattgagctcagttaccagtgggcagttcccacttccaagttcctgttgaccagttcaggtgttgggcccttacttcagcagcggggacatcgctgacgcgctcagcgtgcactcggccggctcctctagctccgacgtggaggagatcaacattcagcttcgtcccggagtcttcctgatggccagggaaaaagaagttctggggaattcagccttcaaaagttattccccggagacctccggcatcagctcaggcctccagcagcacctcgttctccttaagcctccaccacgcccgtggctgccacacgcacccacaagcgctctgtctcagggctctgcaactccagctccgcgctgccgctctacaaccagcaggtggggcgactggttgtaatcatccgcgtcagctgggacgtgggacaatgggcaacatgttacaagagcatcctggggtgaccagccaagataaggctccggctgtaattccgcaaggccatggacaaacacaacctggaggaggaggagccggaaggacttatgagctgctgcagattctctcagatgaccggaagcttgaagatccctgaaaacgccaacgtcttctatgccatgaactctactgccaactatgactttgtcctgaagaagcggaccttcaccaagggagtgaaggtcaagcacggagccagctccaccctccctcgcatgaagcagaaaggactcaagattgccaagggcatcttctgagggcatcctcccagggtctggctggctggtagccaagcacttatggaccagagtggcccaggccagctgggcgccttcctcccaccttgccagcccagggtaccccagactccagtttcatccttgaacctctcccgctgcttgggatttgacgcctgccatttggtcaggctgaacttgggcctcccgtggaaccaactcgcttgccttaaggtggccttctggctctctggaaccagaggactagctgactttttggcaaaggaagcagtgccaacggggnatggcatgggtgccctgcctgcccccgggcgccacctctgtacacttccctgacaccttcccaggtgtgggtcactgccaccttgtgcccatgggcaccccagagcacccactgtgaccactcagtgttcctttnntcccttnnccaaagttagggnccccncccaccagggcactggcctgtggaacctttcgcaggggtcccgggcccttcccaccattttagccttttttcagggttgcaccaaaagatttccatcattcagggcccaactgagaagtgagggagtctcaccccaccgcttacccccagccctcccctggggagcagagaggagaaaccctcttcatgggaccagactcttgcacccggtgagtgagggacagtcccagctgagtcccatcgatgtttgaatctcatggccattgcaagtgccattcagccactgcgtcctgggctttacgagaccatcgcaagacggggggttagtgaggaaggaggatttgggggtgtggtggttggggtgattgaatattttgtataaaaagcaaaaagaaaaaaaaaatgtttgtttactgattggggaggggcaatatttatttgttgtaaatagcaaatgctagacttgaatattatattaaaatcctgtttctacta

SEQ ID NO: 4537 - DNA, 435 bp, Homo sapiens
  SIMILAR (1)..(294): 961254mologous to Mus musculus putative,accession number AK005033,Smith-Waterman Score=501.
  misc_feature (1)...(435): n = a,t,c or g
gaaaaaattaataaaattaggtggttaccacaacagaatgctgctcattttctactgggtacaaatgataaggctataaaattatggaaaataagtgaacgggataaaaaagcagaaggttataacctgaaagacgaagatggaagacttcgagacccatttaggatcacggcgctacgggtcccaatattgaagcccatggatcttatggtagaagcgagtccacggcgaatttttgcaaatgctcacacatatcatataaattccatttcagtaaatagtgatcatgaaactcccagacatcgtggacatcaagcctgctaacatggaggagctgaccgaagtcatcactgcagccgagttccacccgcaccagtgcaacgtgttcgtctacagcagtagcaaagggaccatccgcctgtgtgacatgcgctn

SEQ ID NO: 4538 - DNA, 397 bp, Homo sapiens
  SIMILAR (220)..(396): 671254mologous to Rattus norvegicus B regulatory subunit of protein phosphatase 2A,accession number D14419,Smith-Waterman Score =174.
gggaagacttggaatagaccagtattccattttgtagcatattttcataactctgcgtaattggttatttgggggtattgcctgtacagaattattacttagccatgaatataaacttgtcctctttcgttatctactataagtgttctaattatgtgctgctgtgatctttgttttgaattcctatttccttccatttttaggtcccaatattgaagcccatgggatcttatgggtaggaagcgagtccacgggcgaatttttgcaaatgctcacacatatcatattaaattccattttcagtaaatagtgatcatggaaacatatctttctgcagatgacctgagaattaatttatggcacttagaaatcacagatagaagctttaacatcgtgg

SEQ ID NO: 4539 - DNA, 2090 bp, Homo sapiens
  SIMILAR (227)..(319): 541254mologous to Rattus norvegicus protein phosphatase 2A B regulatory subunit delta isoform,accession number AF180350,Smith- Waterman Score=80.
  misc_feature (1)...(2090): n = a,t,c or g
cccttgaggagctggttgcctcgcctccctgattctcaagcggacatcatttccaccgttgagtttaattactctggagaccttcttgcaacagggacaagggcggcagagttgttatttttcagcgtgaacaagaggtactggcccagccccgccgtcctgccctgccatgaagtgtgagcagctttctcagcacttcctgcagagaagtctggcaggggtgtgaattctctcttcccttcagggagagaataaaaggcgccctcattctaggggagaatataatgtttacagcaagcttttcaaagtcatggaaccgggggttttgactatttgaaaagtctagaaattgaggaaaaaattaataaaattaggtggttaccacaacagaatgctgctcattttctactgtctacaaatgataaaactataaaattatggaaaataagtgaacgggataaaagagcagaaggttataacctgaaagacgaagatggaagacttcgagacccatttaggatcacggcgctacgggtcccaatattgaagcccatggatcttatggtagaagcgagtccacggcgaatttttgcaaatgctcacacatatcatataaattccatttcagtaaatagtgatcatggaaacatatctttctgccagatgacctggaggaattaatttatgggcacttaggaaatcacaggtaggaagcttttaacatcgtggacatccaagcctgctaacatggaggagctgaccgaagtcatcactgcagccgagttccacccgcaccagtgcaacgttgttccgtctacagcagtagcaaagggaccatccgcctgtgtgacatgcgcctcttcggccctgtgcgacagacactccaaagtttttttgaagagcctgaagatcccaagcaagtaggtccttcttctcaggaaataatttcatccatatcccgatgtaaaattccagtcatagtggggcggtacatggatgaccagaggattacctgttcggtggaaggtgtggggaccttcaacatgggaggaggcagggccggtgggaggacccaccagggtccacgagtacctggcgcacaaagcttctgctctctctaatgagaacgactgcatcttttgacaagttttgagtgttgctggaacggtttcggatagcgccatcatgaccgggtcctataacaacttcttcaggatgtttgatagagacacgcggagggatgtgaccctgggaggcctcgagagagagcagcaaaccgcgcgccagcctcaaaccccggaaggtgtgtacggggggtaagcggaggaaagacgagatcagtgtggacagtctggacttcaacagagaagatcttgcacacagcctggcaccccgttggacaatgttatttgccgtggctggccaccaataaacttgtacatattccaggacaaaatcaactagagacgcgaacgtgaggaccaagtcttgtcttgcatagttaagccggacatttttctgtcagagaaaaggcatcattgtccgctccattaagaacagtgacgcacctgctacttcccttcacagacacaggagaaagccgcctccgctggaggcccggtgtggttccgcctcggcgaggcgcgagacaggcgctgctgctcacgtggagacggctcctcggaagcagaagttgacgggacacttgctcccaaaaagggtcatttacctcatgaataaatggtatttatttcaggtccggagcctttcctttcccaaatttataggaccaaaaaattaaacatccaatgagaaaaagttattgtcagatacgcttctttctcccaactttccctctttctctggcgatcacacttggggccttcactgcagcgtgggtgtggccaccgtccggtgtcctctcggcccttccctccagagtccaggtggatctcttgtggaatgtgtggattgtggcccaagcaagngctcaggcggccccactcacccaacaggcatccgcccgccaccccttcgggtgtgagcgctcaaataaaaacacacacactataaaggtgtttttaaatcca

SEQ ID NO: 4540 - DNA, 443 bp, Homo sapiens
ttttttgtgcttgttttattggaagcaagactccagccagctgcagggctcaggggaggaggcctggagagttcagtcctgggtctccctctgggccagcagggggaaaaggggtgttaaaagagctagaaccctcagagatgctcctctgaagcaggggaaagaaaactagaaaggaaaactgtcccagggcggggagcggaatatgggcccccacatctcagactctcctaccctcaagcagttaattctcaccccctgccttcctctgtcaacggtgggggtgattccaataactcttctcagcttccagaatcccactgtccaccattctcccccaaagaaggtcccagaaaaggtgaagttccgtgtcttcacgcaacacgggcataagcagcaattatcgcacgaagtttccctagggtggtcggggatcctctcct

SEQ ID NO: 4541 - DNA, 297 bp, Homo sapiens
  SIMILAR (180)..(58): 1001254mologous to Homo sapiens Human secreted protein sequence encoded by gene 15 SEQ ID NO:76,accession number AAB24451,Smith-Waterman Score=204.
tcactcctcggtcctccggagcccacaacctggacacagctcctcaagacaggtagcatggaccatgctgagggcgatgaaggaaaagacggccatcactgtgaacatgacagtgggaattagcatcaccaccgccgagccaatgttcgttccgaagaaggagatggtagcaatccagccgctgcaggaagaggccagtgtggggccaactcctgagctcttatcaggaagctgccgatcaccaatttcaggtatttctatcttgggaaactgcccttccctggcaccactgaccat

SEQ ID NO: 4542 - DNA, 842 bp, Homo sapiens
  SIMILAR (115)..(513): 301254mologous to Homo sapiens Human potassium channel K+ Hnov28,accession number AAY34129,Smith-Waterman Score=149.
ccgcagagggagaccaagacatcattgttttgaagtttctgaaagtgttgggaggcaaaaattcaggtgcctgggggagaaatggaaggccacaaggcagaagaagaggtgctagatgttctccgactgaacgtgggtggctgtatttacacagcccggcgggagtccttgtgccgattcaaggactacaatgtggcatctatgttcagtggtcgctttcctctacaaacagatgagtcaggggcttgtgttattgaccgtgatggacgtctatttaaataccttttgcattacccttcatggagaagttcagaattcccacagatgagggatacccggggtcgccctacagggaagagggctgattactttggcatcccttatccatacagcctgtctgaccatttggccaatgaaatggagacatattctttaaggtcaaatatagaacttaaaaaggctttaacagacttctgtgattcatatggcttagtctgcaataaaccaacagtttgggttctccactatccttaacacacctggtgcaagctgtgagagtagaattattggtgtatatgccacaaaaactgatggaacagacgctattgaaaagcagctgggaggaagaattcacagcaaaggcatttttaaaagagaggcgggaaataatgttcagtacatttggagctattattcagtagcagagttgaagaaaatgatggatgcctttgatgcttgggaaggaaaaggtgttagctactggcgggtgcctcatgagctgatagagtgttggactctagaagaacggcctttacttggaagcctgcgtcacatggctccat

SEQ ID NO: 4543 - DNA, 1007 bp, Homo sapiens
  SIMILAR (15)..(287): 861254mologous to Homo sapiens unnamed protein product,accession number AK000381,Smith-Waterman Score=408.
ggcacgagctgattctatcccctgggcccacgcagggtcagacgcctgacgaagcgggcgttattattagggtacttaagaacgtgcccgacctcgccattctaaattccaaggacgcgctggatccgcgacagcccggctaccagcccccgaatccccatcctggtccctcgtccccgccagccgcgccagcgtccaagaggagcctaggggaacccgcagctggagaatgcttcgcgaagcgatcgcaacccgagccaggggttgcggacgaggatcagacggcctgaaactccggactgtgggccacctagtccggcaggatcttccgccagcgcctccaccttcagatgtacctccagcctttcactcctcgggtcctccggagcccacaacctggacacagctcctcaagacaggtagcatggaccttaaggcgacaagagaggggccccaggagtggcaggagaggatcccgaccaaccctagggaaacttcgtgcgataattgctgcttatgcccgtgttgccgtgaagacacggaacttcaccttttctgggaccttctttgggggaggaatggtggaacagtcgggattctggaaaactttgtttgggcacccccaagggttaaagccaccccagcattcacgaagagcacctgaaagtatggaagctgagaagagttattggaatcaccccccaccgttgacagaggaaaggcaggggggtgagaattaactgcttgagggtagcgagagtctgagatgtgggggccctattaccgctccccgccctgggacagttttcctttcttagttttctttcccctgcttcagaggagcatctctggagggttctaagctcttttaacaccccttttccccctgctggcccagagggaggacccagggacttgaactctccagggcctcctccccttgagccctgcagctggctgggagtcttgcttccaattaaaacaagcccaaaaatgaaaaaaaaaaa

SEQ ID NO: 4544 - DNA, 702 bp, Homo sapiens
  SIMILAR (46)..(531): 971254mologous to Escherichia coli phosphotransferase enzyme IIABC-Asc,accession number U29579,Smith-Waterman Score=809.
atggtcgcggcatctgccgccatcaaatttaaaaccaatatgtcgctggcgattgccatcgcgggtgaacatgtcgaatttgccctgattccggtcaccgcggtgaaatacacctacacggtgatcccggcgctggtgatgacctggtgcctgtcatatatcgaacgctgggtggacagcattacaccggcggtgaccaaaaacttcctcaaaccaatgctgattgtgttgattgccgcaccgctggcaatcctgctgattggcccgattggtatctggatcggtagcgccatttcggcgctggtttacaccattcatggttatctgggctggctttcagtcgccattatgggcgcgctgtggcctctgctggtaatgaccgggatgcaccgcgtctttacgccaaccatcattcagaccattgccgaaaccggcaaagaagggatggtcatgccgtcagagatcggcgctaacctgtcgctgggcggttcatcactggcagtggcgtggaaaacgaaaaacccggaactgcatttggacaccccccacactgagtccccaaccccccatgactcaaattcacaccgccctcaactgcaggcgtttataacagaagcaaagctaaatctaccgacaaggacaatgaccagacaagatggggaaactggagatggagccaaagaaaatattgtttacctctaa

SEQ ID NO: 4545 - DNA, 777 bp, Homo sapiens
  SIMILAR (142)..(438): 601254mologous to Homo sapiens unnamed protein product,accession number AK025470,Smith-Waterman Score=281.
cctttttcagcaatagcagcggtttaagatcccatgaacagtaacccatatttagtcacaggagacatttgtgcacacaatcgaacatatcttaatgatattgatgaatgattttgacacctattatgttcctttctcattgggcttggccattctgtggctgactatatgggcactgcatttcctaatcttagagagctctaacgccaagacatctgccttgtacatctcaggtggcctcctgtaacctgtgctgtctgtttcttgcagatttggacaccctcccacactgagtccccaaccccccatgactcaaattcacaccgccctcaactgcaggcgtttataacagaagcaaagctaaatctaccgacaaggacaatgaccagacaagatggggaaactggagatggagccaaagaaaatattgtttacctctaattgtgttgtcatttttccaaacaaaacaaaacactggcacttttgggagaaactttttgtctccattccttatgtatgtgtgattgtctgtgtccaaattgctttaagaataatatttaatatttcctggaagctcatttttttggcatgagtctaattaaattattgaaagccaccctgtttgtataatctttaacttatcaaatctaatttcagatttctggaggagaaactaacttgaataagcaggactattttaaaagttgttttgacgctagagtaaaattccatgtcacattttctacccaatcatctggatttcaagattccttttaa

SEQ ID NO: 4546 - DNA, 940 bp, Homo sapiens
  SIMILAR (2)..(559): 561254mologous to Mus musculus Rho-guanine nucleotide exchange factor,accession number U73199,Smith-Waterman Score=485.
tgtgccccagttcaagcccaagctccaccaggagaacggccctgggttggccaggtgtgaccatcaacaaggggcccagccgaccagggagacctggctgcaggaccgggaccgggagttccagtcgcagacgaagtttctcctccggagccgggtctagctggtcctccagctccaggagtcccagcacagcctggagcggctgagggagggccagcgcctggtggagagggagcaggcgaggatgcgggcccagcagagcctgctgggccactggaagcacggccggcagaggagcctgcccgcggtgctccttccgggtggccccgaggtaatggaacttaatcgatctgagagtttatgtcatgaaaactcattcttcatcaatgaagctttagtacaaatgtcatttaacactttcaccaaactgaatccatcagttatccatcaggatgccacttaccctacaactcaatctcattctgacttggtgaggactagtgaacatcaagtagacctcaaggtggacccttcttcagccttcgaatgtcagtcacaaactgtggacagccgctggttccggccatcagatacttcctttccatgaaagcagcaaggactcttgtaaaaatgatttggacacctcccacactgagtccccaaccccccatgactcaaattcacaccgccctcaactgcaggcgtttataacagaagcaaagctaaatctaccgacaaggacaatgaccagacaagatggggaaactggagatggagccaaagaaaatattgtttacctctaattgtgttgtcatttttccaaacaaaacaaaacactggcacttttgggagaaactttttgtctccattccttatgtatgtgtgattgtctgtgtccaaattgctttaagaataatatttaatatttcctggaagctca

SEQ ID NO: 4547 - DNA, 483 bp, Homo sapiens; identical to SEQ ID NO: 2213
  SIMILAR (421)..(326): 871254mologous to Homo sapiens Human secreted protein, SEQ ID NO: 4473,accession number AAG00392,Smith-Waterman Score=147.

SEQ ID NO: 4548 - DNA, 6335 bp, Homo sapiens
  SIMILAR (1189)..(1509): 501254mologous to Homo sapiens Human myelin oligodendrocyte glycoprotein gene,accession number AAZ29204,Smith-Waterman Score= 210.
tttgttttattttttattttattttattttattttgagacagagtctcgctctgtcgcccaggctggagtgcagtggcgccatctcgactcactgcaagctccgcctcccgggttcacgccattcacaaattttcaatagaatgtttagtagtcacccaaagatgatttagtgtaataatgaacaactagaacataaaagaaaaaatttccatttacactagtatcaaaaaaggtcaaacacatagcaacaaatgtaacaaaatgtgtaagacctctacagtaaaaaccataaaacactgctaggataaattttaaaagacctaatggagagtgaaaatatgctcatggatctgaaacttgaaactgttaatatgaccattcttcctaaattagtttctagatttaccacaatcccaatcaagcatttttagtagcaatagataagttgattctaaaatgtctacgaaaatgcaaaggacccctaattgccaaagcaaccatcaacagaagaataaaggtggaaaacgtgatttcaggcaacatgatgtcacttactataaagcagcaataatcaaaataatgtggtattgacataagggtggacatataaatcactggaacagaattgagagtccaaaagtagatccacatacatatggccaattgcttttcatgagggcgttaagataattcaatgggggaaaagacagtcttatcatcaaaaggtactggaacaacaggatgtttgtagaaaaaaaattaaacttgacacttgcctcacaccatatacaaaaacttaaatctagaatacatagagaaccataataacacaacccaattaaaatatgggcaagaacaacaaaaaatatcaggtaagaatcacttgctagaaatagttttacttcaaagctaaagtttatggctagttataaaaaatgacatccctggccgggtgtggtggctcacgcttgtaatcccaacactttgggaggccaaggcaggaagatcacttgaggtcaagagttcaagaccagcctggccaacatggcaaaacccagtctctactacaagtacaaaaattagccaggcatggtggcacacgcctgtaaccccagctactcaggaggctggggcacaagaatctcttgaacctgaggggcgcaggcttgtagtgagccgagatcatgccactgcactccagcctgggctacagagtgagactctgtctaaaaaaagaacaaaacaaacaaaaaagaccaggcgcggtggctcacgcctgtaatcccagcactttgggaggccaaggtgggcagatcacgaggtcaagagatcaagaccatcctggctaacatggtgaaatcccgtctctactaaaaatataaaaattagctgggcgtggtggcacaaacctgtagtcccagctactcaggaggctgaggcaggagaatcgtttgaacctgggaagcggaggttgcagtgagccgagattgcaccactgcactccagcctggtgacagagcaagactccgtctcaaaaaaaaaaaataataataataatagctaaatactggaaacaaccaatattccatcaacaggagaatgaataaacaaattgtggtatagctatacaatccaatactatgcagcaataaaaattgaatcaatcactgatacacataacatgcaaggatgaagctcaaaaacattacactgaacaaaagaggccagacacaacagtatgtctgagtccatttacatgaaattctaggaaaggtagaatatcctacagtgtagagaacacaataataagaaaacaaacaacctgatttaaaaataggcaaaccaagagtagtagtgtgtgcctgtagtcccaactacttgggaggctgaggcgggaggatcccctaagcccaggagctcaagacctgcctgggcaacatagcaagactctgtctcaaaaaaaaaaaaaaataaatgggcaaaagatataaacagaaaactaaccaaagaggtatacagatggcaaataagcacatgaaaatcatttgttgcctgtggctggggtagggataggtactgaaggtaaatgggtacaaggggactttttagttgacgaaaattcactatattttgcttacagtggaagttaaacaggtttatacattagtcaaaattcatagaactggactttaagttgtgtgcatttgtttgtgtatgcattctaactcaatatacttaactataaaaaaagaatgaaaacaaaatttactcaagaaagaaagtaacaggccaagataacttccctagtgaattctaataaatatttaaggacgacataagttttaaaaaaaatcaatcttactcaaactaaagcataaaaaagaggaaatacttcacagttcattttataaagtcaacataactttgaggcctaaacctgacaaggacattacaaaaaagtaaaattacaggccgatctgtctcatgaacatagatgcaaaattcctaaacaaaatattagcaaactgaattcagcacgaaatagaatgaataaaacatcacaaccaaaccgaaattatttcaggaatgtaagattattttttcattcaaaaattaagcaacataatttagcacattaacaaaagaatggagaaaaatcaagtgatcatcaaaatcaatgcaggaaagcatttgacaaaattcaacaccaatttaggattttaaaaatttaggcaattttggccaggcgcagtggctcatacctgtaatcccagcactctgggggaggctgaggcgggcagatcacatgaggccaggagtttgagaccagcctggccaatgtggcaaaaccctgtctctactaaaaatacaaaaattagccatgcttggtggtgcacgtctataatcccagttacttgggaggctgaggcataagaatcgcttgaacctgggaggtgcaggtaggagtgagctgagatcctgccactaaatctcagaaagctattttgtaaatactgacaaggtgattccaaaatttacagtcatgtgctacataacaatgtttgggtcaagagaccactcacatatgaagatggtcccataagattataatgaagctgaaaaatcctgcaacctagggatgtcatagctgacagaaggtcaagtgcaaagcattactcacatgtttgtggaggtgctggtataaataaacctactgtgctgccagctgtataaaagtctagcatatacaattatgtacagtacatacttgataataaacaactacgttactggcttatttattttattgtactacattttatattgttattttagagtactcctacttacatataaaaaaaaagttaactgttaaatagcctcaggcaggtctttcaggaggtattccagaagaaggcatgttaggagataacagctccatgtccgttactgccccgaagaccttccagtgggacatgatgtggaggcggaagggattgatactgataatcctggctctgtgtaggcctagtaagtaatgtgtttgcttctgtctcaatttttaacaaaagtttaaaaacttaaaaatattttttaacagaaaaaagcgtataggccaggcgcggtggctcacacctgtaatcctagcacttttgaaggccgaggcgggtggatcacttgagatcaggagatcgagaccaccctggctaacacggtgaaaccccgtctctactaaaaaaatacaaaaagttagccgggcgtggtggtgggtgcctgtagtcccagctactcgggaggctgaggcaggagaatggtgcgaacccgggaggcggagcttgcagtgagcccagatggcgccactgcactccagcctgggcaatagagtgagactccgtctcaaaaaaaaaaaaaaaaaaaaaaaaagaaaagggccgggtgcagtggctcacgcctgtaatccctcgggcagatcatgaagtcgggaaatcgagatcacggtgaaaccccatctctactaaaaatacaaaaaaattagctgggtgtggtggtgggtgcctgtagtcccagctactcgggaggctgaggcaggagaatggggtgaacctgggaggcggagcttgcagtgagcagagactcgcgccactgcactccagcctgggcgacagagcgagactcagtctcaaaaaaaaaaaagaaaaaagaaaagaaaagagcttatagaataaggatacaaagtaaaaagccagatgtggcagctcacacctgcaatcctagcacttggggagattgaggcaggaggactgtttgagcccaggcgtgtgaaactggcctggccagcgcaggaagaacttgtctctacaaaaaatacaaaaattagctgggtgtggtggcgtgcacctgtggtcccagctactcaagaggctgaggtgggaggatcactggagctagagaggtcaaggctgcagtgacccatgatcgcgtcactgtactccagcctggatgacagagcaagaccctgtctcaaaaaaattaaaaaaaaaatacattgagagacagagataccaccaacatatgaaacacccatggagcactaagattcagtatgtatgtatggatggatgacacagatcagtagagaaacagataatacaaacattgtgtatgtttgtattcacacacacatattgaggccagctatgggggaggggtgagagagagagtggctcaaaaagaactagaacaagggatacacaaaaagatagaataaaaactcagtgtcataaatatgtcagtggcagaaccggagagagtaatcaagagaaaaagcatgtagcagaaaaagaaactgtacatcaaaaatgaaagcacccaagccaggagatccaggcggtagtgacttattgactacttacctccctggagaagcagcaagaccactactcctgcaatagatgggtggaaagagaaatctgttgagccaaacctggttctgctgtcccagataatggcagtgaaaatgtgggtgtgctcacatacaagatagagccacacttcatctgggctccccagccacagctgctgtggtttctttttttttttttttttttggagacggagtctcgctctgtcaccccaggctggagtgcagtggcgggatctcggctcactgcaagctccgccacccgggttcacgccattctcctgcctcagcctcccaagtagctgggactacaggcgcccgccactacgcctggctaattttttttttttttttttttttttttttttttttagtagaagacggggtttcaccgttttagccaggatgggtctcgatatcctgacctcgtgatccgcccgcctcggcctcccaaaagtgctgggatttacaggcgtgagccaccgcgcccggccctattttttgaaatccatatccatcttaaactcattgaatattcaaatatgaggcttgggaaaacccacagcacagctggggcatggaaaatgggcttgttaagacaagctgattcaactaggggggaaaaaagaggagggaagaaggcggcaattatatgtgtgaaatccccacctggatatcaggttgtagctgtttggaagtaccacagctcattgggagtatttgaattcaagaaaacttgcgtttcaatgatggggagacatgatacagaaaaaaaaatgtcctgggaaagaccctaacagtttgtaataatgtatcctactgacaatgccattgaggtggcggttctggttaagccctgggaaactgaaatctctgctgacctatttttactttgatctaaaaagaattcaatacaattctttaacagtacataaaactacaattgcaaaagaaaatggcagaaaaaaatgtcccgggaaagaccttaacagtttctaataatgtattctactgacaatgcattgaggtggcggttctggttattccctgttaaactgaaatctctgccaacctatttttactgtgatctaaaaagaattcagtacaattctttaacagtacataaaactaaaattgcaaaagaaaatgaaacttcctaaatagtcaaagttctaagccgtcaggctactagttgaccagaacttgagcaagataaaaagttatttctgatggggtaggtaggtcacatgctgtgagcggctcaacaccattgaccctgcaaaagcgttatgacctaagaagcacgttcttcacacccacctccccccgccccgcccccgggcccccaggttttgacatctcatggtaccactgtgggttacacgtattaacattaagcagaggaatgtactc

SEQ ID NO: 4549 - DNA, 106 bp, Homo sapiens
  misc_feature (1)...(106): n = a,t,c or g
gatattttgtagtagtatagtaatcgtgttatgtagtacagttttaaacgctataaatggaattttgtgtaaattcacaaaaatgtgatataaacagcgnctaaga

SEQ ID NO: 4550 - DNA, 384 bp, Homo sapiens
  SIMILAR (72)..(254): 851254mologous to Homo sapiens BTB/POZ domain containing 1 protein,accession number AF257241,Smith-Waterman Score=271.
taagggctttatattattttctatagtttgctttatttggtttaacttaaatgtaacttgtctcttaaaaattacagatcattgaatatgagaaaaagcaaaccctgggacagaatgataccggctttatttgtgatgggacagctaacacattcagggtcatgttcaaggaacccatagagatcctgcccaatgtgtgctacacagcatgtgcaacactcaaagtaagagtcatgcactatgttccagatggtttcctcttgaatgttgcagaatgtgtgttttagaagctgagagtcactgacagctgagccatttataaagaggggggaaaagaagctgggagctaaaatattccactgccttccgaaaagaagtacttct

SEQ ID NO: 4551 - DNA, 1726 bp, Homo sapiens
  SIMILAR (599)..(1714): 591254mologous to Drosophila melanogaster BcDNA.GM12270,accession number AF172635,Smith-Waterman Score=1102.
ggccctcccgagaaagggaagtgcattctcgcttccgtagcggtctccgccggttgggggaaagtaattccggctgttgcaccatggcgtccatggggaccctcgccttcgatgaatatgggcgccctttcctcatcatcaaggatcaggaccgcaagtcccgtcttatgggacttgaggccctcaagtctcatataatggcagcaaaggctgtagcaaatacaatgagaacatcacttggaccaaatgggcttgataagatgatggtggataaggatggggatgtgactgtaactaatgatggggccaccatcttaagcatgatggatgttgatcatcagattgccaagctgatggtggaactgtccaagtctcaggatgatgaaattggagatggaaccacaggagtggttgtcctggctggtgccttgttagaagaagcggagcaattgctaagcccgaggggcatcaccccaatcagaatagccgatggctatgagcaggctgctcgtgttgctattgaacacccttggcaagatcagcgatagcgtccttgttgacataaaggacaccgaacccctgattcagacagcaaaaaaccacgctgggctccaaagtggtcaacatttgtcaccgacagatggctgaaattgcttgtgaatgccgtcctcaattgtagcagatatggagccggagagacggttgactttgagctttatcaaagtagaaggcaaagttgggcggcaggctggaggacactaaactgattaagggcgtgattgtgggacaaggatttcagtcaccccacagatgccaaaaaaaaaagtggaagatgcgaagattgcaattctcacatgtccatttgaaccacccaaaccaaaaacaaagcataagctggatgtgacctctgtcgaagattataaagcccttcagaaataccgaaaaggagaaatttgaagagatgattcaacaaattaaagagactggtgctaacctagcaatttgtcagtggggctttgatgatgaagcaaatcacttacttcttcagaacaacttgcctgcggttcgctgggtaggaggacctgaaattgagctgattgccatcgcaacaggagggcggatcgtccccaggttctcagagctcacagccgagaagctgggctttgctggtcttgtacaggagatctcatttgggacaactaaggataaaatgctggtcatcgagcagtgtaagaactccagagctgtaaccatttttattagaggaggaaataagatgatcattgaggaggcgaaacgatcccttcacgatgctttgtgtgtcatccggaacctcatccgcgataatcgtgtggtgtatggaggaggggctgctgagatatcctgtgccctggcagttagccaagaggcggataagtgccccaccttagaacagtatgccatgagagcgtttgccgacgcactggaggtcatccccatggccctctctgaaaacagtggcatgaatcccatccagactatgaccgaagtccgagccagacaggtgaaggagatgaaccctgctcttggcatcgactgtttgcacaaggggacaaatgatatgaagcaacagcatgtcatagaaaccttgattggcaaaaagcaacagatatctcttgcaacacaaatggttagaatgattttgaagattgatgacattcgtaagcctggagaatctgaagaatga

SEQ ID NO: 4552 - DNA, 597 bp, Homo sapiens
  SIMILAR (387)..(61): 951254mologous to Homo sapiens BTB/POZ domain containing 1 protein,accession number AF257241,Smith-Waterman Score=522.
atggctgttcacccagtcgtcatcaccgtcatcatctcaatcttgggaatcatcagcagtgtcccccacacagagagacagcagcgccaggaaggctgcgggctccacgtccggcagctcgatctcggccgacgtggtggccatgccgccgttgaacatggcgtcaaagacggcgctgccggccgccagcacgaagcggtgggcggggatgcgctgcgggcccccagcggcggcggcgccgcgacccttgcccagtacgaagcgcacatcgctcagcagctccgagttgaagaggaaggcgaagcgctccttcagcgacgccttggtcgcctgccagttgtagagaggttcccgctgcagggggagcaggggccccagagaggacggccccttatcaccaagtccagcgcccccattgtgtatctgggacatgtcccaaggcctgtcccgaggagtgttttgcctggaagtggaggggcaggaaagtatggccaagggaacactgtgtccagagttcgttccttctggtgggttcgtggtcttgctgacttcaagaatggagctgtggaccttcctgatgagttttatagctcttaa

SEQ ID NO: 4553 - DNA, 2509 bp, Homo sapiens
  SIMILAR (19)..(702): 661254mologous to Homo sapiens BTB/POZ domain containing 1 protein,accession number AF257241,Smith-Waterman Score=684.
  misc_feature (1)...(2509): n = a,t,c or g
agcgtcgaatttccgtgtcgactttccggagctgttgtacgctgggcagaagcagaatgtcagagacaacaattacctgtgacttttgggaataaacaaaaagttctaggaaaagcactttccttaatccggttcccactgatgacaattgaggaatttgcagcaggtcctgctcaatctggaattttgtcagatcgtgaagtggtaaacctctttcttcattttactgtcaaccctaaaccccgagttgaatacattgaccgaccaagatgctgtctcaggggaaaggaatgctgcatcaatagattccagcaagtagaaagccgctggagttacagtgggacgagtgatcgaatcagattcacagctaatagaaggacctctatagttggaacttggcttgtatggatctaattcatggcccctacagattatccaagtgaatatacagatcattgaatatgagaaaaagcaaaccctgggaccagaatgataccggctttagttgtgatgggacagctaacacattcagggtcatgttcaaggaacccatagagatcctgcccaatgtgtgctacacagcatgtgcaacacttcaaaggtccagattcccactatgggcacaaaaggatttgaaggaaagtagtgcatggaggacacctgctggcaagcaaggactgtttttttcttttttagttcccctgggcattaataatggcacttcaatagaagatggacaaattccagaaatcatattttatacataatttagcattatcatacatcttggctaaataataccatacaatcgtagtggtcagaagagngggggggggggggggggaaggaggggggggggggggggggagggggagggggggggcggggggggggaggggggaggggggggggggaaggcgaggggaaacggtgcacgagtgagaaacagattttcccattttccttacaactttaagagaaaagaactgggtttaatgggtttaaaaaaaagcacagctttttcaccgttcatcttgtataatttcatagattggctgacttagggtctttcaatagtttggggaattggaaagattcctgttatatatagcctagtttgggtttgtttttgttttaaactattttgaaggttaggtgagatgggcaaataggccttaactattttgaaggttggatgaaaagagatgggtccagtattccctaccagaattccttattaacctccaaataacctaaatttccagaaaatttaagaagctgacctttatatttgggtgggtttgaagtatcctgttggtaagccatttgtaataatgcctaaaaaaggccctaaataaaatgcccaagaaaatattcagtgcatttatagagaaggatattttgtagtagtatagtaatgtgttatgtagtacagtttttaaagctataaatggaattttgtgtaaattcacaaaaatgtgatataaacaggatctaagactggattcccatgtcactaaactgcaccactatacctgtctctctgtgtgggggacactgctgtatgattcccaagattgagatgatgacggtgatgacgactgggtgaacagccatcacttcaacattgtgataatccttcacagcaagagaccgaataaaatactaacatttctaacaactgctctgacattgtaaagagatccaacagaatcactcctgctgaaaaatacgctttctgccacctacacatttctatttagggaagtaaaatttgcttcatgggtcatgacccccattagtcagtgttacagctgtgctgggggatagggaagtatatctgggcagatttgatattttattacactttttttattaaaggcaggttttaaaatatagtaacatccatttttttcccttgaaagtgattctcttataaaaaatgaaagtggagtttaaggtatatcaaatccgttgtggaaggtgattaaaaatcaaaattccttttaaatatcaaccttaattttttcctaaggtaagataccaaaaaattttccatcctaaagtaatatttccacctttatattgtaaaggaaggtaggtatattgggtgggcccgaaggtccccctgaaattgcccaaagggaaatttttcccatggtaatgcctcctaacggatataaaccctccagttaaatggaattatcctatgggatgtgtggttcctggttaacctaaaaattaacccagtaaacacctcctgtagtaacccattaacagaaaatacttcctgtccttaaaaaaatatgatatgtccagagatgagttagtgtttcttgacggttggagaccttttaaatgcctcatctgttgtactggaacaattgaaactggcatggcagccataaaagggacaagaaacaggaactgttttactaactttggggacatcccctggagtttttaaaaataaataaatatatatatatataaaaaaaaaaaaaaaaaa

SEQ ID NO: 4554 - DNA, 492 bp, Homo sapiens
  misc_feature (1)...(492): n = a,t,c or g
tttttttttttttattttaagttgtttattttaagataatttacaaatatcttgctgtcttcagtaattcaaataatggaggaacagtttcttcggacaaaggcagcagtaagctaaaaacaaaatcaactggctgaattttccttctttacctgaaaaacaaagtacagaacaagtaagaaatcaaacagcattttttggggaaaataatgtcaagagataataatacatatttaacgtggggtacagagaactgaatttacacaataaagtgttaccctataccagtgattctaaaattttggtctggggaacctttcatgggggttcatgagggtcaaaactattttccatngataatgttattttgcctgttatattctcattcttcgagtatacagtagagttttccagaggccacatgatccatgacatcacaacaaaatgaatagagacagatgaaaatctagctggcttctgctacatgaatca

SEQ ID NO: 4555 - DNA, 418 bp, Homo sapiens
  SIMILAR (163)..(339): 411254mologous to Homo sapiens line-1 reverse transcriptase,accession number U83303,Smith-Waterman Score=88.
  misc_feature (1)...(418): n = a,t,c or g
nnnnnnnnnnnnnnnnnnnnnnnnnnnnnnnnnnnnnnnnnnnnnnnnnnnnnnnnnnnnnnnnnnntttaaaaagtaaactttccgattataaaatcaacttacaaaatcagtaacatttgtatacaccaacagcaattaatctgaaaaaaattcaagaaagaaattcaatttacaaatagctgcaaagataactaaaaaaactacctaggaataaatgtaataaaagaagtgaaaatctatacaataaaactattaaatactgataaaaaatgaaaagaacccaaaaaaaggagagctatcccatgttcatggtttggaagaattaatattgttaataagtttcatactacccaaagtgggctacagatcgaatgcaatacctatgaaaatgccagtgacaagccggacgcgtggg

SEQ ID NO: 4556 - DNA, 795 bp, Homo sapiens
  SIMILAR (8)..(280): 501254mologous to Homo sapiens Human secreted protein, SEQ ID NO: 6953,accession number AAG02872,Smith-Waterman Score=177.
ttacttgtttatttatttattgcccaggctgaagtgcagtggtgtgatcacagctcactgcagcctctacctcccaggttcaaaatatcctccccactcagcctcctgagtagctggaaccacaggtcctgccaccatgtccagctaatatttttaattttttgtagagacaaggttcttcctgtgttccccaggctggtcttgagggagctccagtgatccttctgcatcagcctcccaaagtattgtgaagataggcgtgagccactgcacctggccctaggaactttagaaaccgtcttgcccagtcccttcattttacaggtgaagaaactgtgcctcggaagaagggtgacttgccttgggtttacagacaaacacagggttagattccaggtcctcacaggtgtcaagtcttggccttttaacccaaagacttccttctttctccacatatttatgtgtccacctccattctatggccaccacctgcctgagctgtccttgctcttacatggatgacagtgatcaatgcaaaactgtgacactttgctcatggcatcccaggaatgccttctccttcccatccctcatctcctgctcattcttcaagtgactcaaatgccacctcttccaagaagcacatactggcccgatgtgacctctgcccttccagcttcattcagcacttggaatccacacagctcatgccatggtgttaccacagataggctgcgtccttatgttattaacttttcagtactgagattagaaattccgaagagcagggcttgc

SEQ ID NO: 4557 - DNA, 403 bp, Homo sapiens
  misc_feature (1)...(403): n = a,t,c or g
cagtcttcttctgccattagttcaactgcctttacgcttgtgnnnnnnnnnnnnnnngaaaagggggtttaattttggtgccccagataaaagggaatggggggaatttgggttaattgaaaccttggcttccggggtaaaacaatttttcgggccaaaccctcaggagaagtggggattaaaggaaaaccccccatggcggggtaaatttggttttttaagaaaaaacggggttttccaatttgggaagggggggattaaaacccccaccctcaggaaataccccggcctggccccccaaaggggtgggaataacaggggggannnnnnnnnnnnnaccggttttttgttttttgggtttttgtgaaaatacaaacctaagggccaaaaaaaaatttattgt

SEQ ID NO: 4558 - DNA, 353 bp, Homo sapiens
  SIMILAR (7)..(183): 671254mologous to Homo sapiens PRO2550,accession number AF130089,Smith-Waterman Score=208.
tcgacttttttttttttttgtgagacggagtcttcctctgtcacccaggctggagtgcagtggcacaattttagctcactgcaacctccacctcccaggttcaagcaattctcctgcctcagcctcccaagtagctgggattacaggtgtgcgccaccatgcccgtctaatttttgtgttttcagtagagacggggattcaccacgttggccaggctggtctccaactcctgacctcaagtgatccgcccacctcggcctcccaaagtgctaggattacaggtgtgagccaccatgctcagccaacataatttcaatgcatgggaaaacagaggaaatttatttagttagtgc

SEQ ID NO: 4559 - DNA, 1350 bp, Homo sapiens
  SIMILAR (21)..(200): 651254mologous to Homo sapiens PRO2550,accession number AF130089,Smith-Waterman Score=212.
  misc_feature (1)...(1350): n = a,t,c or g
tttgagacgganncgcttctgtcacccaggctggagtgcagtggcataatcttggctcactgcagcctccacctccaaggttcaagcaattctcctgcctcagcctcccaagtagctgggactacaggcgcccgccaccatgcccgactaattttttgttcacttgtgttagccagaatggtctcaatctcctgacctcatgatccacccgcctcggcctcccgaagtgctgagattacaggcgtgaaccaccacgcccggcctggcctttttctttaaggagtgatgggaaactgttataaaatcagatgtgggaggtgctctactaccattaatttacatgcaccagtctcactttactttcagctttcaaagaggtaaacaaaggaggcattttctctatctgagtgaaacatggagacgcagagttcctgtgattgcacgaggtcagctgttcaagcggagaaccagaaccaggctctggctctacaccccatgttccttcagcaggcctgtggccagctgtgacaagtatagcctggccacctggctgaggctcacagagcccacagccagcatggtatgggaaatcctggattggggctggttgtggtccagctgtgatccagctttctccacttctagacagggctagtgccaggcaatgaagccaatgactacagatgtcactcacagctggaaaatgggcctcctttggcaaaggaatctggaagcactctctagctgctctgctcaggctggggccctgctagcctccttttagataaagtggggggaatagattcaccccccaacagtgaaaataagggaattcaggttccagacgatcatcacttggttaagtttgcacagaaagtgtaaccagttccagtgagaacaaacctaaagctgtccgtcttttaaagccaccctgagtggtaaagataaggtacatatcttaacctatataaaggtgaagtattatttttcaactgtacaagacacattactagggttacagttcagtggcatgcaccttatgttggactgcatttaaactacaactgtgtagtgtgacatctccattacatggcaccaaacatttgtcaattgcacaactattacttggtgagatctggttttaactacaatactttaaaagccaatttctatttaaatgtggtatgaaaaaaatccattagcttacctttatacacattttacatttatggccccctcagtccggtaatttctgcacccgaatgggtagtgttgcctttgaagtagtcaccttgggaagatgtatgtttatcccagtgaagctgaccttacacagaacattcctagaac

SEQ ID NO: 4560 - DNA, 1248 bp, Homo sapiens
  SIMILAR (210)..(160): 721254mologous to Homo sapiens PRO0657,accession number AF090942,Smith-Waterman Score=62.
ggagcagaagtttaataagcaaaaaggaagaagagctctccgttgcagagggggcctgagcgggttgctaagttgtagtaaagatgtcaaggtttcttttttttctgtcgccaggctgcagtgcagtgggctgatcttggcccactgcaacctccacctcccgggcaagtgattctcctgcctcagcctcttgagtagttgggactccagggcacacgccaccacgctcagctaggttttgtatttttagtagagatggggtttcaccatgttgggccagggatggtcttcgatctcctgacctcagggtgaagcgccctgcctcaaccctcccaaagtgcctgggattaacaggtgtgaacccaaccgtgcccggcctgtcaaaggtttttacaaatgggctagtgacgaggggttagaggagggatgtcttgtcctcccagggcccagggttttagctgggacaaggtgtgctatttgtatagagagtttctgtcagactcagtctgtgctgctctgtgacacttttctgcgagggtctctgggtctgctcccagacatcttcttggggttacaggcacccctcagtctgcttttagcttcccttagtgcacctaaggggacgggaatgtgcttattagggtccactgttttactggggcccattgtggaagtgtgaagtttggtgatcacccaggagacaccccccgcactcctgtgctcgagctgtctcatctgtgattcacagtctgctctttctggctgcttgtcgtgagaagtgattttgaaccccgagggtagaaagggagctatttttgagctgctttttgttaaaaggcaaattttctgctggggactggctttaccccgtctacctaaatcatttctttctgcctcctgtaacagtcgccttttgtgttctgctggcatttgtttgaacacagttcacaggttcagtggttgcatctctaatcagctgccagtccccatcccagacattctttgcatctaagctgaggtctgaactgagtggggtgggctggtgtttccatcctcacaactccagtgagccgggtgtggccgtggcctgcgtctccctggcggttagtgatgttggcatcatccacctttttcaaacaaagcactggactgagagaattcacacactgtatccacccagtccatggtttttagtaaaaggtttatagaggtgagcagccatcaccacacacaacctaagaacattta

SEQ ID NO: 4561 - DNA, 2557 bp, Homo sapiens
  SIMILAR (52)..(231): 361254mologous to Homo sapiens rab interacting lysosomal protein,accession number AJ404317,Smith-Waterman Score=82.
ggtggaattccggcgctggacaagaacgtggccgagctgaccgtcatggacgtgtacgacattttgtcgcttgtgggccacgaggtcgagcgggtgattgaccagcacggctgcgaggccatcgcgcgcctcatgcccaaggtcgtgcgcgtcctggagatcctggaggtgctggtcagccgccaccacgtcgcgcccgagctggacgagctgcgcctggagctggacccccctgcgcctgtgttaggatggaccttatcgagaaggagcgcaagcaccagaaggagctggagctggtggaggatgtgtggcgaggggaggcgcaggacctcctctcccagatcgcccagctgcaggaggagaacaagcagctcatgaccaacctctcccacaaggatgtcaacttctcagaggaggagttccagaagcatgaaggcatgtcagagcgggagcgacaggtgatgaagaagctgaaggaggtggtggacaaacaacgcgacgagatccgcgccaaggacagggagctgggcctgaaaaatgaggacgttgaggctttacagcagcagcagacacggctgatgaagatcaaccatgaccttcggcaccgggtcacggtggtggaggcccaggggaaagccctgatcgaacagaaggtggagctggaggcagacctgcagaccaaggagcaggagatgggcagcctgcgagcagagctggggaagttgcgagagaggctgcagggggagcacagccagaatggggaggaggagcctgagacggagccggtgggagaggagagcatctccgacgcagagaaggtggccatggatctcaaggaccccaaccgcccccggttcaccctgcaggagctgcgggacgtgctgcacgagaggaacgagctcaagtccaaggtgttcttgctgcaggaggagcttggcttactataagagtgaagaaatggaagaggaaaaccgaataccccaacccccacccatcgcccacccgaggacggtccccccagccgggagtcgggcatcaaggcgacttgtttagcttctttcttcccggaggttaagaagcgccttggccaaacacacaggggaaacgtgcacatccagggagtccctttggacaagttgggcaaacaccccaccgcgatgaccggttacacagagcaaaggacaggaagcccctgcagcatctgttgaccttgggcccatctccacccgtccaaccctggacttgcccgccaccagcgcctgcaaccgaacttgcagcccaggggtcattgcttgcctcaagcctctcggtgcagatgcaccctgaaaactgacccctcaaacagaactgtcttgatttgaggatggacattgaaaaactgacgccaaactctaaagaaatgtttatttatacccagggctatcactgtttctaatagatgactctgatcccgtaggatatatattttaataatcccacaaacggaggccagacttctgcgttaacttcagtaacacaagcttctttaagccaaatacatcacttgcccactatcattgctgtttgacttgcctttgtataaaatgcctatgtgtagaggttttattatccacaggtgacatagttcagcaggaggcatggaagggctagatcttcattagttacattcatgaaattgtgatggtaacgtattatacagaatgtatccatcaggcagacaaggggtctgaagtcacaggctcagtagcccaactcagacacaaagccacagacaatatggatgatggtcctcttacccagaaactggagacaactttgcaggcacccctggctgcgttcctgataatgcctagagcatgtagcaatgttcaaggcaggtgccttggaatctgctgtgagttatgcagtactaaccaaacaaagttgctaaggatgagatgttgcaacatttccttgtgtgcacttttttttcctggacatcttttttttcttttaagattcattaagtcatatacttagtcccctgcaaagaagaagacagatgtcccagagcagactgaaagcggggcgtgggatcctaggcaatgcaagagggcaggtgggggagctgtagcagaacaagggtgctaggtgggaagctggcttggggaccacacgtctggctgactcacagggctatagcagcagacagagagccagatgctctactgcaactggtgagttggaggcttgcccacataacactgtctttctctccacccgccaagcatccagggcacagggctggttgctcacagattgagcgaggtagcacctcctaccagcactcaagtttatcagggccgcgttctaaacattctactgaagtttgctaagaaaccattaggtgaggctgagccaccgtgcctggccaaatgtcacttttttgataagtcagcagatccagctcttgagcacatcagaggctagataatcgggacagaaaggaaaaatcaatccatcagaaagtttatacatgcaattatgtaaaataaaatcaagaacaaaaagcataaaa

SEQ ID NO: 4562 - DNA, 3190 bp, Homo sapiens
  SIMILAR (904)..(1695): 761254mologous to Mus musculus putative,accession number AK012739,Smith-Waterman Score=1020.
tttaaagaccccgaagcagtcagagctctgacgtgtactctcctaagggaagattttggactttctattgatattccattggagagactaattcccacagttcccttgagactcaactatattcactgggtagaagatctgatcggtcaccaggattctgacaaaagtactctccgaagaggaattgacataggcacgggggcatcttgcatctaccccttacttggagcaaccttgaatggctggtatttcctcgcaacagaagtggatgatatgtgtttcaactatgcaaagaaaaatgtggaacagaataacttatctgatctcataaaagtggtgaaagtgccacagaagacactcctgatggatgctcttaaaggtagtatctgagtataatctatgactttttgcatgatgcaaccctcccttttttgccaatcaaattggaagccaagtggagtaaactcacgaaatcctcgaagacctccgcctagttctgttaatacaggaggcatcacagagatcatggcagaaggaggtgaattagagtttgttaaaaggatcatccatgacagtctacaacttaaaaaaagattaaggattgatatggcagccttgttgattggtgtctgctctgaggtctcagggagaaaagattggatccagcagcttgcgccacgatggtatagctgcatgctgggaaagaaatgcagcctggcgcctctgaaggaggagcttcgcatacaaggggttcccaaagtaacgtacactgaattctgtcaaggtcggacaatgagatgggccttagcttggagtttttatgatgatgtcacagtaccagtacacgaaggacgtttagcagttggaggagttacatctgatagccagaacaaaggcagtgcgtcaccaccaagtaagcgaagaaaattagagaaaccgagaaaacccataacattcgtggtgctggcgtccgtgatgaaggaattatccctcaaagcatcacctctgcgctcggagacggcggaaggcatagtcgttgtcacgacatggattgaaaaaattctcactgatttgaaggtccagcataaacgagttccctgtggaaaagaggaagtcagccttttcctaacggccatagaaaactcctggattcatttaaggagaaagaaaagagagcgtgtgagacagctgagagaagttccccgagctcctgaggacgtcattcaggccttggaagagaaaaagcccacccccaaagagtctggcaatagccaagaactggccaggggcccccaggagaggaccccctgtgggcctgctctgcgggaaggcgaggctgccgctgtggagggcccgtgcccgagccaggagtccctgtcccaggaggaaaacccggaacccacggaggatgaaaggagtgaggaaaagggaggggtggaggttttggaaagttgtcaaggctctagcaacggagcccaggaccaagaggcttctgagcagttcggcagcccagtggctgaaagggggaaacgtctcccaggagtggccggacagtacctgtttaagtgtttgataaacgttaagaaggaggtggacgatgccttagtggagatgcactgggttgagggccagaacagggatctgatgaaccagctttgcacctacatacgtaaccaaattttcaggcttgttgcagttaactagaaacctcctgcacagttggaaacgtgttgatagtaacttgctttggagtggcctgtggggtggcaagaggaatcctaccagcggcccattagtagcacgatgtggaattatcttcgaaaacaaaaacctatgaatctgtcccccacccccccccgcctccttcccgctttttgagttacagggagtcgtagtgtggtcatttacaaggaggaattgtggtcatcagtaacaacagaaagccctcagtaaactcccgagggattgcaagctggctcaagctggcccctcagctctgggactgcctctgcaaggtcagaagggttgtttgtgggagtctgggctgggcagcactgcctaggaatatcatgctgttctcttgttcacccaagggtgtttctttgagggaggggtgggctctctttggcctccagctggaagccctgggtaaccctgttctaggtcactcttcaagatggggcctaccttgcatcaatcccacgaagggagctgtatggtgggtggtggggaaatctgggagagaaaccttagtaatgctgggaaggagcagcagagtctggggaccacccggtaaatggcacatacctgacacctggctgttttgatgttgcttatttcagaagcagaattaggtaagcaaaactccccggtgtgactgagacacacagaaggcacccatacccccgcctccagcctgttgacagtaccattttgtagcagttttactactgtgtgatttttgtttggacatctgaagtagagcttgttttgtttttaaataagaatattcacaaattaaaaaccagcggtcctatttgaatcctggggttagctgagtgagcggctgatgatagaaatgagaaatagaacaaaatagtatgtgccgtaggtagcttaagaaagtctcagatattttgttgctgatcaaatactgtttttttgtggcttcacttgtaatcccccctgtacttacctactcacattggagagttctgaggccggagtaactgtgtccttgaaacacgtttctaattggaatgccagggttcagtagccgtccccccggaaaggggtgaccttttgctgtgcttgatgttgcatcagcagcctagggttctgtttagactaaaatcttggccagagctccttgccatctgctaagaagactggggctgagtagttaagccagccttctgagaggtggctgttggtcaggacgggaagctggtgaccttggcatgtcttggcagcagctagatcaggccctcggcagagacacaggaagcggaactgctgtgccttaacttggctgtggagctggagctggagaaggcagcatactgaccagtggctttttgattgattgtttgttatgaggtggagttttactcttgttgtctaggctggaggttgcagtgagccgagaatgccactgcactacagcctgggcgacaaagtgggactgtct

SEQ ID NO: 4563 - DNA, 1147 bp, Homo sapiens
  SIMILAR (644)..(3): 641254mologous to Homo sapiens Similar to hypothetical protein FLJ10925,accession number BC002749,Smith-Waterman Score= 619.
agccgtgcctcgggtggagggtgggacacgctggcggtgaactgcagcttcagtttcatgtgctggcttagctcgaagagccccgtcctcagagcctggaaggccacactgaaggtgagcgcgctgcccttccgggaaaagccaaggttgttgaggggcgtgtggcagacgacggagtcccagggcagcctgcatggcccggcgctcctcctcacacagctgctttccagcctgtgcatgctctggggtccacacgagcctcacagcaaggaagtcttggagattgttaagcagcgtgtaggtgacagtgaaaagctccgtaggtcccgaaacaggggacttaacaagaacggtcatcaacaaaacacgggcggtcccaagcggacactgggcaggcggtagtgggtgtagatgctctgagtgaagggcagctttggggtagaccactgaaccacagcaatcaggggaacttccaggccctccttggcccctggagggggctgctcaccccctctcagctgaaacaggaagttgtgttcctcccagggcattcagcgggcaggggaagcagcccagaggtcccgggtaggcggcagaaggaccccatggagactttccccagactggtgacagacattgtccacccagcagcacagagccatcgggcatgacaggtagataactggcgttgaagttggggaggattcggatatcccagatggagatttcctcctgagaggagctgttcagcaccttgagcacggtcaagtgttttccagccacagtgaactgccggcatctcagaaccggagggggcagcagagtcagcagcgtgctcacttgggccttgaaagcgctctgctcgccccggaatgtctccccaggagatcgggtctgcagcaatcgcaggtagccttgatctctgacctctggtgcctcaatctcccgcttccacacagtcactacaatcttggccttaggtgtccctgggggcagtctatccagtgaaacggtgagtgggaagatgacctcatctgtggacacaatcggttcctccacaggcagctggggttgggaaaggggtgaagaggtcaggagcaagtcagaggcagcctgcagcctttccctttaagaccggcagttcatc

SEQ ID NO: 4564 - DNA, 373 bp, Homo sapiens
cctgctccaccarcctctccatccactctactatcccactgtcatggtgggtttaacatttgcctgctgcctgctctgcctgctttctttacattgggtgggggaaaaaaattcctctttgaaaaagtaaagattttaccacagtaccattatactctgccccatacacatcctttttcttttttctttttaaaccaaggcaataagtgaaaaggaatctgagtttccttctattttttcaccatcaattattgctgattttccggcctcttcttggattttatctcctttctaggacctatgagtggaatgggcatgaatatgggcatggatgggcaatggcactacatgtacccttcatcatgtaaagcaa

SEQ ID NO: 4565 - DNA, 1091 bp, Homo sapiens
  SIMILAR (32)..(931): 811254mologous to Homo sapiens ATP synthase gamma- subunit,accession number D16562,Smith-Waterman Score=1127.
ctgaccgaccttcagcagggctgtggctaccatgttctctcgcgcgggtgtcgctgggctgtcggcctggaccttgcagccgcaatggattcaagttcgaaatatggcaactttgaaagatatcaccaggagactaaagtccatcaaaaacatccagaaaattaccaagtctatgaaaatggtagcggcagcaaaatatgcccgagctgagagagagctgaaaccagctcgaatatatggattgggatctttagctctgtatgaaaaagctgatatcaaggggcctgaagacaagaagaaacacctccttattggtgtgtcctcagatcgaggactgtgtggtgctattcattcctccattgctaaacagatgaaaagcgaggttgctacactaacagcagctgggaaagaagttatgcttgttggaattggtgacaaaatcagaggcatactttataggactcattctgaccagtttctggtggcattcaaagaagtgggaagaaagccccccacttttggagatgcgtcagtcattgcccttgaattactaaattctggatatgaatttgatgaaggctccatcatctttaataaattcaggtctgtcatctcctataagacagaagaaaagccgatgcttttcccttaatacccgttgcaagttgctgacagcatggggtatcttatgacgatattgatgctgacgttgctgcaaaaattacccaagaatacaaatctggccaacatcatctacttactctctgaaggagtccaccactagtgagcagagtgcccaggatgacagccatggacaatgccagcaagaatgcttctgagatgattgacaaaattgacattgacattcaaccgtacccgccaagctgtcatcacaaaagagttgattgaaattatctctggtgctgcgagctctgtaaagaaggaaaattcagccagttgattttgtttttagcttactgctgcctttgtccgaagaaactgttcctccattatttgaattactgaagacagcaagatatttgtaaattatcttaaaataaacaacttaaaataaaatcattgtttttctt

SEQ ID NO: 4566 - DNA, 339 bp, Homo sapiens
  SIMILAR (250)..(327): 1001254mologous to Xenopus laevis Meis3 homeoprotein,accession number AF072895,Smith-Waterman Score=142.
atggaagtagggaaattgagtaaaggagtctgggaggaaccagctctgcctgatgagagaaagacatttgcaagtgcacgaggtccagtgagaaaggctgacacccctgtccacagagctgcagcggggacagcatggaggaaggttcagtgtttgacaaaagacgatgcagtgtggtgcgtgaaagagaacgggctggacatcagcagcttgggtctaattccagctcaaacaacttgtgtgatcttgcatccgtacccttccgaagagcagaagaaacagttagcgcaagacacaggacttacaattctccaagtaaacaactggaaggctcattaa

SEQ ID NO: 4567 - DNA, 2609 bp, Homo sapiens
  SIMILAR (1106)..(1333): 571254mologous to Homo sapiens TALE homeobox protein Meis2c,accession number AF179897,Smith-Waterman Score=217.
ggcgcgcacgccccgcaccccaatgtcatgccggccagtatgggatccgctgtcaacgacgccttgaagcgggacaaggacgcgatctatgggcacccgttgtttcctctgttagctctggtctttgagaagtgcgagctggcgacctgcactccccgggaacctggagtggctggcggagacgtctgctcctccgactccttcaacgaggacatcgcggtcttcgccaagcaggttcgcgccgaaaagccacttttttcctcaaatccagagctggacaatttgatgatacaagcaatacaagtactaaggtttcatcttttggagttagaaaagggccacgaactgtgcgataacttctgccaccgatacattagctgtttgaaggggaaaatgcccatcgacctcgtcattgatgaaagagacggcagctccaagtcagatcatgaagaactctcaggctcctccacaaatctcgctgaccataacccttcttcttggcgagaccacgatgacgcaacctcaacccactcagcaggcaccccagggccctccagtgggggccatgcttcccagagcggagacaacagcagtgagcaaggggatggtttagacaacagtgtagcttcacctggtacaggtgacgatgatgatccggataaggacaaaaaacgccagaagaaaagaggcattttgcccatagtattccctatatatcatgagagcatggctcttccagcatctcacacatcctgtacccttccgaagagcagaatatacagttagcgcatgacacaggacttacaatttttcaagtaaacaactggtttattaatgccagaataggaatagtacagcccatgattgaccagtctaatcgagcaggttttcttcttgatccttcagtgagccaaggagcagcatatagtccagagggtcagcccatggggagctttgtgtttggatggtcagcaacacatgggggatccggcctgcagggacctatgagtgggatggggcatgaatatgggcatggatgggsaatggcactacatgttaaccttcatcctgttaaaggcattcgcaaagcaagggggaagtttgcagagcatggccaggggactacgtttctcagggtggtcctatgggaatgagtatggcacagccaagttacactcctccccagatgaccccacaccctactcaatttaagacatgggacccccaatgcatttcatattttgccaagccttccccaccacccaggccttgattgattgcacggggggaccccttaccccacctgggattgattatgttaggcacagagccccacaatgttaaattctgtagatcccaatgttggcggacaggttatggacattcatgcccaatagtataagggaactcaagggaaaaggaaacacacgcaaaaactattttaagactttctgaactttgaccagatgttgacacttaatatgaaattccagacagctgtgattattttttacttttgtcatttttcatcaagcaacagaggaccaatgcaacaagaacacaaatgtgaaatcatgggctgactgagacaattctgtccatgtaaagatcctctggaaaaagactccgagagttataactactggtaggtataaaatataggaactaaggttaaacttggtacatttctgttgatcacgccgttatggttgcctcaaatagttttagaagagaaaaaaaaatatatatccttgttttccacacctatgtgtgttggtccccaaaagaatgactgttttggttcatcagtgaattcaccatccaggacgagactgtggtatatattttaaacctggttgggcccatgagaaaagaaccacactggagatcatgatgaacttttggctgaacctcatcactccgaactccagcttcaagaatgtgttttcatgcccggcctttgttccccccataaatgtggcctttagtttcaaacagatcctttatagttccgtgcttccataagccaattcttattattatttttgggggactcttcttcaaagagcttgccaatgaagatttaaagacagagcaggagcttcttccaggagttctgagccttggttgtggacaaaacaatcttaagttgggcagctttcctcaacacaaaaaaaagttattaatggtcattgaaccataactaggactttatcagaaactcaaagcttggggggataaaaaggagcaaagagaatactgtaacaaagttcgtaccagagttcggtctattaattgtttcatgttagatattcctatgtgtttaccctcaattgaaaaaaaaaaaaagaatgtttttgcctagtatcagatctgcctgtggaattggtattgtatgtcccatgaattcttcttttctcagcaacgtgttcctcactagaagaaaatgctgttacctttaagctttgtcaaatttacattaaaatacttgtatgaggactgtgacgttatgttaaaaaaaaaaaaggtgttaagtcacaaaaagcggtaataaatatttcatttttgatttttaaaaaaaaaaaaaaaaaattcctgcggccgcaagg

SEQ ID NO: 4568 - DNA, 2262 bp, Homo sapiens
  SIMILAR (1119)..(1376): 941254mologous to Homo sapiens BCL-6 corepressor,accession number AF317391,Smith-Waterman Score=414.
ctaccatgagacctgatatagataacagccaagctgcgcaccagcctccaggccgcctgccaaacagcagaaaattaaagaaaaccagaagacagatgtgctgtgtgcagacgaagaagaggattgccaggctgcctccctgctgcagaaatacaccgacaacagcgagaagccatccgggaagagactgtgcaaaaccaaacacttgatccctcaggagtccaggcggggattgccactgacaggggaatactacgtggagaatgccgatggcaaggtgactgtccggagattcagaaagcggtcggagcccagttcggactattatctgtcaccagccaagcaggagccaaagcccggtcgaccgcttgcagcaactgctaccagcctcccagtccacacagctgccatgctcaagttcccctcaggagaccacccagtctcgccctatgccgccggaagcacggagacttattgtcaataagaacgctggcgagacccttctgcagcggtcagccaggcttggctatgaaggaagtggtcctgtactgcttagagaacaagatttgtgatgtaaatcatcgggacaacgcaggttactgcgccctgcatgaagcttgtgctaggggctggctcaacatttgtgcgacacctccttgaatatggcgctgatgtcaactgtagtgcccaggatggaaccaggcctctgcacgatgctgttgagaacgatcacttggaaattgtccgactacttctctcttatggtgctgaccccaccttggctacgtactcaggtagaaccatcatgaaaatgacccacagtgaacttatggaaaagttcttaacagatttatttaaatgacctccaggggtcgcaatgatgatgacgccagtggcactttgggacttctatggcagctctgtttgtgaaccagatgatgaaagtggctatgatgttttagccaaccccccaggaccagaagaccaggatgatgatgacgatgcctatagcgatgtgtttgaatttgaattttcagagacccccctcttaccgggttataacatccaagtatctgtggctcaggggccacgaaactggctactgctttcggatgtccttaagaaattgaaaatatctctcccgcatatttcgctgcaattttccaaacgtggaaattgtcaccattgcagaggcagaattttatcggcaggtttctgcaagtctcttgttctcttgctccaaagacctggaagccttcaaccctgaaagtaaggagctgttagatctggtggaattcacgaacgaaattcagactctgctgggctcctctgtagagtggctccaccccagtgatctggcctcagacaactactggtgagcaagctggacccaccatgtacagtgtgttatagtgttaatccttgtgcatatgtgtcataatacacctatttctgtaaagaaagggcactattacatattaaaatatctcttctttatataagagaaattactccagtcagaagggcttagaaacatgtttttttcctttttaacttttaagtcagtttttatgaagttggtataatgtttcttttcttttcaatgcacacatactttggcatacgttttgtttttacttggaacatttgtttcttttcttttttaaggagaaaaaaaaatgagtaaaaggagctccacactttgacttaatttcatacaaagctctgatgacaggccatgactgtagagtggtcagaactgtgtggttggtttgagggagcgaattcggggaaaggcacttggtgatataactttgttttgtttaccagaggtacctgctcgggccaggtaaaatgctattggatgtaatcccagtagtgtgtaaatataaattcaaaccatatcccacacacaacaactaattgtatgaaactttttatatcctaatttaaaagctgtgaaattagttttcacgcatcaaaccggattgtttatatgtttaaacattttatgctcttatttaaagaagactttgagctatttttttctgtaccctgtaaaatattgaaaactaacataatatgttgaggttgcttggaaatgtacataaaactaaaatttttctgaatcgtgtgtttatgtttgaaatctgtgttttaactttgtaagtaaattctctgcctttgtatttatattttacaaaaattttcttaaaaggcaataaaactgttgaggaaaggagaaaaaaaaaaaaaaaaaaa

SEQ ID NO: 4569 - DNA, 1125 bp, Homo sapiens
  SIMILAR (183)..(40): 571254mologous to Homo sapiens Human secreted protein, SEQ ID NO: 7888,accession number AAG03807,Smith-Waterman Score=140.
  misc_feature (1)...(1125): n = a,t,c or g
aagctactcaggtggctgagacaggaagaattgtttgaaacctgggaggtggaagttgcagtgagctgaaatcgcaccattgcactccaccctggatgatagagggagactccatctaaaaaaaacaaaacaaaacaaaaacaagaaaaaggaagccacagggatcccactcccactgtcaggaggtccagactgggtgtagcaaaattgtgaagtcagccaagtactacctatatcccacttccccctcctccaggatatactcccaccactgccctatttgggggcaaatggccaggcaggggagcagggggcgactgatggacattagccactactacagagtcacatagagccagtgtggggtgcaggatcccatggctgtgtcagagacccctagctctggccctcagtttcttcctctgtgaaatgcgaactattccataggtttcttttccctgactgttgaaaagatgagaaactgtgagcctgaaagtgctcttgccatgacagatgaaatgcaagcctcagagggagaactgttatgtccattcttagcaccaggtaggcccattcctggtcggggactgcccccttctcactctcagggtggggcggaatgcagctggcccctctccccagaggagcccctggcactcatcctgtgaaccagagccctatcgctgatcagcaccaaatggctgaggatttcctggggctgatagaggggctcagacccttggttctcagaccccctgtgcccctggaaaatccactggacatctgggttgaggccacactgaccacaaggcatgtccagtgccttcagtttgtcaagtgctttcacagtcaccatctcgtcggagctccacagcagctggtgaggtaggtgaagactaccagtcccattatacagaggaggtagataggctcagagaggcaatcggacttgccaaggtcacacagttgctagctagcagagccaggcacagcctggaaatcactaattcttgggggcagagtagcacaggctttgtggctttgggccaggtactgagctactttgaccctcagtcataacaaatgaaaaatggggataggtgggggcacangtgtcacgcctgt

SEQ ID NO: 4570 - DNA, 702 bp, Homo sapiens
  SIMILAR (5)..(145): 741254mologous to Homo sapiens Human secreted protein, SEQ ID NO: 6065,accession number AAG01984,Smith-Waterman Score=179.
tgagatgagttttgctcttgttgcccaggctggggtgcaaaggcataatctcggctcactgctacctctgcctcctgggttcaagtgattctcctgcctcagccttccaagtagctgggattacaggtatgcaccacccacgcctggctaatttatgcatttttagtagagacggggtgtcttcatgttggtcaagctggtctgaaactcccaaactcaggtaatctgcccacctcagcctccgaaagtgctgggattataggtgtgagccattgtgcccagccaggcacggccactcattctaatactgtcttgtcaggccttttctgttgacttcaatcccacagttgtggttttctgtcttctagttttctctaaaattcaaataaatgaatttaaaagttttcctgtcagcctgattatccctatagccagcgaaggttttcagagaatggggatagaatggagaaaaaaggggagtggctccaacctacctccagatgattctgacaccaaacataggtcctgccctgtattcttcccagcagacccgaggtcagcagatgtgtcgccacccaccaagttcataccctggctcccaacttgtcagcagagccaaggaacaagcattaagggaaggcagtagagactttcatctactatagggaggacattacccatcagtgcatttcctgtccttgc

SEQ ID NO: 4571 - DNA, 593 bp, Homo sapiens; identical to SEQ ID NO: 559
  SIMILAR (221)..(361): 1001254mologous to Mus musculus put. altern. eIF-4A (aa 1- 370),accession number X03039,Smith-Waterman Score=238.

SEQ ID NO: 4572 - DNA, 594 bp, Homo sapiens
  SIMILAR (399)..(431): 901254mologous to Homo sapiens BM-010,accession number AF208852,Smith-Waterman Score=52.
  misc_feature (1)...(594): n = a,t,c or g
gatgcttatttcctctgccttccttggctgcccacatggatgcctaagtgttcttctccgggatagagtgtcctccgtgcacatgctgaagagttgtctttcttgacgtaggccagaggcattgatgtgcagcaggtttctttagtcatcaactatgaccttcccaccaacagggaaaactatatccacaggtaagcgtagatctggaacactcccctaccccttcacacctggccctccctgggcttaaagctcctgatattcctcatccccttccttgttttccagaatcggtcgaggtggacggtttggccgtaaaggtgtggctattaacatggtgacagaagaagacaagaggactcttcgagacattgagaccttctacaacacctccatttgaggaaatgcccctcaatgttgctgacctcatctgagggggttgtnctgccacccagccccagccaggggttcaattttctggggggctgaggagcagcaggaggggggagggaagggagccaagggatggacatcttgtcattttttttctttgaataaatgtcactttttgaggcaaaagaaggaaccgtgaaa

SEQ ID NO: 4573 - DNA, 1020 bp, Homo sapiens
  SIMILAR (500)..(721): 1001254mologous to Homo sapiens eukaryotic initiation factor 4AI,accession number D13748,Smith-Waterman Score=378.
  misc_feature (1)...(1020): n = a,t,c or g
ggaattccaacgtggaacgagaggagtggaagctggacacactatgtgacttgtatgaaaccctgaccatcacccaggcagtcatcttcatcaacacccggaggaaggtggactggctcaccgagaagatgcatgctcgagatttcactgtatccgccatgcatggagatatggaccaaaaggaacgagacgtgattatgagggagtttcgttctggctctagcagagttttgattaccactgacctgctggtgagtagagggaactgatagcaaaggcagaagggaggatccaaggtgattccctctccaaggggacatcagtgcctctcaggaaagtagcagcttggaatataatctggcatgcctaaggcctttggggaactgggatgcttatttcctctgccttccttggctgcccacatggatgcctaagtgtcttccctccgggatagagtgtcctccgtgcacatgctgaagagttgtctttcttgacgtangccagaggcattgatgtgcagcaggtttctttagtcatcaactatgaccttcccaccaacagggaaaactatatccacagaatcggtcgaggtggacggtttggccgtaaaggtgtggctattaacatggtgacagaagaagacaagaggactcttcgagacattgagaccttctacaacacctccattgaggaaatgcccctcaatgttgctgacctcatctgaggggctgtcctgccacccagccccagccagggctcaatctctgggggctgaggaacaacangaggggggagggaagggagccaagggatggacatcttgtcattttttttctttgaataaatgtcactttttgaggcnnnnnnnnnnnnnnnnnngggggggccgttttaaagaacccttgggggggccaaattttaccggggatggcgagggaatagttttttccttatagggggccatataaaaacctacctgggaatctttggaaagaaaccttacttctggggggagacaac

SEQ ID NO: 4574 - DNA, 1838 bp, Homo sapiens
  SIMILAR (1)..(462): 901254mologous to Xenopus laevis translation initiation factor eIF4A I,accession number Y12590,Smith-Waterman Score=712.
atgtctgcgagccaggattcccgatccagagacaatggccccgatgggatggagcccgaaggcgtcatcgagagtaactggaatgagattgttgacagctttgatgacatgaacctctcggagtcccttctccgtggcatctacgcctatggttttgagaagccctctgccatccagcagcgagccattctaccttgtatcaagggttatgatgtgattgctcaagcccaatctgggactgggaaaacggccacatttgccatatcgattctgcagcagattgaattagatctaaaagccacccaggccttggtcctagcacccactcgagaattggctcagcagatacagaaggtggtcatggcactaggagactacatgggcgcctcctgtcatgcctgtatcgggggcaccaacgtgcgtgctgaggtgcagaaactgcagaatggaagctccccacatccatcgtgggtacccctggccgtgtgtttgatatgctttaccggaagataccctgtcccccaaatacatccaagatgtttgtactggatgaagctgacgaaatgttaagccgtggattcaaaggacagatctatggacatatccaaaaggctcaacagcaccaccaagggtagttttgctgtcagccacaatgccctttgattgtgcttgaggtgaccaagaagttcatgaggggacccccattccggattcttgtcaagaaggaagagttgaccctggagggtatccgccaggttctacatccaacgtggaaccagaggaattgcaacttggacacactatgtgacttgtatgaaaaccttgaccatcaccccaggcaagtcatcttccatcaaccacccggagggaaggtggactggcctcacccgagaagatgcatgctctgagatttcactgtattccgccatgcattggagattttggacccaaaaggaacgtagaacgtgattatgaagggagttttcgttctggctcctaaccagagttttgaattaccccactgaccctgcctgcccagagggcatttgatgttgcaagcagggtttccttttagtcattcaaacttatgacccttcccccaccaaccaggggaaaactattaatccacaggaatcgggtcgagggtggaccggtttggccgtaaaggtgtgcctattaacatgttgacagaaagaaaacaaagaggaatctcgaggacattgagaccttttaacaacacctccatttgaggaaatgcccctcaatgttgcttgacctcatctgagggggctgtcctgccaccacagccccagccagggtctcaatctctggggtgctgaggagcaccaagggggggcggaggggaaggagcccaagggatggacatcttgtcatttttttttctttgaataaactgtcactttttgaggcaaaagaaggaaccgtgaacattttagacacccttttctttggggtaggctccttgccccaggcgccggctcttctcccaaaaaaaaaaaaaaaaaaacactaatccatttccctaacctagtaacctccagatcccagaggctctcctcacctcagctgagctcctttgaaagtgattcaagggactatgtcactcagcctcatttgctggaccaaatctggagggagaacccctaaaacccctaagtgaggttgcccagggggttgctcccaggtggggggaagcaggggagagaaaatggtagccatttttacatggttttgtatagtatttattgattcaggaaacaaacacaaaattctgaagtaaaatgacttggaaactgccaaaaaaaaaaaaaaaaaac

SEQ ID NO: 4575 - DNA, 498 bp, Homo sapiens
  misc_feature (1)...(498): n = a,t,c or g
ntatgnaattgggctgttgnaaattcgnacagnaaatncttttggacccaaagncaccctagtgtagnctactgccttggtgaacttagnctgttctttatagnccaaatgctatgaaggaggagattttgaaaaagactgctgaattatacaaaagggcaatggnaaataaaagnaagcagaaacatcactcttgggtggnaaaagctccttcacggccattcatcaagtgggagacacgtttaggcttaaaaacagctcattctcctaatgttttccttcagcaaggacaaaggtaatagcagcagttagaattctttgcaaatgtaccttaagacaaaataattaaacatttggaacatttgaatttgaaactttaaaaaaatgttgtacgaaattttactacgtgtgatttactgctatttgtatgaagttgtttggnttcattaagttggaattgtgatttgctgtttngttgtttaaagatttnctatttat

SEQ ID NO: 4576 - DNA, 1780 bp, Homo sapiens
  SIMILAR (1353)..(1730): 751254mologous to Mus musculus ATP synthase gamma-subunit precursor,accession number D21073,Smith-Waterman Score=502.
aataaggcacagaactgggctgaggctgtggctgcagccctttccctctacgttgtccccatagaggctagacattttaaggtcagtggagcactaccaaatcaaaagagcctcttaaattgtcttctactaaaaaattttaatagtagcatattaatatttttaaatgttttagtatcatctcatttcaaaaactatatctattgttcttatatataagaaaaacaatgattttattttaagttgtttattttaagataatttacaaatatcttgctgtcttcagtaattcaaataatggaggaacggtttcttcggacaaaggcagcagtaagctaaaaacaaaatcaactggcctgaaattttcccttctttacctcttgtctgagggatgggaacttgattttcattaaatccagaggctgcagcaccagagataaatttcaatcaactcttttgtgatgacagcttgggcggggtacggttgaaatgtccaaatgtccaaattgtccaaatccatcctccagaaagcaatccttgcctggccattgtcccatgggctgtcaacccctggcactcctgcctccactagtgggtgggacttccttcagaggagtaggtaggatggatgttgggcccaggattgtattcttggggtaatttttgccagcacggtcaggcatcaatatcggtcataggatactccatggctggtcagcaccttgcaacgggtattaagggggaaaagatgggggcttttccttcctgtccttaataggagatgaacaagaccctgaaatttatttaaagatgaatggagcccttcatcaaaattcatatcccagaatttagtaattccaagggcaatgactgacgcatctcccaaaaagtggggggctttcttccccacttcttttgaatgcccacccagaaactgggtcagaatggagtccctaataaaagtatgccctctggatttttggtcaacccaattcccaaacaagcattaacttcttttccccagctgctggttaggtgtaggcaaccctcgctttttcatcttgtttagccaatggaggaatgaaatagcacccacacagtccctcgatctgaggacacacaattaaggaaaggtgtttttcttttcttggttcttcagggcccctggatatcagctttttccatacagagctaaagatcccaatccataatattgaggcgggtttcagctctctctcagctcggggcatattttgctgccgctaccattttcatagacttggtaattttctggatgtttttgatggactttagtctcctggtgatatctttcaaagttgccatatttcgaacttgaatccattgcggctgcaaggtccaggccgacagcccagcgacacccgcgcgagagaaagctgaaaccagctcgaatatatggattgggatctttagctctgtatgaaaaagctgatatcaaggggcctgaagacaagaagaaacacctccttattggtgtgtcctcagatcgaggactgtgtggtgctattcattcctccattgctaaacagatgaaaagcgaggttgctacactaacagcagctgggaaagaagttatgcttgttggaattggtgacaaaatcagaggcatactttataggactcattctgaccagtttctggtggcattcaaagaagtgggaagaaagccccccacttttggagatgcgtcaagtcattgcccttgaattactaaattctggatatgaatttgatgaaggct

SEQ ID NO: 4577 - DNA, 2046 bp, Homo sapiens
  SIMILAR (1123)..(1887): 851254mologous to Mus musculus putative,accession number AK014393,Smith-Waterman Score=1098.
atgccggagatctctctttctgtgcatgcacaaagaagagatcatgtcagcatatggtgtgacggcagtgcctacacgccaagggagaccaaagaaaatgaaattcaggacttactgagggccaagagggagttggagagcaaacttcagaggctacaggctcagggtatccaagtatttgatcctggggagtctgattcagatgacaactgtacagatgtcactgctgctggaacccaatgtgaatattggactggcggagccttgggaagtgaaccttccataggaagcatgatccagcttcagcagtccttcagaggccctgagtttgcccatagttctatagatgtggaaggaccctttgcaaatgttaatagagatgactgggatattgctgtagctagtttattacaagttactcctctgttttcacattctctgtggagtaacactgtcagatgttacctcatttatacagatgaaacccagcctgagatggatcttttccttaaggactattcacctaaacttaagagaatgtgcgagacaatgggatattttttccatgctgtttattttccaatagatgttgaaaatcaatacctcactgtaagaaaatgggaaattgagaaaagttctttagttattttatttattcacttaacattaccaagtcaggacagagtgacttggagaagtgcagatgaactcccgtggctttttcagcagcagggaagtaaacagaagctgcatgattgccttcttaatctctttgtgtctcaaaacctttataaaaggggacactttgctgagttgctgagttattggcagtttgttggcaaagacaaaagtgcaatggcaacagaatacttcgattcattgaagcagtatgagaaaaactgcgaaggcgaggacaacatgagttgcttagctgatctttatgaaaccttggggcgatttctcaaggatctaggccttctcagtcaggccatagtacctttgcagaggtctttagagattcgagaaacagctttagatcccgatcacccaagagtagcccagtccctccaccaactagcaagtgtatacgtgcagtggaagaagtttggcaatgcagaacaactgtataaacaggcgttggaaatctcagaaaatgcttatggtgcggaccatccatatactgctcgtgaacttgaagcacttgcaactttgtaccagaaacaaaataaaacagctgaccagtttctgaagcgttccttagaaatgagggagcgagttctaggaccagatcaccctgactgtgctcagtctttgaataatctggcagctctatgcaatgaaaagaaacagtatgataaagcagaagaactttatgaaagagctttagatattcggagacgtgcattagctcctgatcacccttctttggcatatacggtgaagcatcttgccatcttgtataagaaaatggggaaacttgacaaagctgtacctttgtatgaattggctgttgaaattcgacagaaatcttttggcccaaagcaccctagtgtagctactgccttggtgaacttagctgttctttatagccaaatgaaaaaacacgttgaagctttgccattatatgaaagagcattaaagatttatgaagatagcctgggtcggatgcatcctcgagttggagaaacactgaaaaatttagctgtgcttagctatgaaggaggagattttgaaaaagctgctgaattatacaaaagggcaatggaaataaaagaagcagaaacatcactcttgggtggaaaagctccttcacgccattcatcaagtggagacacgtttagcttaaaaacagctcattctcctaatgttttccttcagcaaggacaaaggtttgtcatgactgtatatctagaaaacgctgtcgtctcagcccaaaatctccttaagctgataagcaacttcagcaaagtctcaggatacaaaatcaatgtgcaaaaatcacaagcattcatatataccaataacagacagagagccaaatcatga

SEQ ID NO: 4578 - DNA, 334 bp, Homo sapiens
  SIMILAR (333)..(160): 861254mologous to Mus musculus putative,accession number AK014393,Smith-Waterman Score=249.
tcatgatttggctctctgtctgttattggtatatatgaatgcttgtgatttttgcacattgattttgtatcctgagactttgctgaagttgcttatcagcttaaggagattttgggctgagacgacagcgttttctagatatacagtcatgacaaacctttgtccttgctgaaggaaaacattaggagaatgagctgtttttaagctaaacgtgtctccacttgatgaatggcgtgaaggagcttttccacccaagagtgatgtttctgcttcttttatttccattgcccttttgtataattcagcagctttttcaaaatctcctccttcatag

SEQ ID NO: 4579 - DNA, 1586 bp, Homo sapiens
  SIMILAR (47)..(382): 691254mologous to Mus musculus putative,accession number AK014393,Smith-Waterman Score=380.
ccatatactgctcgtgaacttgaagcacttgcaactttgtaccagaaacaaaagaaatatttttaagctctttcattttaggaaaaaatcctttatgggtcatcagagagctataaagaaaaaaggcaacttgtacggatttgcccttttacgtagacgggctttacaggtagaagagcttacattaggtaaggacacacctgataatgctcggaccctcaatgaactggggggtctctactatcttcaaaataacctggaaacagctgaccaggttctgaagcgtttcttataaatgagggagcgagttctaggaccagatcaccctgactgtgctcaggctttgaaataatggggcaggctcttatgcaatgaaaaagaaccagtatgataaaccagaagacctttataaaagagctttagatattgggagacgtgcattagctcctgatcacccttttttggcatatacggtgaagcatcttgccatcttgtataagaaaatggggaaacttgacaaagctgtacctttgtatgaattggctgttgaaattcgacagaaatcttttggcccaaagcaccctagtgtagctactgccttggtgaacttagctgttctttatagccaaatgaaaaaacacgttgaagctttgccattatatgaaagagcattaaagatttatgaagatagcctgggtcggatgcatcctcgagttggagaaacactgaaaaatttagctgtgcttagctatgaaggaggagattttgaaaaagctgctgaattatacaaaagggcaatggaaataaaagaagcagaaacatcactcttgggtggaaaagctccttcacgccattcatcaagtggagacacgtttagcttaaaaaaccagctccatttttcctaaagtttttccttcagcaaggacaaagtgtaatagcagcagtttagaatttcttttgcaaatgttaccttaagacaaaataattaaacatttggaacatttgaatttgaaactttaaaaaaatgttgtacgaaattttactacgtgtgatttaactgctatttgtatgaagttgtattgggattacattaagttgggaattgtgattatgtctgttttagttgtttaaaagaatttttcctattatatgggtatccaagggatggtagacacattagaattataagaagacatgaggagcaaatcatgaagagcggattggtctttgttcaacaagagctggcagagtagttaagacaaggagttcaaaaattcccatgaatcttggcccaggcatggtggctcatgccctgtaatccccacccactttgggagggtgatgcaggaggatcacttgaggcccaggagttggagaccagcctggccaacatggtgaaaccctgtctctactaaaaatacaaaaaaaaattagctggacctggtggcgcatgcctgtaatcctagctactcaggaggctgaggcatgagaatcgcttgaactcagcaagtggaggttgctatgagctgagattgtgccagttcattccaccctgggcaacagggtgagactctgtctcaaaaaaa

SEQ ID NO: 4580 - DNA, 827 bp, Homo sapiens
  SIMILAR (322)..(465): 331254mologous to Homo sapiens Protein encoded downstream of hhc_M oncoprotein,accession number AAR13556,Smith-Waterman Score= 66.
gcccggccaacatggtgaaaccctgcctctactaaagatacaaaaaattagccgggcaaggtggcacatccctgtaatctgagccacttaggaggctgaggcaggagaattgcttgaacctgggaggcagaggttgcagtgagacgagatcgtgccattgcactctagtctgggtgacagggcgagactccatctcaaaacaaaaaacggcagttgatcaagcagaagaaagagttagtgagcttgaagacaggctttttgaaaatacacaatcagagaagacaaaagaaaaaagaataaaaataagcacactacggggatttagaaagtagccttgaaggggcaaatctaagagttattgtctgtaaagaggaggtagagaaagagataggggtaaaaagtttattcgaaggaataataacagagaacttctcaaacctagagaaagatattaatatccaagtacaagaaggttataggacactaagcaaatttcacccagagatgtactaactcgagacattgaataataaaattcccaaaggacaaggataaagcaaggatactaaaaggagcaagagaaaagaaacaacatacaatggagctccaatatggctggcagtaaacttttcagtagaaaccttacaggccaagagagtggcatgacatgtttcaaatgccgaaggaaaaaaccttttaccttagaatactatatccaatgaaaatatccttcaaacatgaaagagaaataaagactttcccagacaaacaaaagccaagggattttatcagctccagacctgtcctacaagaaatgctaaagagct

SEQ ID NO: 4581 - DNA, 432 bp, Homo sapiens
gctgatggggataaggaggctgtgagcaaaggggcaggtggctctcgggaggcctggggcgagaatgcagggaggctcaaaagtggtgggcgtccttgctgggccagggagccggtctgaggcagggactgtcccctcctatcctgcggcccagacccggccccaccccccaccgcagcccttgcttatcttcaggagtcctggtgttgtccctaatggccaccaaggcccgcccaactccactgcctcctcgaagcagtgcaacttgaggtgttggggtctccccaccgtggccaggcaccctaagtctggacagagaccccagcgcggccgacccggtagccaggccctagtcctcagggtcctacacctgggaggaagaatccagagaggccctagctggtacagcaatgaccaagggcaggacagacc

SEQ ID NO: 4582 - DNA, 361 bp, Homo sapiens
  SIMILAR (114)..(227): 971254mologous to Homo sapiens Secreted protein CJ317_4,accession number AAW70322,Smith-Waterman Score=219.
ggcacgagcggcacgaggaaatatgtcaacatactacagttagtgtacagaatcagcatttcattgttaggacattttcctcaactttctaaagccagcatttcaactgacttttccagaccatatttgaagatgttagtggttttggtgcctggcatcgaagatggtgtgttctttctggaaactgtatatcttattggacttatccagatgatgagaaacgcaaggtaatttatatagtactgtttagtggtgaaagccctgattgactttcgtgtagtgttcatgcaaatgttccctctggcccccatcactcacccaaattaataaccctttttgtgtactcactaagccattaaag

SEQ ID NO: 4583 - DNA, 406 bp, Homo sapiens
  SIMILAR (249)..(229): 1001254mologous to Homo sapiens actin binding protein anillin,accession number AF273437,Smith-Waterman Score=39.
gtgttttttccaagtagaacttctcttcagtgtgtcagacagcgttttttgatggcgatggtttgtacaagatttctcttcacaccagagaggggctgctggttacttgcttctgaaagtggctgtctagctcgcttagcatgagtcatagaccttggagctgctgtgggcctctcagccatttttctctgaagattctctcgcctggcacgggttcgctccagcagttttctccgtaaacggatccatcgccccaggcgtcggactacgagacgatggaaacggtggttcaaattcaggaagagaaaagtgagtctcagctcagtgtgtctcctggaaaaaaccaggagtctgaggcgggggaactctcccacaaccagctgtcctctcctctgggcttccagtt

SEQ ID NO: 4584 - DNA, 660 bp, Homo sapiens
  SIMILAR (1)..(657): 841254mologous to Homo sapiens Secreted protein CJ317_4,accession number AAW70322,Smith-Waterman Score=939.
atggccagtccaggaggtcttagtgctgtgcgaaccarcaacttcgcccttgttggatcttacacattatcattgtcttcagtaggaaatactaagtttgttctggacaagataaattatgatgtaagagagcgagagctactgggctatttgttccaggaaaaggtcccctgttttatcttcttatggagggcatatttatttaaagataagatgtccagtggattcccagtgttggaagaagaggttttctaaccatatttgaagatgtaagtggttttgggtgcctggcatcgaagatgttgtgttctttctggagactgtatatcctattgggcttatccagatgatgagaaacgcaagaatcccataggaaggataaatctggctaattgtaccagtcgtcagatagaaccagccaacagagaattttgtgcaagacgcaacacttttgaattaattactgtccgaccacaaagagaagatgaccgagagactcttgtcagccaatgcagggacacactctgtgttaccaagaactggctgtctgcagatactaaagaagagcgggatctctggatgcaaaaactcaatcaagttcttgttgatattcgcctctggcaacctgatgcttgctacgaacctattggaaagccttaa

SEQ ID NO: 4585 - DNA, 4723 bp, Homo sapiens
  SIMILAR (1634)..(3382): 811254mologous to Homo sapiens actin binding protein anillin,accession number AF273437,Smith-Waterman Score=2299.
atggttgccattatcactatcatcatcattatcaaggtagaaaccaaagacatagtgggatggagacacactgagctgagactcacttttctcttcctgaatttgaaccaccgtttccatcgtctcgtagtccgacgcctggggcgatggatccgtttacggagtcctggcgcagcaagagtgaggcgcaggcctgcggaacgggtcctgctggaagcagctggaatgccctgcagggcggggtccggggccggtgactcagtgcggctgccgccgggaaaggcgaaactgctggagcgaacccgtgccaggcgagagaatcttcagagaaaaatggctgagaggcccacagcagctccaaggtctatgactcatgctaagcgagctagacagccactttcagaagcaagtaaccagcagcccctctctggtggtgaagagaaatcttgtacaaaaccatcgccatcaaaaaaacgctgttctgacaacactgaagtagaagtttctaacttggaaaataaacaaccagttgagtcgacatctgcaaaatcttgttctccaagtcctgtgtctcctcaggtgcagccacaagcagcagataccatcagtgattctgttgctgtcccggcatcactgctgggcatgaggagagggctgaactcaagattggaagcaactgcagcctcctcagttaaaacacgtatgcaaaaacttgcagagcaacggcgccgttgggataatgatgatatgacagatgacattcctgaaagctcactcttctcaccaatgccatcagaggaaaaggctgcttcccctcccaaacctctgctttcaaatgcctcggcaactccagttggcagaaggggccgtctggccaatcttgctgcaactatttgctcctgggaagatgatgtaaatcactcatttgcaaaacaaaacagtgtacaagaacagcctggtaccgcttgtttatccaaattttcctctgcaagtggagcatctgctaggatcaatagcagcagtgttaagcaggaagctacattctgttcccaaagggatggcgatgcctctttgaataaaagccctatcctcaagtgctgaagatgcgtctttggttaatgcctcaatttccagctctgtgaaagctacttctccagtgaaatctactacatctatcactgatgctaaaagttgtgagggacaaaatcctgagctacttccaaaaactcctattagtcctctgaaaacgggggtatcgaaaccaattgtgaagtcaactttatcccagacagttccatccaagggagaattaagtagagaaatttgtctgcaatctcaatctaaagacaaatctacgacaccaggaggaacaggaattaagcctttcctggaacgctttggagagcgttgtcaagaacatagcaaagaaagtccagctcgtagcacaccccacagaacccccattattactccaaatacaaaggccatccaagaaagattattcaagcaagacacatcttcatctactacccatttagcacaacagctcaagcaggaacgtcaaaaagaactagcatgtcttcgtggccgatttgacaagggcaatatatggagtgcagaaaaaggcggaaactcaaaaagcaaacaactagaaaccaaacaggaaactcactgtcagagcactcccctcaaaaaacaccaaggtgtttcaaaaactcagtcacttccagtaacagaaaaggtgaccgaaaaccagataccagccaaaaattctagtacagaacctaaagaagtgatacgtgaaattgagatgagtgtggatgatgatgatatcaatagttcgaaagtaattaatgacctcttcagtgatgtcctagaggaaggtgaactagatatggagaagagccaagaggagatggatcaagcattagcagaaagcagcgaagaacaggaagatgcactgaatatctcctcaatgtctttacttgcaccattggcacaaacagttggtgtgagtttagtgtccacacctagactggaattgaaagacaccagcagaagtgatgaaagtccaaaaccaggaaaattccaaagaactcgtgtccctcgagctgaatctggtgatagccttggttctgaagatcgtgatcttctttacagatctcaaagattcaaagaaacagaacgtccatcaataaagcaggtgattgttcggaaggaagatgttacttcaaaactggatgaaaaaaataatgcctttccttgtcaagttaatatcaaacagaaaatgcaggaactcaataacgaaataaatatgcaacagacagtgatctatcaagctagccaggctcttaactgctgtgttgatgaagaacatggaaaagggtccctagaagaagctgaagcagaaagacttcttctaattgcaactgggaagagaacacttttgattgatgaattgaataaattgaagaacgaaggacctcagaggaagaattaaggctagtccccccaagtgaatttattgccatcccaaaggatcagtttactttgtcagaaatccgcttgccctaaaaagcagattttgtctgcagtacggttcagaaaccagatgcagcaaattactattacttaattatacttaaaagcaggagctgaaaatatggtagccacaccattagcaagtacttcaaactctcttaacggtgatgctctgacattcactactacatttactctgcaagatgtatccaatgactttgaaataaatattgaagtttacagcttggtgcaaaagaaagatccctcaggccttgataagaagaaaaaaacatccaagtccaagaaaagcaacattcattcttcagtcatggccagtccaggaggtcttagtgctgtgcgaaccagcaacttcgcccttgttggatcttacacattatcattgtcttcagtaggaaatactaagtttgttctggacaaggtcccctttttatcttctttggaaggtcatatttatttaaaaataaaatgtcaagtgaattccagtgttgaagaaagaggttttctaggctgccctggaggagggcgactccaaccaaagagacagaccatatttgaagatgttagtggttttggtgcctggcatcgaagatggtgtgttctttctggaaactgtatatcttattggacttatccagatgatgagaaacgcaagaatcccataggaaggataaatctggctaattgtaccagtcgtcagatagaaccagccaacagagaattttgtgcaagacgcaacacttttgaattaattactgtccgaccacaaagagaagatgaccgagagactcttgtcagccaatgcagggacacactctgtgtttaccaagaactggctgtctgcagatactaaagaagagcgggatctctggatgcaaaaactcaatcaagttctttgtgatattcgcctctggcaacctgatgcttgctacaaacctattggaaagccttaaaccgggaaatttccatgctatctagaggtttttgatgtcatcttaagaaacacacttaagagcatcagatttactgattgcattttatgctttaagtacgaaagggtttgtgccaatattcactacgtattatgcagtatttatatcttttgtatgtaaaactttaactgatttctgtcattcatcaatgagtagaagtaaatacattataggtgagtttgctaaatcttaatttataagcctcattttcctagaaatctaattattcagttattcatgacaatatttttttaaaagtaggaaactctgagctgtcttcttggagctgtaggtcttgaagcagcaacgtctttcacgggttggagacagaaacccattctccaatctcagtagttttttcgaaaggctgtgatcatttattgatcgagatatgacttgttactagggtactgaaaaaaatgtctaaggcctttacagaaacatttttagtagtgaggatgagaactttttcacacagcaaatatatattggcttaaagcatgaggctgtcttcagaaaagtgatgtggacataggattgaatgtgtgagacttgggggttcaatattttatatagaagagttaataagcacatggtttacatttactcagctactatatatgcagtgtggtgcacattttcacagaattctggcttcattaagatcattatttttgctgcgtagcttacagacttagcatattaggttttttcctactcctacaagtgtaaattggaaaatccttatattaaaaaagtaaactgttatgaagctgctatgtactaataatactttgccttgcccaaagtgtttgggttttgttgttgtttgtttgtttgtttgtttttggttcatgaacaacagtgtcctagaaaacccattttgaaagtggaaaattattaagtcacctatcaccttttaaacggcctttttttaaaattataaaatattgtaaagcaggggtctcaacttttaaatacactttgaacttctttctctgaattattaaagttctttatgacctcatttataaacactaaattctgtcacctcctgtcattttattttttattcattcaaatgtattttttcttgtgcatattataaaaatatattttatgagctcttactcaaataaatacctgtaaatgtctaaaggaaaaaaaaaaaa

SEQ ID NO: 4586 - DNA, 376 bp, Homo sapiens
  misc_feature (1)...(376): n = a,t,c or g
ttgctgcatatagctgcctgtctactattaagagaactatccatnaaattaaggcattttgttatttcaagtgtaagaggggcaagaacataagggnattatnaaaaccccaagntgactcatttaaaaaaagaatgtttatctttgcatttggcaagagtatcttcaagataactaccacttttcaaagcactattgttgggtaggttttattaggggagaggacttagaaaacatgactttcctcacccaaaaccaaaaataaatgagggcttaaaaatatattatttaagaagatagtggccagaaataaagaccatgaccaacaagctttggggccatcaagatgaaaagacctttcctttnttcaanatct

SEQ ID NO: 4587 - DNA, 449 bp, Homo sapiens
  SIMILAR (107)..(355): 901254mologous to Homo sapiens 1-8D,accession number X57351,Smith-Waterman Score=400.
  misc_feature (1)...(449): n = a,t,c or g
ctggtgaggcaccgcnnttaaggttcagggcccccacgcgtccgcccacgcgtccggtgagggctcactgacaattattccggtaacccgatcaccgctggccaccatgaaccacattgtgcaaaccttctctcctgtcaacagcggccagcctcccaactacgagatgctcaaggaggagcaggaaggggctatgctgggggcgccccacaaccctgctcccccgatgtccaccgtgatccacatccgcagcgagacctccgtgcctgaccatgtcgtctggtccctgttcaacaccctcttcatgaacaccggctgcctgggcttgataacattcgtctactccgtgaaggcgtagggacaggaagatgggccggcgaacgcgacctggtgcccaaggctagggcctcccccggccaggggcctggaacattcggggcccctgattc

SEQ ID NO: 4588 - DNA, 421 bp, Homo sapiens
  SIMILAR (84)..(167): 961254mologous to Homo sapiens Novel protein (Clone AX56_28),accession number AAW85723,Smith-Waterman Score=148.
tcttaggcgtttcagaccacactgttcgtgatatttcgtgtgttttagctacaaacacttatctaagatgctgtcttcgcagtgccatgcctacaatggcaagcgtgaagctgtctacacttcatcccattgtgaatcatccacattacgaagatgcagacttgaggcctggttgcagtatgcttgaaatctgggatgtggaagacccttccaatgcagctaaccctcccttacgtagcatcctgctcgaagatgccaggctcgaagatgccagtatttcagaatagtgtgtacagagtattgaaggttaactgagaaggaaactacccattacactatggcacaatgccgtgtgtcaaaaacaatcaccctttggcttatttacattaataaaaatcacaagctttaataacagaaaaaa

SEQ ID NO: 4589 - DNA, 2069 bp, Homo sapiens
  SIMILAR (10)..(240): 881254mologous to Homo sapiens Novel protein (Clone AX56_28),accession number AAW85723,Smith-Waterman Score=337.
  misc_feature (1)...(2069): n = a,t,c or g
caagcatcaagctgtctacacttcatcccatttgtgaatcatcaacattacgaagatgcagacttgagggctcggacaaaaatagtttattctacatatagtcgaanatctgccaaagaagtaagagataaattgttggagttacatgtgaattattatgttttagaagaggcatggtgtgttgtgagaactaagtttatacttcaagatggaccaggagttctacaagctgctgagaaatgatgccagatggtaactcagatatacaagaaatactcaaatgcgctggaaatggcctggttgcagtatgcttgaaatctgggatgtggaagacccttccaatgcagctaaccctcccttatgtagcgtcctgctcgaagacgccaggccttacttcaccacagtatttcagaatagtgtgtacagaggtattaaaggttaactgagaaggatactaccccattttactatggcacaatgccgtgtgtcaaaaacaatccaccctttggcttattcacattaataaaaatcacaagctttaataacagacacttaaaaataagataaaaatggattggaaatttttctgattactaaaaggtaaattacttttctgttcattgaatgtcagccttattaagcttgtcatataagttattaaatcattcatgtcatactgcataaacaaatgttcatttcagaattttaaagagaaatgtatataaaagaacaatgaattttaataaatcaggggtatgtaagtcctttttcatccaactaggtgaattgcttcagattttctctagtaccagagggtacctcctcaaactctttgaaccacttaaggcagaagaatgcaagctctgaaatgacatccttaaaatgctgatactggtcacagcctctttacctctgtgaggaaattgtaacagtgtgtcttttaaggtgtttttattttaccagcccttaagaaagatctctaataccttttaatacttttttttaataatttcaagttgaagtgtttttaaaaacactttgttttgtaatgttttgaatctcttgagatgtgtttaccccactagatacatatttgccactggttagttctccatctaagctcaagaggttattcatctctctttagattccagtggcttttcttttaacatccaggtaaaacagaaactgctatggtatacaaccaagttttggggttaaacataatcagaaaagaaaatccagttaaatttatgaagtgagattttcagatcctagatcttgaataaaggaaaggtcttttcatcttgatggccccaaagcttgttggtcatggtctttatttctggccactatcttcttaaataatatatttttaagccctcatttatttttggttttgggtgaggaaagtcatgttttctaagtcctctcccctaataaaacctacccaacaatagtggcttggaaaagtggtagttatcttgaagatagatactcttgccaaatggcacagataaacattctttttgtctgctttataaatatgaaatatgccagatctatagtattttaatgtgcatctactttaaatgagtcatcttggggtttttataatccccttacattcttgcccctctacacttgaaataacaaaatgccttaattttatggattagttctcttatagtagacaggcagctatatgcagcaaaaccaataaagttatttttcaactttcatagttgtaaaatatcttataacagaatacaaaacagctaagaaaacatgccacattttattttaagcattttcaaataatttgtttttggtgtaagcacaggataaaaaaggagagcgtcaaagaaaagagactttaaaaaataacattcataaaaattaacaaagtatattttggatgatgtttttacaggaaatattttaaataagttggtagaacttttaaaatggtactgtattagctaataaaatattcagtacaaatatatgtttggatttatgcattaaaaaactaataaaattatttccaactttaaaaaaaaaaaaaa

SEQ ID NO: 4590 - DNA, 478 bp, Homo sapiens
  SIMILAR (55)..(222): 1001254mologous to Mus musculus putative,accession number AK017615,Smith-Waterman Score=288.
gttactatctttctcctcctgagtccatgggcgccatctttgaggatcctggcgcatgtcgttgtttatatcatcttcatgttggggtcatgtgcattcttctctaagacatggattgaagtgtctggttcctcagccaaagatgtagctaaacagctgaaagaacagcagatggtaatgaggggccaccgagatacctctatggttcatgagcttaatagaccaaaagtgaagttaagaaggtggaagggagaaggaagacattttacaaaaaggatactcttctactaaaagataaccccgcacggcatttcacacttgcctacgtcaccctgctttccacgcacctcctcagagggaggggctgttattgttcctgttttatgaaaaaagccgagagaggctacagaacctgtttgatgtgatagctaattatggtccgcggagcctcataccgagtcgggcctgtgactccgag

SEQ ID NO: 4591 - DNA, 2765 bp, Homo sapiens
  SIMILAR (390)..(650): 891254mologous to Homo sapiens Sec61 alpha form 2,accession number AF346603,Smith-Waterman Score=385.
  misc_feature (1)...(2765): n = a,t,c or g
gcgcgttgatctgcccattaagtcggcccgttaccgaggacagtacagcagctaccccatcaaactcttctacacctccaacatccccatcatcctccagtcggccctggtgtccaacctgtatgttatttcccagatgctgtctgttcgatttagtggcaactttttagtaaatttactaggacagtgggccgatgtcagtgggggaggacccgcacgttcttacccagttggaggcctttgttactatctttctcctcctgagtccatgggcgccatctttgaggatcctgtccatgtcgttgtttatatcatcttcatgtttgggtcatgtgcattcttctctaagacatggattgaagtgtctggttcctcagccaaagatgtaagctaaacagcttgaaaggaacagcagatggtaattgaggggccaccgagatacctctatgtttcatgagcttaataggtacatccccaccgcagctgcgtttggcggtttgtgcattggcgccctgtcagtgctggctgacttcctgggggccattggatctggcactggaattctgctagcagtcactattatttaccagtattttgaaatatttgttaaagaacaggccgaagttggtgggatgggtgctttgtttttctaaatgttcaaatattttcattttgtgcgtgtgaaaggggaaaacactttgacggatcgttttttgtcagatgacactgggaggctccccttttctccccctcacagtttcttgtttcgagtgcctgactgacccgtttctgaaatgggcaccgagcctaagtctgtgtgcagcattagtacccgctgccttaaaactcaagtttacattattcattaaaaaaagtacatctagtgttgcctgtaatgctggaaaccagtgtatctaccttgctgtgttaaatcatgacagtgagacggtgagatggattcgttttgcacacaacattcaaaacacttcatattgcccccacttgttgaaaaataaatgtagttcaaattgccactttccagtatttttgagcttatttaatgagttctggaacatttatatctaatctatattttagataattactttttatacttttttaactcatggtatcccactcccccaccccccacctcattttttatttgtcccttctcaaagcagccacttagcccacatgggcgaaaaccaagtctccagttatttctgccacaactgcttctaaggcctcctcccnttctccgtcctcctcttcctcttcctccttttccttctcctcctcctctcttcccagtgacagcaatcatcgtgctgtttgcctgtattggctatgccttctaactccaaccagtcacttgagaatattctttcaagattatgggccccgattcttttctgtttaaatccctaaagcaaagatctaattcctcaagcaaatggtctggtagttcagtgggggtgaacaatgaatatattcatgctaggaatttgtgtctgttgttgtactcacagcagcaacatgagtgtaaacagtagacaataaacttttatttaagaaaactgattcagttgtgttggaaaaaataaagaaatctgatattaaacgttttctaagatcatttgtataggttcagtgtattcataagaagtccaccctgagatgcctgtaaaaagtcaaatcgtaattacacttcaagcctttaatccttaaattattgacagatagatagatagtgacccaacttaaggggtaatcatatatgtgacttaacatttggggagggaaacagggaaaacaggtggtctcaaaaacaaacaatatttcccaggtctccattttgaaagaagcattagatcttgggtaaatcattttgaaaacctatgtgctttatttcccaaaaagatcaaacttaatttttaaaagacacccttttcagaagtatggggttttcattgctgtttagtttcttaggtgtggtatgtcttacgtagcttatgcttacaaagccaaataatcgcagggcaaggcagataaaggcaggcaggatagtgacagtggctcggtgagcatccgccaagggcctcagaccactgttaccattaaaaactttccaccccagtgttatgacgtccgattttttttttccctttaagaaggtggaaatattggcttttaatacatagggaaaccttcagttttttaaatgcagggcaaataaacattttttaaacagtgccagccagactgccagttctcaaacagactgaatttccaaagcacaacctttttcatgtttataaaaaatagaaatggcatttagggatacattctaggatttggctctgacttctaagttgcactcttaggaagaaggagaggataagcttaggtcagctgcagaggtcattcccatgggggagtggcctgggggaggacctggggctatgtggaacagcactgggctgcgcccgtctacggatgccttctctcttgatttcaatgattgatagcatgtggctttcagacctaaggaagagttagagctttggagaatcacaatgcctgtgattgaaatcaggatttaaaaaagggttagaggcataggggaaggctaccattacaggaagtagttggatcttaattttcacatgtatagggctagacagcttcatctgtaaagttctgtatttccataattgtcctatctttaggaagtccagtgtaaagatcttccagctcgtgcc

SEQ ID NO: 4592 - DNA, 1066 bp, Homo sapiens
  SIMILAR (173)..(526): 481254mologous to Homo sapiens 26S proteasome subunit p44.5,accession number AB003102,Smith-Waterman Score=196.
tgttctattttgtattttttttttctcttagagactaccataaaatagcatttttaaaaatttatttttagagatggaggctctctgtgttgcccaagctggacttgaactcttgggctccagcagtcctcccacatgagcctcccgagtgactgggactccagggtgcgtgccaccaagccaaacttccctttcagttcttgacattccttttctgctttgtatcatgcatctccccagatctcccctaaacttcattcaaccatgtaggttttataaggggccagcaggactatctaggggaggcagggagtagcatggactttaaagtgatttctctgtggccaatctctggcaactggggttcctttggcaggctctgacagattaccgggcagagcttccggggatggacccaatcatcagcacacacttggccaagttgtatgataacttactagaacagaatctgatccgagtcattgagcctttttccagagtacaggtgagaaccctctggggactccatttctggccaggcattctcactgtagccacctcccttccacacctgtccagaatgggaactcacttctaggggtgtgcctggtgggcaagaggccaccaagagcttgggcctctgttgataaaatgaacaaaaatcgaggagagagatgctgtggttagaggcatgtgggttgcccctgcatgtgttctgagcagtttcctcctcgcttttagtcactgcatgtgttgtacctgttttctgtattgggtgtgcgggataagagtctgtttattgtgtgtagcagtgaagggcaggcagatgggcagagaacaagagacttaagcacggccaaggagggtcttacattaaaattttgagaaatacagcagatctccccctgttccctcccttctcttattggaggcaaaagtaaaactttcaggggtggagtctctctgccttttcttttagattgaacacatatttaggcttattcaactcttccaagaaggagttttaaggccttctatgaagaaatgacacggtggcaagaagggt

SEQ ID NO: 4593 - DNA, 1439 bp, Homo sapiens
  SIMILAR (37)..(462): 681254mologous to Mus musculus putative,accession number AK011185,Smith-Waterman Score=496.
  misc_feature (1)...(1439): n = a,t,c or g
cccacgcgtccgcccacgcgtccgcccacgcgtccgctcttccagaccgaggagcagggacccgagccccaggagggcgcggctaaggtggcagctgcgctggaaaccaaggtggtgcccgagacccccaaagacaccaggtgtgtggaagcggccaaggacgcgtcctcggtcaagcgcaggaggctcaaccggattcccatcgagccccatcctaaggaggagcccaagcacccggagaaggagcagcaggaaggcgtccccaacagcgacgagggctactgggactccaccacgccaggcccagaggaagacagctcgagcagcgggaagaaggcgggcatcccccgggatagctacagcggggacgcgctctatgatctctatgctgacccggacggaagcccagcaacccttcctgggagggaaggacaaacgaggagacgtcctccctgtcccggttaaagcccgtatctccaggcaccatcacctgtccactgcgaacaccaggcagcttgctgaaggactctaagatccctattagcatcaagcacctgaccaaccttccatctagccatcccgtggtgcaccagcaaccctccaggagtgagatgcccagaacaaaaatcccggtttccaaagtgctggtccgcagagtcagcaaccggggcttggctgggaccaccatcagagcaacggcctgccacgacagtgcccaaaaagttgtgaggtcttccaggccaaggtggatgggccccatgccaaggaatacaacttttccctgggaaaccactaaagtaagttttgcttttcctaaagaaagtcttttaggacaccacccgtcccacgccctgctccagagcgtggaccgaggaggtctttgtgccctgagtagggaccggataacaccagaaagagggatgctacacgggggtttctcctctcaagataagtccctgagaattattttcaagcacttttttcttttttacctttaagtttttcttccttttgctttaatatactgaacacttgggaagtcacctttacttgcctttgcagaaaacagaacttaggccaaacctaagtaaggagtcatgcctgggatattggggataagccagtgtctaggagggcctggaagggaaccgctggaaggaaccaggagggaggatctcctntttcccaaggacacgtttccttccttcccttctttcctctttcctttccagttaaaaaaaaacaaaaacaaaaacaaaaccctttgctgtatcactgtgtggaaaatacctccaaagctgaaagagccaggtatttacctgatgagcagaggggaccactgattggcagaaaacttccctacgttcagttgttagatatgcaaattgataaggatctaacactaggaaaataaaggcgagttttggtttggttggttt

SEQ ID NO: 4594 - DNA, 399 bp, Homo sapiens
  SIMILAR (1)..(264): 691254mologous to Homo sapiens PRO2550,accession number AF130089,Smith-Waterman Score=288.
gtgcagtggcatgatctcggctgaccgcaacctccacctcccgggttcaagcgattctcctgcctcacccctcctgaagtagctgtgatcataggtgcccggccacccacacccgactaatttttgtgttttttagtagagacagggtttcactatgttggccaggctggtctcgaactcctgacctcaggtgatccgcccaccttggcctcccaaagtgctgggattgcaggagtgagccaccacgcccggcctaattttctaatttttttttttaactaaagaagggcccccaggaagtcaaaagtgcctataacccatgaaagtctaaatgaggacaacggaggctgggcatggtggctcactcctgtaatcccagcactttgggaggccaaggtg

SEQ ID NO: 4595 - DNA, 1321 bp, Homo sapiens
  SIMILAR (41)..(289): 511254mologous to Homo sapiens Human secreted protein, SEQ ID NO: 7870,accession number AAG03789,Smith-Waterman Score=190.
  misc_feature (1)...(1321): n = a,t,c or g
ttttttggtagcaagagtagcgggcagtgggggagatggtcttactctgttccccaggctggagtgcactagtgtcatcacagctccagcctcaatttcctgggctcaaggcgatcttcccgcctcagcctcccaagtagctcagactgcaggggcatgccatcacagctggccagtttttacgtcttgcgtagagatgggttttccctgtgttccctaggctgggctcgaactcctgggctcaagtcctcctgcctcagcctcccaaaatgttcagattacaggcatgaggcagcatgccaatcctgtttttgcattttagtaacacaaattgtaatgttaactttttaaattatgaaagcatctaaaatataaaattatttgtaaccccactgtccttttgggcttctataaatgaatatacatctaaaatgtggggggtttagcttaattgattgttttccataggaaactagggttttatggggaaggatgggttgggatagacttgttttcactttaaagggtctggatttgtgtagggnccaaaccccaccatatggtaatcgtgcccagtctgttctctggcatgacataattttccagcaatagctgtgtggtttttggtaancccctatcatcctagtcagttccaagatcttgcaacactgtgtgattcctttgctccgtagttcagtcttgttgaacatgacacaggtgtttactttcctgttcttgcatctagtttcattctaataatgttcctctgttgaaaaagctggcttcaatttattgagccaagatgctggtgttatccatctaacataaaacctatcttataaataaagtgttgacacatgtaatgagtactgtactgaaaaatgggtgggtatgtatatggtttgtactgattatgtatcgcttttataccatcaaaaagttgaaaaatcataaagttgaatcatcctaaaatgggtacattctgtactatgtttccaaggcttcggaagtgttgcatacacattcctagccagctgatagtgctaggagccaacagtagtctcccccgggggccaagaggagggcgaaatctctactatggtatatgatgttctcgtgggccaagtatgagggtgatatttcattgttggcactgggtttctggaatccatcctcttcaccagggagatttaatgaaccaaatgagatctgatgggagaaatttgagtgtaacgtttttgttctgaaggaagtaattgagttttagttcatttgttttttaggaatcgtaataattaaaatttcattttaaatgccatga

SEQ ID NO: 4596 - DNA, 603 bp, Homo sapiens
  SIMILAR (274)..(408): 841254mologous to Homo sapiens Human myelin oligodendrocyte glycoprotein gene,accession number AAZ29204,Smith-Waterman Score= 210.
gtctcactctgttgcccagattggagtacagtggcgtgatctcggctcactgcaaccttcgcctccgggattcaagcgattttcctgcctcagcctcccaagtagctaggactacaggcatgcaccagtacacccagctaatttttttatttttagtagagatgtggcttccccgtgttagccaggatggtctcgatctcctgacctcatgatctgccctcctcggcctcccaaagtactgggatcacaggcatgagccaccgtgcccggcctaatttttgtatttttagcagagacagggtttcaccatgttggccagtctggtctcaaactcctgacctcaggtgatccgcccacctcagcctcccaaagtgctgggattacaggtgtgagccaccacgcccggcctgaagtttacttcttctgcccttaaatgccactggcctctttggggttgatgttggtcgtgtgagcaaggggaggtagaattgaagagaaagccatgcctcttgacccacccttcgtttgccatcttgtttcccttaaaaagaaatagtagcttctgttctgttgactttatcctatcaacagtacctcgtcctg

SEQ ID NO: 4597 - DNA, 444 bp, Homo sapiens
  misc_feature (1)...(444): n = a,t,c or g
ccaggttttggagaatccacacttcccaagggggtgagctccgcccccctcttggtgatatccttcggggttttataaatccaaccgcccccgggcatgttttaacccccggagcctggccccccgtgggccccatcaaggtttttttttccccccgggacctttatgtcccacccccaccctttttgggccccccgtatgggtcccgattttttccttcagagcattttcaaaaagtccaaccgttgaatcagcctccttttttgtccttaaaaaaccccccttaaaggttcccatttttttttcccnnnnnnnnnnnnnnnnnnnnnnnnnnnnnnnnnnnnnnnnnnnnnnnnnnnnnnnnnnnnnnnnnnnnnnnnnnnnnnnnnnnnnnnnnnnnnnnnnnnnnnnnnnnnnnnnnnnnnnnnnnnnnnnnnnnnnnnn

SEQ ID NO: 4598 - DNA, 950 bp, Homo sapiens
  SIMILAR (445)..(335): 831254mologous to Homo sapiens Human secreted protein encoded by gene No. 8,accession number AAY38393,Smith-Waterman Score=151.
  misc_feature (1)...(950): n = a,t,c or g
tttttttttttttttttttgtggtccaaaggacagtttatttaaaacaaacgtgatgaggtataggaagaagaaaagaaggagaacaacaattctaacataaaaacacaggaagcatctcaaacttaaaaaagaaaaaaggagtcgggggcaatggaggaagctatgtctcataccaaactgctggacctccaaatttgaatnacttacattccaaaccttacaaaatgagcatttcaagtcagcacttaagccagtgttattagatttttcttacaaaaagttaaagctaccaaacttcacatttttaaactgtaccatagcaaaaacctttaagcttttttttttccaagttggtccgagtgcaagctggtaaaagagattttttttccaaacacaaacaagaacatgtattccaaagacaatggaatataatactgataaaaacacaaacatagtgcttaagaaaagatggggtgaggtggagatgtagattgggcaggaacaattttcttagtaaataaggagctgcaatctttagaggcaacatgggtatgctagaaaggacactggaataagaatcagaaagacctggatctgaatcatggctctgccatattctagccacatgaccttgagcaatagacttttacttctctgagcctcaaattttcaacatctgtaaaaaatggaggataaataatacctaatatctccccagcactattaaagtttcctaaaagatatagggctattcaagattatctacttcttcttttttttttttgagacgggggtctcattctgtcaccccaggctagagtgcagtggtgagaccatggctcactgcatccctgacctccctgggcccaggtgatcctcccacttcagcctcctgacaagctgggattacaggtgtgcaccaccatgcccgactaatttttttttttt

SEQ ID NO: 4599 - DNA, 627 bp, Homo sapiens
  SIMILAR (14)..(274): 471254mologous to Homo sapiens 1-8U,accession number X57352,Smith-Waterman Score=159.
  misc_feature (1)...(627): n = a,t,c or g
cgacgcgtgggccatgaatcacactgtccaaaccttcttctctcctgtcaacagtggccagccccccaactatgagatgcatcaaggaagaacaccgagttggctgtgctggggccgccccaacaaccttgttccccccaacgtcaacgttgatccacaatcggcagcgagacctcccgtgcccgacccatgtcgtctggtccctgttcaacacccctcttcatgaaccccctgctgcctgggctttcaataagaattcgcctactccgtgagagtctatggacaggaagatggttggcgacgtgaccggggccacaggcctatgcctccaccgccaagtgcctgaacatctggggccctgattctggggcatcctcatgaccattctgctcatcgtcatcccagtgctgatcttccaggcctatggatagatcaggaggcatcactggaggcccaggagctttggccatgaancctgtatcccacgtactccaactttccattcctcggcctgccccccggagcccgaagtcctgtatcagcccttatatcctcacacgcttttctacaatggcattcaataaagtgcacgtgtttctggtaaaaaaaaaaaaaaaaaaaagattt

SEQ ID NO: 4600 - DNA, 2501 bp, Homo sapiens
  SIMILAR (1956)..(2222): 941254mologous to Homo sapiens FLJ00032 protein,accession number AK024442,Smith-Waterman Score=477.
atggaggatgcgtgggggattcgcaaagagacaggaagagtcaaagaagaagctgagaaagtaacaggatggggaaacaactggagaaatgtagagaaaagctccatgtccagaaaggtgaaggcagcaagaccaggattcaagaagttgcccatgacgtcagatatccctcctaaatgtacaatcaaggatttgctaccaaaagagaagagcagtacagaagcagtattccacacagtggtgttggaaagacacgaaagccctgacattgaagacttttccttcaaggaaccccagaaaaatgtgcatgattttgagtgtcaatggagagatgacacaggaaattacaagggagtgcttatggcccagaaagaaggtaaaagagatcaacgcgacagaagagacatagaaaacaagcttatgaacaatcagcttggagtaagctttcattctcatctgcctgaactgcagctatttcaaggtgaggggaaaatgtatgaatgtaatcaagttgagaagtctaccaacaatggttcctcagtgtcaccacttcaacaaattccttctagtgtccaaacccacaggtctaaaaaatatcatgaacttaaccatttttcattactcacacaaagacgaaaagcaaacagttgtggaaaaccttataaatgtaatgaatgtggcaaggcgttcactcagaattcgaaccttacaagtcataggagaattcatagtggagagaagccttacaaatgcagtgagtgcggcaaaacctttactgttcgttcaaatctaactattcatcaggtcatccatactggagaaaaaccttacaaatgtcatgagtgtggcaaggtcttcaggcacaattcataccttgcaactcatcggcgaattcatactggagagaaaccttacaagtgtaatgagtgtggaaaagcctttagaggacattcaaacctaactacccatcagttaattcatactggagaaaaaccgttcaaatgtaatgaatgtggcaagctcttcactcaaaattcacaccttataagtcattggagaattcacactggagagaaaccttacaagtgcaatgagtgcggcaaagcctttagtgttcgttcaagcctagcaatccatcagacaatccacactggagaaaaaccttacaaatgtaatgaatgtggcaaagtctttaggtacaattcatacctcggaaggcatcggagagttcatactggtgagaaaccttacaagtgtaatgaatgtggcaaagccttcagtatgcattcaaacctagctacccatcaggtcatccatactggaacaaaacctttcaaatgcaatgaatgcagcctaggttttcactcaaaattcacaacttgcaaatcatcgaagaattcatactggagagaaaccttacaagtgtaatgagtgtgggaaagccttcagtgttcgttcaagtctgactacccatcaggcaatccattctggagagaaaccttacaaatgtatcgaatgtggcaagagcttcactcaaaaatcacaccttagaagtcatcggggaattcattctggagagaaaccttacaagtgtaatgaatgtggtaaagtcttcgctcaaacatcacaacttgcaaggcattggagagttcatactggagaaaaaccttacaagtgtaatgactgtggcagagcctttagtgatcgttcaagcctaacttttcatcaggcaatacatactggagagaaaccttacaaatgtcatgaatgcggcaaggtttttaggcacaattcataccttgcaactcatcggcgaattcatactggagagaaaccttacaagtgtaatgagtgtgggaaagcctttagtatgcattcaaacctaactacccataaggtcatccatactggagagaagccttacaaatgtaatcaatgtggcaaggtcttcacttcagaactcacaccttgcaaatcatcaaaggactcacaccggagagaaaccttaccgatgcaatgagtgtgggaaagccttcagtgttcgatcaagcctaaccacccatcaggcaatccatactgggaaaaaaccttacaaatgtaatgaatgtggcaaggtctttactcaaaatgctcacctggcaaatcaccgaagaattcatactggggataaaccttacaggtgtacagagtgtgggaaagcctttaggagacagggtgtcactcctgggcccagtctggagtgcaatggaacaattctggcttacagcagcctcaagtttgtgggctcaagtgatacccacattagcctcctaaggagccaggatgacaggcaggtgctaccacacctggctaatcccaatttcagagaaggtctcctgcctgcctttctgctgctctgttcagactctcacttcctgcagttctgcagtcagtttgccccacgcaagacccaaggatctgggtctgtgaataatattcaagccaacatcattgccaagtga

SEQ ID NO: 4601 - DNA, 3539 bp, Homo sapiens
  SIMILAR (2271)..(2315): 331254mologous to Homo sapiens FLJ00032 protein,accession number AK024442,Smith-Waterman Score=42.
  misc_feature (1)...(3539): n = a,t,c or g
atgccgcatcaactgggcccgaacctggtcccagatatccctcctaaatgtacaatcaaggatttgctaccaaaagagaagagcagtacagaagcagtattccacacagtggtgttggaaagacacgaaagccctgacattgaagacttttccttcaaggaaccccagaaaaatgtgcatgattttgagtgtcaatggagagatgacacaggaaattacaagggagtgcttatggcccagaaagaaggtaaaagagatcaacgcgacagaagagacatagaaaacaagcttatgaacaatcagcttggagtaagctttcattctcatctgcctgaactgcagctatttcaaggtgaggggaaaatgtatgaatgtaatcaagttgagaagtctaccaacaatggttcctcagtgtcaccacttcaacaaattccttctagtgtccaaacccacaggtctaaaaaatatcatgaacttaaccatttttcattactcacacaaagacgaaaagcaaacagttgtggaaaaccttataaatgtaatgaatgtggcaaggcgttcactcagaattcgaaccttacaagtcataggagaattcatagtggagagaagccttacaaatgcagtgagtgcggcaaaacctttactgttcgttcaaatctaactattcatcaggtcatccatactggagaaaaaccttacaaatgtcatgagtgtggcaaggtcttcaggcacaattcataccttgcaactcatcggcgaattcatactggagagaaaccttacaagtgtaatgagtgtggaaaagcctttagaggacattcaaacctaactacccatcagttaattcatactggagaaaaaccgttcaaatgtaatgaatgtggcaagctcttcactcaaaattcacaccttataagtcattggagaattcacactggagagaaaccttacaagtgcaatgagtgcggcaaagcctttagtgttcgttcaagcctagcaatccatcagacaatccacactggagaaaaaccttacaaatgtaatgaatgtggcaaagtctttaggtacaattcatacctcggaaggcatcggagagttcatactggtgagaaaccttacaagtgtaatgaatgtggcaaagccttcagtatgcattcaaacctagctacccatcaggtcatccatactggaacaaaacctttcaaatgcaatgaatgcagcaaggttttcactcaaaattcacaacttgcaaatcatcgaagaattcatactggagagaaaccttacaagtgtaatgagtgtgggaaagccttcagtgttcgttcaagtctgactacccatcaggcaatccattctggagagaaaccttacaaatgtattgaatgtggcaagagcttcactcaaaaatcacaccttagaagtcatcggggaattcattctggagagaaaccttacaagtgtaatgaatgtggtaaagtcttcgctcaaacatcacaacttgcaaggcattggagagttcatactggagaaaaaccttacaagtgtaatgactgtggcagagcctttagtgatcgttcaagcctaacttttcatcaggcaatacatactggagagaaaccttacaaatgtcatgaatgcggcaaggtttttaggcacaattcataccttgcaactcatcggcgaattcatactggagagaaaccttacaagtgtaatgagtgtgggaaagcctttagtatgcattcaaacctaactacccataaggtcatccatactggagagaagccttacaaatgtaatcaatgtggcaaggtcttcactcagaactcacaccttgcaaatcatcaaaggactcacaccggagagaaaccttaccgatgcaatgagtgtgggaaagccttcagtgttcgttcaagcctaaccacccatcaggcaatccatactgggaaaaaaccttacaaatgtaatgaatgtggcaaggtctttactcaaaatgctcacctggcaaatcaccgaagaattcatactggggagaaaccttacaggtgtacagagtgtgggaaagcctttagggtaagatcaagtctaactacccatatggcaatccacactggagaaaagcgttacaaatgtaatgagtgtggcaaggtcttcaggcagagttcaaatcttgcaagtcatcacagaatgcataccggagagaaaccttacaaatgagtgtggtgaggtcattaggtacaattcactcctttcacatcagttaatttcattcttgacagaatccttacaaatgtagtgacagtggccaatccctcatgagttgaagcattaatagatatgagaggccataagcaagagacatcatgtaaacatatgtggcagagggtctatccaggcctcgcaggttactaggcatcaagattttatatctttgatgaaacgaaacaaatgtaatatgcatcctgaggccattacccagtgaccgatggtaagtgaggattcctaggaggaataacagtctctggtttccctgtttgcctttgatattatacactgtagaatactcacaagtccaaatatgctaaaaattatatatttttaactcacatacgaaaaggttgcaggatatttgtagggcagtcagttaccttcaccttatgaaaatgtttcacttgagttatttgangggttttttgggaaagcctacttttgcgtttcaaatgtggaactttgaaatcttattgtgcatccttacacaccttccatggtgctttcttggaaagatcattgggatggaaggatcattgattgggtgaagatcattgattaggtgaaggattatttctatccaatttgtgaagaaggaggactttgcttttaaaattaagtatcatctgaattagcatttggggagtgggcgaaaaacaatgtaaaacttatgatgtcactcaccattctgataatgttcaggggtgcctttctcctaccaggagagtactgtggcttagaggaaagaaatggtctatcaactgaacatgaaatggagcaggccaagaccttaggacattgggatttttgtgggaggagagtaataggtaattagacactgattgtgtggtagaaatactgcaggggaaaaggtcgcccctcttatgcatcaaaggagcaatacctgttgtttagcaaaagagtgatgaaaaattgatcttgttttgaaattgaagagagaggccaggcgcggtggctcacacctgtaatcccagcacttttgggaggctgaggcaggtggatcacctgaggtcgagagttcgagaccagcctgacccaacatgggagaaaccccaattggtactaaaaatacaaaattagccgggccgtgggtggccaggtgcctggtnaaccccagctacttgggaggctgaggcaggagagtgcttgaacccaggaggcggaggttgtggtgagccaagatcatgccactgcactccagcctgggcaacaagaacaaaactccatctaaaaaaaaaaaaaaaaaa

SEQ ID NO: 4602 - DNA, 436 bp, Homo sapiens
  SIMILAR (267)..(347): 551254mologous to Homo sapiens Human secreted protein, SEQ ID NO: 4433,accession number AAG00352,Smith-Waterman Score=69.
  misc_feature (1)...(436): n = a,t,c or g
cccctaaaaaaaattattttccccttcaccttaaggggcccaaaacaaagggcgtttttttccannnnnnnnnnnnnnnnnnnnaaaaaggagtttccctttgtaacccaaggtggaatgccgtggggccatttgggtttccttccacccccccctcctgtggtcaaatgatttttgtgccccaacccctggagttaatgtgatttcaggcccccctccccccggccgggttatttttgtttttttaataaaaacaaggcccttttggccagggtggtttttaactcctaaccccaggtgatccccctgtttcaaccccctaaaatggtgggatttcagggattaacccccctggccggcccnnnnnnnnnnnnnnnnnnnctttattgagacagtcttgctctggagttcagtggcatgatatgatctcggctca

SEQ ID NO: 4603 - DNA, 873 bp, Homo sapiens
tctggatgcatttgaaaaccataacgtatgatttctttttctttctttccctcctctctcatttaagatgaccttgaatgatgccatgaggaacaaggcaaggctgtcaattacaggaagtactggagaaaatsgacgtgttatgactccagaatttccccaaggcagtgcatgctgtcccctttacgtgaagtcctggccatgggaatggaatgtccagtgtgactgaatctctcggtggattgataaggacccttttgagtgccctaccacaatggttttcctgtgtgtttattgtccaaagtggtgagaggcatcccagtatccttgaagacttttcctttcagcccaagaattccttaaatatgtggagttccatcttgaaattgtaaggaatgattaattaaaacacaacatcctttttcctactcggagttacagaccaaagcgtggtggacatgcacagctaacatggaagtactataatttacctgaaggtctttgtacaggacaacaaaccctgttttctgcagcccactattgttagtctcttgattcataatgacttaagcacacttgacatcaactgcatcaagatgtgacatgttttataaaaaaaggaaaaaaaacatttaaaactaaaaaatatttttaggtattttcacaaacaaactggcttttaaataaatttgcttccatattggttgaataagacaaaaacaattaaactgagtgggaagtgaataaaaaaaggctttaggtatcgattccatatttttcaaagccaaatatgtaaatgctaaggaaagtaaacaaagaggaggattccaatcttgtaatttaatattgttattaaaactttaatgtatccta

SEQ ID NO: 4604 - DNA, 620 bp, Homo sapiens
  SIMILAR (474)..(259): 751254mologous to Homo sapiens Human signal peptide containing protein HSPP-67 SEQ ID NO:67,accession number AAY87290,Smith-Waterman Score=252.
  misc_feature (1)...(620): n = a,t,c or g
tagagacagggtttcgccatgttgcctaggctggtctccaacctggtctcctgggctcaagcgatccgccgcctcggcctcccacagtgctgggattccaggcgtgnntaccgcgcccggcctatttacttttcttactaagctggggatcaccgtcgccctcggcttggcaggaaggcgggggtaggggagcggtgggaaaggggggtgggcgacgactctgatagagggaaaagaggaagggaaagttggggcttactgcagggcaagctccttaggagaaggtggggaggaggaaggagggaggtccaggcccttcttccatcccacgtcctccacttccccaagtgcaaagaagaaaagaggtacagaacacccagaggtgcccctcgattccgtcttgcactttgcccttctcccaccgtccagcaataaagcgagagaaacaagtgcaggaaactggccggcagtcatgggagaagccaaaaagacaggtgagcagcgcgtccgcctcccgcgcacaggtgagggctcacttctgcctgtcggcggcggcacacacaggaaagagccaagcgcgtgcacgcgggcccgcccctaggccttgcggcggcttcagc

SEQ ID NO: 4605 - DNA, 1356 bp, Homo sapiens
  SIMILAR (341)..(216): 1001254mologous to Homo sapiens Human signal peptide containing protein HSPP-67 SEQ ID NO:67,accession number AAY87290,Smith-Waterman Score=217.
  misc_feature (1)...(1356): n = a,t,c or g
ctagtctcgagttttttttttttttttttttgtagagacagggtttcgccatgttgcctaggctggtctccaacctggtctcctgggctcaagcgatccgcccgcctcggcctcccacagtgctgggattccaggcgtgagctaccgcgcccggcctatttactttttttactaagctggggatcaccgtcgccctcggcttggcaggaaggcgggggtgcaagaagaaaagaggtacagaacacccagaggtgccctcgattccgtcttgcacttgcccttctcccaccgtccagcaataaagcgagagaaacaagtgcaggaaactggccggcagtcatgggagaagccaaaaagacaggagttcagtggcatgaccagggctcactgcaaccttgatctgggctcaagtgatcctcctacctcagcttcctgagtagctaggaccacaggtgtgcaccaaccacacccgactaatttttgtagagatgagatcccactatgttacccaggctggtcttgaactcctgggctcaggtgatcatcctgccttggctttcccaaagtactgggattataggcttgagccaccgtgcctgggcctgtgatcagaattctcattttttttagtcactaaaaatgctgggggggcactccattctccattatgtggattagttcacattggcatgcttgtattcaaaacatcatattattaccccacaaatatatacaaaaaactttaaaattttaagtattaattgctcaggaaaaaattaaaatgctggggtgctgaaatctcaagggccccattacaaaactccttaggaacctcgccctctctctgctgtaaggactggttccagaatgagagaatttaaaagacattccccgcccaaaatgttcataatgtcaccccgggaaacctgcgaatatgttatattacatgaccccagggagaaagtnaaggttgcagatggccagtgaaggtttnctcaatgggctgaccttaagataaggagatgatcctgggattatctgggtggacccaatgtaatcacaagggtcccttaactgtgggaatagtgaggtggcttgagtcagaggcagagtgatgcaatgacttgaaagactttaacccagcccatcacccggcttttgaataccgggaagaccggtcattgagccagggggattgcaggcaggctctgggagctgaaaaaagcaagaaaatggattctcccctggagcctccagaagggatgcggtcctgccaacccccttgtcagtgagccatttcagatttctgacttccaggactgtaagaaaataaacttgtcttgttttcagccacca

SEQ ID NO: 4606 - DNA, 844 bp, Homo sapiens
  SIMILAR (15)..(560): 431254mologous to Chlamydomonas reinhardtii 1 beta dynein heavy chain,accession number AJ242523,Smith-Waterman Score=370.
ccagggtctcatcagtcatgtctacaagcctggaagagattttcaattgcatctttgatgcccatgttcctccgctctggggaaaggcatacccctcacaaaagccattggctgcctggacccgggacttggccatgcgtgtggagcagtttgagctgtgggccagccgggcccggcctcctgtgatcttctggttgtctggtttcacctttcccactggcttcctcactgctgtgctgcagtcttcagctcgccaaaacaacgtttcagtggacagcctctcctgggagtttatcgtttccactgtggaatgacaagcaacctaagtgtatccccccaaggatgggtgtctgggtccggggcctgtacctggaaggtgctggctgggaccggaagaactcctgcttggtggaaggcagagcccatgcaagcttgtttggctcatgcccacgatccacttccggcctgcagagagccgcaagaagagccccaagggcatgtactcctgccccctgctattactatcccaaccgggcaggcagctcagaccgagcctcctttgtcatcggcattgacctgcggtctggggccatgacacctgatcattggatcaagaggggcactgctctactcatgagcctggacagctgagacctcctccttttctccgcttgagagagagggtcagggactccaggagctaagacagatgttgcacctaggactgaggccggacctcactcagactttgaccttggccgaatttgtgtgatgtggccctggagatacctagttgtgttagccataaaagtgaaagagttgtattggaaaaaaaaaaaaaaaa

SEQ ID NO: 4607 - DNA, 497 bp, Homo sapiens
  SIMILAR (131)..(166): 1001254mologous to Homo sapiens similar to nitrogen permease regulator; similar to P39923 (PID:g730170), match to AA233630 (NID:g1856833) and AA399402 (NID:g2053147),accession number AC002481,Smith-Waterman Score=58.
tttaccaaagacaaggaggatttcttcaactcacagtgtgacctcactacacaacaaatcctgccctacattgatgggttccgccacatccagaagatttcagcagaggcagatgtggagctcaacctggtactacggcgttgtgacactggtgtccatcctccaggaagctgatccagttcgggcttatgaagaacctcatcaggcgactacagaagtatcctgtgcgggtgactcgggaagagcagagccaccctgcccggctttatacaggctgccacagctatgacgagatctgctgcaagacaggcatgagctaccatgagctggatgagcggcttgaaaatgaccccaacatcatcatctgctggaagtgaggctggtagtgactggatggacacattgctgtgggtagtccctcctactaggaggcttgtcatactgtctagatgttgactcttagttctgtaaataaagacatccatttcaaacaaaaa

SEQ ID NO: 4608 - DNA, 1370 bp, Homo sapiens
  SIMILAR (223)..(816): 1001254mologous to Homo sapiens similar to nitrogen permease regulator; similar to P39923 (PID:g730170), match to AA233630 (NID:g1856833) and AA399402 (NID:g2053147),accession number AC002481,Smith-Waterman Score=1021.
gacgcctctgcgcgaggaacgaggagctacgggcctgggcccggttattgccatgggcagcggctgccgcatcgaatgcatattcttcagcgagttccaccccacgctgggacccaagatcacctatcaggtccctgaagacttcatctcccgagagctgtttgacacagtccaagtgtacatcatcaccaagccagagctgcagaacaagcttatcactgtctagagagcagcttcgtgtccatggaggagagcaagcagaagttggtgcccatcatgaccatcttgctggaggagctaaatgcctcaggccggtgcactctgcccattgatgagtccaacaccatccacttgaaggtgattgagcagcggccagaccctccggtggcccaggagtatgatgtacctgtctttaccaaagacaaggaggatttcttcaactcacagtgggacctcactacacaacaaatcctgccctacattgatgggttccgccacatccagaagatttcagcagaggcagatgtggagctcaacctggtgcgcattgctatccagaacctgctgtactacggcgttgtgacactggtgtccatcctccagtactccaatgtatactgcccaacgcccaaggtccaggacctggtagatgacaagtccctgcaagaggcatgtctatcctacgtgaccaagcaagggcacaagagggccagtctccgggatgtgttccagctatactgcagcctgagccctggcactaccgtgcgagacctcattggccgccacccccagcagctgcagcatgttgatgaacggtcagaggagaatttgctggggcatttgggagttacctgagggaagctagaccctttatgtctctcaggagccctggatcatggggcactgccaatccaagcaggcttcctggagatgatgggctacagagacaaaattgaagggagactacaggaaagggttggcctgcctgaaagaaggcctggccagggcgtcaccccgtcctctgatcctcaccctaggaagctgatccagttcgggcttatgaagaacctcatcaggcgactacagaagtatcctgtgcgggtgactcgggaagagcagagccaccctgcccggctttatacaggctgccacagctatgacgagatctgctgcaagacaggcatgagctaccatgagctggatgagcggcttgaaaatgaccccaacatcatcatctgctggaagtgaggctggtagtgactggatggacacattgctgtgggtagtccctcctactaggaggcttgtcatactgtctagaggttgactcttagttctgtaaataaagacatccatttcaaacaaaaaaa

SEQ ID NO: 4609 - DNA, 630 bp, Homo sapiens
  SIMILAR (411)..(509): 961254mologous to Homo sapiens similar to nitrogen permease regulator; similar to P39923 (PID:g730170), match to AA233630 (NID:g1856833) and AA399402 (NID:g2053147),accession number AC002481,Smith-Waterman Score=188.
  misc_feature (1)...(630): n = a,t,c or g
tgcactctgcccattgatgagtccaacaccattcaactgaaaggtgattgagcagcggcagacccntcgggtggcccaggagtatgatgtactggtctttacaaaagacaaggaggatttcttcaactcacagtgggacctcactacacaacaaatcctgccctacattgatgggttccgccacatcagaaagatttcagcagaggcagatgtggagctcaacctggtgcgcattgctatccagaacctgctgtactacggcgttgtgacactggtgtccatcctccagtactccaatgtatactgcccaacgcccaaggtccaggacctggtagatgacaagtccctgcaagaggcatgtctatcctacgtgaccaagcaagggcacaagagggccagtctccgggatgtgttccagctatgacgagatctgctgcaagacaggcatgagctaccatgagctggatgagcggcttgaaaatgaccccaacatcatcatctgctggaagtgaggctggtagtgactggatggacacattgctgtgggtagtccctcctactaggaggcttgtcatactgtctagaggttgactcttagttctgtaaataaagacatccatttcaaacagc

SEQ ID NO: 4610 - DNA, 982 bp, Homo sapiens
  SIMILAR (340)..(837): 381254mologous to Homo sapiens longest open reading frame,accession number X02490,Smith-Waterman Score=183.
  misc_feature (1)...(982): n = a,t,c or g
gagactcccaacacaggggaagtctccaggacctccacaccattaacaagatgagccttgtgctcccttgggctctagagaggaagcccctctgagccctcagcccctctttcctccctctcctaaagtaatttgatcctcaggaatttgttctgccctcatctggccctggccagctctgcatttgacaaatgccaggaagaggaaactgttgagaaaacggaactactggcggaaaggcgagggctcactgagaaccatcccggtaacccgatcaccgctggtcaccatgaaccacattgtgcaaaccttctctcctgtcaacagcggcccaggcttcccaactacgagatgctcaaggaggagcaggaagtggctatgctgggggcgccccaaaaaccgtgcttacccgaatgtccacctgtgatccactatccgcagcgagacctccgtggcctgaccatgttcgtctggtccttgttcaacacccttcttcatgaacacctgcttngcctgggcttcatagcattcgctctactccagtgaagtctcagggaccaggaagatggttggagaggtgaccagggcccaaggcctattgcctccaccgccaaagtgcctgaacatctgggcccgtgattttggggcatcttcatgaaccaattcttgctcatcaatcatccccccccaagtgttgggtcgtccaggcccagcgatagatcaggaaggcatcatttgaggcccagggagctctgccccgttgaacctgtatcccaagtcaaaaactctatcttccattcactcgccctgcccccagaggccaggaagttctgcccttgaactgtattccacttactccaccttccattcctcgccctgtccccacagccgagtcctgcatcagccctttatcctcacacgcttttctacaatggcattcaataaagggtatatgtttctggtaaaaaaaaaaaaaaaaaaa

SEQ ID NO: 4611 - DNA, 587 bp, Homo sapiens
  SIMILAR (263)..(472): 981254mologous to Homo sapiens similar to nitrogen permease regulator; similar to P39923 (PID:g730170), match to AA233630 (NID:g1856833) and AA399402 (NID:g2053147),accession number AC002481,Smith-Waterman Score=383.
cacaccatccacttgaaggtgattgagcagcggccagaccctccggtggcccaggagtatgatgtacctgtctttaccaaagacaaggaggatttcttcaactcacagtgggacctcactacacaacaaatcctgccctacattgatgggttccgccacatcgagaagatttcagcagaggcagatgtggagctcaacctggtgcgcattgctatccagaacctgctgtactacggcgttgtgacactggtgtccatcctccaggaagctgatccagttcgggcttatgaagaacctcatcaggcgactacagaagtatcctgtgcgggtgactcgggaagagcagagccaccctgcccggctttatacaggctgccacagctatgacgagatgtgctgcaagacaggcatgagctaccatgagctggatgagcggcttgaaaatgaccccaacatcatcatctgctggaagtgaggctggtagtgactggatggacacattgctgtgggtagtccctcctactaggaggcttgtcatactgtctagaggttgactcttagttctgtaaataaagacatccatttca

SEQ ID NO: 4612 - DNA, 693 bp, Homo sapiens
  SIMILAR (217)..(381): 491254mologous to Mus musculus putative,accession number AK010331,Smith-Waterman Score=100.
agctgcagcatgttgatgaacggtcagaggagaatttgctggggcatttgggagttacctgagggaagctagaccctttatgtctctcaggagccctggatcatggggcactgccaatccaagcaggcttcctggagatgatgggctacagagacaaaattgaagggagactacaggaaagggttggccctgccctgaaaagaaagccctggcccagggcgtcaccccgtccctctgatccctcacccctaggaaagctgaatcccagttcgggccttatgaaagaacctcatccaggcgacctacagaaagtatccctgtgcgggtgaactcgggaagagcagagcccaccctgcccggctttatacaggctgccacagcctatgacgagatctgcctgcaagacaggtggaggcaggcgggcagtcagggtgggttcagggcagggtgcgccaggccaaggccactgacctctcctccaccaccccacccaggcatgagctaccatgagctggatgagcggcttgaaaatgaccccaacatcatcatctgctggaagtgaggctggtagtgactggatggacacattgctgtgggtagtccctcctactaggaggcttgtcatactgtctagaggttgactcttagttctgtaaataaagacatccatttcaaacagcaaaaaaaaaaaaa

SEQ ID NO: 4613 - DNA, 1364 bp, Homo sapiens
  SIMILAR (656)..(1222): 361254mologous to Homo sapiens similar to nitrogen permease regulator; similar to P39923 (PID:g730170), match to AA233630 (NID:g1856833) and AA399402 (NID:g2053147),accession number AC002481,Smith-Waterman Score=177.
gaattcggcacgaggcctctgcgcgaggaacgaggagctacgggcctgggcccggttattgccatgggcagcggctgccgcatcgaatgcatattcttcagcgagttccaccccacgctgggacccaagatcacctatcaggtccctgaagacttcatctcccgagagctgtttgacacagtccaagtgtacatcatcaccaagccagagctgcagaacaagcttatcactgtcacagctatggaaaagaagctgatcggctgtcctgtgtgcatcgaacacaagaagtacagccgcaatgctctcctcttcaacctgggcttcgtgtgtgatgcccaggccaagacctgcgccctcgagcccattgttaaaaagctggctggctatctgaccacactagagctagagagcagcttcgtgtccatggaggagagcaagcagaagttggtgcccatcatgaccatcttgctggaggagctaaatgcctcaggccggtgcactctgcccattgatgagtccaacaccatccacttgaaggtgattgagcagcggccagaccctccggtggcccaggagtatgatgtacctgtctttaccaaagacaaggaggatttcttcaactcacagtgggacctcactacacaacaaatcctgccctacattgatgggttccgccacatccagaaagatttcagcagaggcagatgtggagctcaactgggtgcgcatttgctatccagaacctgctgtactacggcgttgtgacactggtgtccatcctccagtactccaatggtatattgcccaacgcccaaaggttcaggcacttggtagatgacaagtccctgcaagaggcatgtctatcctacgtgcccaagcaaagggcacaagagggccagtctccgggatgtgttccagctatactgcagcctgagccctggcactaccgtgcgagaccctcattggccgcccaccccccagcagctgccagcatgttgatgaaacggaagctgatcccagttcgggcttatgaaagaacctcatcaggcgactacagaagtatccctgtgcgggtgactcgggaagagcagagcccaccctgcccgggctttatacaggctgccacagtctatgacgagattctgctgcaagacaggcatgagctaccatgagctggatgagcggcttgaaaatgacccccaacatcatcatctgctggaagtgaggctggtagtgactggatggacacattgctgtgggtagtccctcttactaggaggcttgtcatacgtgtctagagcgctgactcttagttctgtaaataaagacatccatttcaaacagcaaaaaaaaaaaaaaaaaaa

SEQ ID NO: 4614 - DNA, 520 bp, Homo sapiens
  SIMILAR (1)..(78): 761254mologous to Homo sapiens Human secreted protein sequence encoded by gene 112 SEQ ID NO:282,accession number AAB56188,Smith-Waterman Score=99.
ttttgaaacagagtcttactctgttgcccaggctggagtgcagtggtgggatctcggctcactgcaacctccacctcccgggttcaagcgattctcctgcctcagcctcctgagtagctgggactacaggcgcccgccaccacgcctggctaatttttgtatttttagtagagacggggtttcaccatgttggtcaggctggtctcgatctcttgacctcgcgatccactcgcctcagcctcccaaagtgctgggattacaggcctgagccactgcgcctggcagaccacctatattacttttaaccacaaatgaaatagatgacttcttagaaaaacataaaagcagagctgtctcaaaaaccaacagaatatctgcatagcctaaaaaccataaagaaagcagataatgtggttcccgctgtctctccagtgaactttgggtcccacccttttggttaatttaaacccctataaattattccagaatatattaaaaggtagaaaatcgaacgcgtggg

SEQ ID NO: 4615 - DNA, 1233 bp, Homo sapiens
  SIMILAR (794)..(1024): 691254mologous to Homo sapiens Human secreted protein, SEQ ID NO: 7516,accession number AAG03435,Smith-Waterman Score=234.
cccgggtcgacgatttcgttcgccattcgtgctgcacttttaattttattaaaaaagaagcaagtatcttcttcataccaaatgctttcacatttctgcctgcaggcactgaccacaaaaatacagacccaacacaacaaaagcaattaacacaagataattaagtggtagttacaagtggtgggcaggggaaagtgcaagaggccagctggctgagcaagtggagtcatcacatgtgtcctcaacattgtgggtttagggatccagtgcaatcagttcacttctaagaggactggggttgaggactcgagctaggctgctctaaacttgtacaaacagaattacaaatcagagtgccaatttatctgtagggtttgtttaagcagttcaaatctgaaagactgctggcagagcccgtgaactggactgagaacaaacgtttttatgagccatcatcatccacctccacaaagtgcctgccttactgtagggtttttctcagccaaatctactcatctgatcaggatgccctcttgcctggacaatgtcagaggaacaaggaaaacaactgagctttccagctcttccttttcaacattccatgttagtccccaaaaagtaacacataatggaaattctctagattacagcttatttcctgtttagtgcattctgtgttgatgtcgtcctttaacagtgaggtagctcagggcatccttagagagactgaagtgttcttggtctgatatctgataccagcaacacatttctttcttttttttttttttttgagatggagtctcactctttggcccaggccccactgcagtggcactatctcggctcgctgcaagctccgcctccctgcaagctccgcctcccgggttcacgccattctcctgcctcagcctcccgagtagctgggactacaggcgcccgccaccatgcccggctaaatttttggatttttagtagaggcggggtgtcaccgtgttagccaggatagtctcgatctcctgacctcgtgatccacctgtctcaagcctcccaaagtgctgggattacacggcgtgagccaccaacgcccggcctttttttttttttgaagatggagtcttgctctgttggccccaggctgggagtgcagtcatggtgatctccggtcaatgcaagctctgccgcctgggttcgagcaattctcgtgcctcagcctcctgattagctgggattaaa

SEQ ID NO: 4616 - DNA, 1165 bp, Homo sapiens
  SIMILAR (27)..(323): 591254mologous to Homo sapiens Human secreted protein encoded by gene 44 clone HTDAD22,accession number AAY02693,Smith-Waterman Score=287.
tactactaaattcgcggccggtcgactttttttttttttttttttttttgagccacagtctcgctctgttgtccaggcgggagtgcagtggcacaatctcggctctcggctcactgcaatctccgcctcccgggtccatgccattctcctgcctcagcctcctgagtagctgggactacagacacccaccaccatacctggctaattttttttttttttgtatttttagtagagacagggtttcaccatgttggccaggatggtctcaatctcttgaccttgtgatctgccagccttgggctcccaaagtgctgggattacaggtgtgagccaccacgcctggccggcttatttttatccacagtaaatcttcagcaactcattgtctccaccagatagtatttttctgtaaatgaaatgctgacttcgcctcttcctgctgtatgctcatccctgcactgagcacagatatgacaagcagtagccatgggggaggtgggtgacaaagataggaccccgggagggggcgcaggtacatgctagtttccaattaccacagtattcctagagacgggttgccaatgaccaaggggggccaaatgaaatccaatgccaagatttcttaataatgggccagacggaaaaatgttaaaccaccccaaacgggctgctgataatattttaaaataaacttatttgtcttctttttgcattgtgaaaaaaaacaaaataaattttgtgtgataattttgatgatggaaaggtggaagttctacctagatttgaatgagtgtttttttaagggaatgagaatgtcatggtgctaaacctgacaaataagagatcattgaaatgctgaaaattttaacgagtcttcttaaaagtattgagggggcaaaaaattaccaattatggtatacaaaaataagcctataaatgtgtttcacattgctaacttgagtttcagttgattcaagtttgtaataactagtaatgagcttctgtttacaataaaaattctgataaattgaaaaaaaaaaabbbaaaaaaaaaaaackctcgttttwaaattcaagaaaaattgtgtttatctttagaattttgtattcaatactttatgtactatgtgcctaatgcttctggataaataagcaccaaatatgta

SEQ ID NO: 4617 - DNA, 646 bp, Homo sapiens
agttttttttttttttttttgctgttaaaatagatatatatttaatataatatgtgtgattgtggttacagataacatatttggtgctttatttatcscagaagcatgagtccacatagtacataaagtattgaatacaaatttctaaagataaacacaatttttcttgaatttaaaatatatggggataaatgcttacaaatgggatttataaacctttcacttctacttcaattctcctggbctgtgtcttccgaaggatgagttgctagttgcaacattaaaaaaaaaaatagcttctttcaaatcctggacactatatggacataaaaaagaactttttgggcaaattatttattcaggattgacttgtctccagtgggcaaatttgctcaggcatttactctttgttttgtctatggccttaggcctgtggcatttttctagaaagggaagttaaatggcttttaatgtattaattattacattattgaagttggacccaaatatgttaaatatttcctcttgcaaagggagaagaggaagggaggaacaggggcaaggtggggaggaaaaaaatacctcaggtgagagaacaagtaacttgcaagaggcttattaaactgtatataaatgttgaagaggc

SEQ ID NO: 4618 - DNA, 984 bp, Homo sapiens
  SIMILAR (924)..(974): 941254mologous to Homo sapiens Similar to protective protein for beta-galactosidase (galactosialidosis),accession number BC000597,Smith-Waterman Score=87.
cccacataaccttgggcaaaatttccttaaatatgaaccctcaggttctcccatcctgtaaaatggggataaataatgatatctaccttcacagataaaacatttaagtagaatactggacatgcagtaaagtcgttagaaaacatgaaaattccctggttcgtgttatctagcttggccccttgaatttcctgaggggtaggccttgaactagggaagggctggggactgggcttgttccacacccctcatttttaccccatcctgctttagaaataccagatcctattatataatggagatgtagacatggcctgcaatttcatggggggatgagtggtttgtggattccctcaaccagaaggtaaggtagagattcctggccctggaatagagcccgccggggaggaatggggagcgggtatgcctgggagtggccagctggctgcctggctctgggcccacagagggcaagtgtggaggaattcccagccctaaggtcttgctggtagctgtgagcaaggatgcagctgctgtaggctgatgtctttcctggtggggcagatggaggtgcagcgccggccctggttagtgaagtacggggacagcggggagcagattgccggcttcgtgaaggagttctcccacatcgcctttctcacgatcaaggtagggactgggcctgctgagagataactgggccagaggcaaaggagcaggacccacccgtcctttccctctggctgccttttaggctgggtcatgggtcaccatctggcccctgtatgggcaagtttttttggagaggggtggggagggttctgggaagaataaagggtttgggatgaaggaattgcccccgagtgagcagttatatggggaggagggaatggtggggtcaggagctcacgaacattgctcctcagggcgccggccacatggttcccaccgacaagcccctcgctgccttcacccacgcgtccg

SEQ ID NO: 4619 - DNA, 1149 bp, Homo sapiens
  SIMILAR (3)..(692): 511254mologous to Homo sapiens protective protein precursor,accession number M22960,Smith-Waterman Score=509.
  misc_feature (1)...(1149): n = a,t,c or g
ggaacaggctttggtcttctctccagacccactgctgctctcaaaacaagtgtaacttctatgacaacaaagacctggaatgcgtgaccaatcttcaggaagtggcccgcatcgtggcaactctggcctcaacatctacaatctctatgccccgtgtgctggaggggtgcccagccattttaggtatgagaaggacactgttgtggtccaggatttgggcaacatcttcactcgcctgccactcaagcggatgtggcatcaggcactgctgcgctcaggggataaagtgcgcatggaccccccctgcaccaacacaacagctgcttccacctaccctaacaaacccgtacgtgcggaaggccctcaacatcccggagcagctgccacaatgggacatgtgcaactttctggtaaacttacagtaccgcgtttttctaccgagccagaactccaggttatctgaagctgcttagctcacagaaataccagatcctattatataatgggagatgtagacatggcctggcaatttcatgggggatgagtggtttgtggattccctcaaccagaagattggaggttcagcgccggccctggttaagtgaagtacggggacagcggggagcagattgccaggcttcgtgaaggagttctcccacatcgcctttctcacgatcaagggcgccggccacagtggttcccaccgacaagccccttcgctgccttcaccatgttctcccgcttcctgaacaagcagccatactgatgaccacagcaaccagctccacggcctgatgcagcccctcccagcctctcccgctaggagaagtcctcttctaaggcaaagtgcccctggnaggccgggttctgccgccaggacttgcccccttcccagaagccctgtacatcccagacttgggcccaggggtctcccattagacagcctgggggcaagttagcactttattcccgcagcagttcctgaatggggtggcttggctcccttctctgcttatagtatgtcctttatgatgcactgattccttcccaggaacccaacagtgcttaggacagcccacagtgatgtgttggacggactgtaattgttagtttgattatggaacttaattggttacagcttcaaaaaaa

SEQ ID NO: 4620 - DNA, 519 bp, Homo sapiens
ttttttaagagatgttatcttgctggcacccaggccagagtgtagttgtgtaatcataactcactgtttctcccactgaactcccaggctcaagtgatcctcccagctcagccttcaattgtagctgggaatataggtgcgtgacaccatgccagctaatgttttaatttactttactttctatagggatagggtctacgttgcccaggccggtcttgaactcctcgcctcaggtgatcctcgcgccttggccctcccaaagtgttgagattacaggaatgagccattgtgcctagacctaaattagctaacttaatattggaaaattggagccttcagataagagatttgttaggggttcagtccttcctcacaaatatgcatttgggatgaaattaaaatggaagaggcctggttcctaccgctaagcattatgttaacatcccctccccaggaaggcattccttctacaaaaaacatatttactgggtgctgaactaaaaagtatagtgctaaaca

SEQ ID NO: 4621 - DNA, 531 bp, Homo sapiens
  SIMILAR (136)..(312): 781254mologous to Homo sapiens mariner transposase,accession number U52077,Smith-Waterman Score=230.
atgacaacagataatctcagtgataccttgaagaagctgaagataacagctgttgacaagactgaggatagtttagaaggatgcttggattgtctgcttcaagccctggctcaaaatattctctttacgagtgattttcttatttctgagttcaaaatgggtcgtaaagcagcggagacaactagcaacatcaacaatgcacttggcccaggaactgctaatgaacatacagtgcagtggtggctcaagaagttttgcaaaggagacgagagcctagatgaggaggattgtgacgtgcaacaagaagtggattttatatggcaactgaaaagtggattttatacaactggagatgaccagttcagtgattggaccaagaagctccaaagcacttcccaaagccaaacttgcaccaaaaaaaggtcatggtcactgtctggtggtctgctgctgatccactacagctttctgaatcccggtgaaaccattaaatctgagaagtatgctcagcaaattgatgagatgcactga

SEQ ID NO: 4622 - DNA, 2451 bp, Homo sapiens
  SIMILAR (5)..(814): 311254mologous to Mus musculus proline-rich protein MP- 3,accession number M12100,Smith-Waterman Score=250.
atgcccttcccgcccatgccgccgccgcccgcccccgccccgggggcccaagccgcgcgccagttaccccggaggccctgcgccgcgggggacaagaagaagaggcccccacagcggcccgaggggctcctctccagctcctggccctccgccacgctcaagaggccgccggcccggcgcggccccggcctggacaggacgcagccgccggcccctccgggcgtctccccccaggccttgcccagccgcgcgcgggccccagccacgtgcgccccgccccggccggcaggctccggccacagcccagcgaggaccacctatgcggcgacctcggcggggacggggaccaccgccgcgggcacctcctcgggggcggggccttgtccagactccgctgcgcgcttctgcctgaatctcacccccgaggccgtcctggtcatccagaagcgtcatctggagaagcagctgctggcgcggccccgcaggcccttcccctcaccctcggccgaacccaggcgcctactcgccccgtgtctcccggctagggccgcgggcccgcggaggggcggccccgccagcgaccccgacgcaccccccaccgccggccagggccgccgcgcgcctccgcccggcgcccagctgctgcacggcggcctgcaggttccccagctcagcccgcggcccggggccctgcggccgatgctcaaggtgtcgctgctcaacgagcggcacaggtacgacgacgtggagtacgaggaggagccagaggcggtggacgagggcctggggccctcgggggagaccgcaggctcctctggccgccagcgcccactttcgggacaccagtgcgcaagctggcccacgtggggcgcagccagactcgcccgacggccacggcccccctcctgccctcgccagccggcagcccgggcctttctcgttcacaccggtggtatctaccccagatgcctgcctctgcccccactctggcctcctcttggcatcgccgagcatccatgcagttcgtggggaattaagcaactgagaaaatgcctcttggtgccccgacccccagggttcgtctaggtcccagagaccctctgcctggaggcgggccttccccagggctacatctgcacgccccgtggtgtcaccctcagccggcgccgggcaccctggacagtgcggtgggcgatggcccaggtgggtggccgcgacggtggcctcctgcagagctgggacccggtcctacattcgtgattttgttttctcccaagtcagaaaaatgttgagggtattagacatccctgaaactcagttaaccgaatttccagtctccaaagcggaagggtaggcatcgccaggcgctggtgagccctggtcaatgagcgcttccatggaaaccgctcggctgattacattttttctgtgtattatttgaatagagagtaaagctcctccgctgtttcgtaaccatatcctttcccccgcttaactggaggctgatttctacatatttcttccatgtatctgagaatatctaacttagaaggatgagaaggaaataaaatgttattaatccagttaaggctggttataaaagagtaatgtattacctcaatttttgactgactttgtaaaagccaataactggtttaatgtttatcttgatagactttaaatgtatcaagtcttaattgtattttaaattgaaggccttacatttttaaaacaggttttgtatttttcttgtgggagggtctttgctctaataaccacacacacactgtctctctctctctctctctctctaattctaggcacacatttagttagatgtgaagcatttaattcattgggagctaggtcagctgccagatgagttgcaaaaacagaaaaaaacctacccattgaataacttctttgaatttggagataagttttcttttacttaaaatgaatatattaattctagaggggcaaaactagcaatgcttatgcaagtgacggtgctgctcttgttccacccccacccagatggtctctgagtgcgccgtcctgggcagggcacacggtctggagctgagagggtggagcaagagtgcactgactccgagccgagggcaggagtggctcaacttggtctcgtcttgcacttagtgcaaataccaataattaagatgcctaagacttctgcccttggtcacagtaacaacaacattttggaagacttttcccctggtggcatcctagagggaccgactttctgcagcctctgtcttccaagctgagcttctgctgcagtgtggctgtcactgcacctgtgtgtctccctgacgtccctgtcagctgcttcattttgatttccttttcttctcccgccctttctgtaggctctgtcccagcatctcctgttcttaactggccacaatacaacactaagcgcatttt

SEQ ID NO: 4623 - DNA, 251 bp, Homo sapiens
  misc_feature (1)...(251): n = a,t,c or g
ggaatatttagaggacagtaacccatttccctacgccctacctttcccatggcactctgacgtactggatgtttggtttctgaagttactggctgtttaccctgccgggatgtaagcccctccagggcaggggcttgtctcgtgttcagtgctgcatcccagctgctgggcacggtacctggtccatggcgttcaataaataactgttggatgagtgnnnnnnnnnnnnnnnnnnnnnnngggtttttttt

SEQ ID NO: 4624 - DNA, 1929 bp, Homo sapiens
  SIMILAR (253)..(209): 661254mologous to Homo sapiens Human secreted protein, SEQ ID NO: 8153,accession number AAG04072,Smith-Waterman Score=43.
gaatactaggctttcctttttttgtgagatgggggtctcacactgtggctcaggctggagtgcagtggtgtgatcatggctcactgcagcctcgaagccccggggtcaagtgatcctctcacctcagcctcctgggtagctggaaccacaggcacgcaaccaccactcctggctagttttgtttttttagtagaataaggtctcactgtgttgcacaggctggtctctaactccttacctcaaaccatcctcctgccttggcctcccaaacatgttgggattacaggtgtgagccactggacctggccaaatactgggttttcagtgctcactgccactaataaaaatctgaaattctttcattatgcaatttctaagtgcctggtgagggccaagctcagttctaggctcttgaagattgaagagagaaacaaggctctgtctgctcctgttgtctctgtgagcatctttgacagagtgctcagattgttgggatatagtgcatcggactggcagcctgaatttgtggagaccgcagtcagtaactttgtgatatatggaatatttagaggacagtaacccatttccctacagccctacctgatcacatcgtgccctgctgggccataccccaaacagcccaccttcctctaggcctggccatggccctgtgcctgccacattgaggattaagtcaggatatcttgagccctctcaaatccctgtttattcaggcctctgccacatatagagccagccttctgtccccaccacttccactaccatggagcccacttaagtaaaacgctctctggggcccagcttcgccagaaaagacaccaggggaagcaaggctcaaaaccaggggcagctaaatctgatcttgtgggaccagtctctaagtaagggctttcagcgtcggctgtctgtccattgctttccaaataggatgcagcaatgattggtacatgggtattaagatcggtagtaggggctagtccaagtttagcaatagccaaactggagagcctctgaagtatgagagtcccagagggatttgtcagctcctggcagacatcctgattttcaccttcctgagtctaccctaccccagagggtgccagtctcactgtggtgaatggttagcccagtgttgtgctgcactcacacaccaggacggtgtccggtgcttgcaggctggtgggatgctgtcctctgggttaagactgtctcccttctcgggagcactgggagggttctccatcttgcgtgtttcagtgggaagttggcagatacggaaaacaggcccctataggggaaggcagttccatgtaaaatgaattaatttctttcccaaaagacttaaaattttttcctatttcaattttcctttcaaaaaaggaaatacattcatgtagttcaaaacttaagaaaacaaaagtctgttcagcaaaagactcccactccgtttccccaaacgctgagccccaccccccatccctggtagccaagaagtgtttccaaattttaaggtttaaagaaacaaagtcccctggatttgtgttagggatgtcttccctgagagtgggttgtgttcccgtttgaaccctggcggttgaacctcggccccactaggatcatgcccgccctctcccagggaggagggcctccccatcaccctgtacaattggcacccccagccactggcactgcccgcccttgctcagcgtacctttcccaatgggactctgacgtactggatgtttggtttctgaagttactggctgtttaccctgccgggatgtaagcccctccagggcaggggcttgtctcgtgttcagtgctgcatcccagcttgctgggcacggtacctggtccatggcgttcaataaatcaccccttggatgagtgaaaaaaaaaaaaaaaaaa

SEQ ID NO: 4625 - DNA, 1444 bp, Homo sapiens
  SIMILAR (1030)..(1200): 801254mologous to Homo sapiens Novel protein (Clone J317_1),accession number AAW85728,Smith-Waterman Score=232.
  misc_feature (1)...(1444): n = a,t,c or g
ttgtttnacataatacagaatatatagtggctaccttgtatcttggtctggattctctctctgagaccccggattttactttctctttggagggcgctgggacatacatctctcaatccagcttcctccgcatcctcccatcttgccccatttctgccacgtcagacacttcctgagagtctcaccttcaaaatgacaccgctgcccatccattgctcaatggtacagagtgtggggtcagtccaccacccttgacctcccggcagggcaaggtgaggaggcggacccaaagcagtaccagcaggacttgttgccagtgataccaaaacagacttttccccaaccagtgcttcacatgtctgctggtgtggctttgggattctcctgccccacccccccgtccatggcagccccctccccaaggctttgctcacacctgagacaggaaggaggaaggggatccaataggaatatgggccccggaggggaagtcatgcacccccaagccaccaccccccagccttccacgcacatctcctggctggaagagagccctccaaaaaggggacacaggctgccccggcccctcaactgcatccacaccccatcctctcatcttgggtcccagccaggcccccccaaaaccaaagccccctcaagtcctggggtcccagcatgtgctcccagcttcctgccctaccagccccgagcatttctctcacagagaaagaacaagcaagggctccagggggacaggatggggcagggcatacagtggggggtgggggggcagctgggaggagggagggacaaaacaaaacattttcctttgggttttttttttctttcttttttctcccctttactctttgggtggtgttgcttttcctttccttttccctttgagattttttttgttgttgtttcctttttgtattttactgatatcacccaggatagtttactctcctgtctagcttttactcttaccgacacactggataacacacacatacaacacccacaaaaatgctcatgaacccaatccggagaaggttccagcaggtcccccaccctcccctcctcctcctacttctcctcttgaacagcgaggacaggaagggggacaaggggacacctggggcagacccgccggctctccccccaccccaccccgcccctcacatcatactccaatcataaccttgtatattacgcagtcattctgatgttggagcggccgcgcctacctaagtaccatttacagaaagtgactctggctgtcattattttgtttatttgttccctatgcaaaaaaaaaatgaaaatgaaaaaagggggattccataaaagattcaataaaagacaaacaaaaaaaaaagaaaaaagaaaaaaatgtataaaaattaaatcaagctatgcttcgactcttaaaaaaaaaaaa

SEQ ID NO: 4626 - DNA, 397 bp, Homo sapiens
  misc_feature (1)...(397): n = a,t,c or g
tttttgggcccctcaaaattcccccccccggggttcccccctttttttcccccacccccccgggaaagggggaatcagaggnnnnnnnnnnnaccgggnnnnnnnnnnnnnnnnnnaaaaaaaaacgggggttcccccgggttaacccggaggtttttttccccctcccccctaaaatttnnnnnnnnnnnnnnnnnaaaaaatttgtttaaggggtttggtccaatttnnnnnnnnnnnnaannnnnnnnnnnnnnnnnnattgaccnnnnnnnnnnnnnnnnnnnnnnnnnnnnnnnnnnnnnnnnnnnnnnnnnnnnnnnnnnnnnnnnnnnnnnnnnnnnnnnnnnnnnnnnnnnnnnnnnnnnnnnnnnnnnnnnnnnnnnnnnnnnnnnnn

SEQ ID NO: 4627 - DNA, 390 bp, Homo sapiens
  SIMILAR (37)..(333): 461254mologous to Mus musculus C1D protein,accession number X95591,Smith-Waterman Score=206.
  misc_feature (1)...(390): n = a,t,c or g
ctaattctaaataccaagcggccggcctttatatttgatttgttgcataatttggatccaaaagaacaagcttatgcggatttggtttctgcatacacattaaattcaatgttttggctttatttggcaacccaaggagttaatcctaccgaccatccagtaaaacatgaattggacacaacacagcctgtatgaacagannnnnnnnnnnaacagacaaaaaaaaggctggtttgctgtacagaggggcagcttcaaaatttgtaaaaaatgccctttgggaaccaaaatcgaaaaatgcataaaaagttggcaataaaggaaaaagcccaacctccctttttgggtttgatgtacacatattcaaaaagaacatgttgcccccccccg

SEQ ID NO: 4628 - DNA, 1551 bp, Homo sapiens
  SIMILAR (721)..(1548): 781254mologous to Mus musculus rer,accession number AJ006130,Smith-Waterman Score=1142.
atgccggagcgagatagtgagccgttctccaaccctttggcccctgatggccacgatgtggatgatcctcactccttccaccaatcaaaactcaccaatgaagacttcaggaaacttctcatgacccccagggctgcacctacctctgcaccaccttctaagtcacgtcaccatgagatgccaagggagtacaatgaggatgaagacccagctgcacgaaggaggaaaaagaaaagttattatgctaagctacgccaacaagaaattgagagagagagagagctagcagagaagtaccggggtcgtgccaaggaacggagagatggagtgaacaaagattatgaagaaaccgagcttatcaacaccacagctaactacagggctgttggccccactactaaggcggacaaatcagctgcagagaagagaagacagttgatccaggagtccaaattcttgggtggtgacatggaacacacccatttggtgaaaggcttggattttgctctgcttcaaaaggtacgagctgagattgccagcaaagagaaagaggaagaggaactgatggaaaagccccagaaagaaaccaagaaagatgaggatcctgaaaataaaattgaatttaaaacacgtctgggccgcaatgtttaccgagtgctttttaagaacaagcatataagcggaatgagttgttcctgccgggccgcatggcctatgtgcaaggttgactgccccaccatggaggcccagaccatactgaccacaaatgatattgtcattagcaagcttacccagttgctttcatacctgaggcagggaacccgtaacaagaagcttaagaagaaggataaagggaagctggaagagaagaaacctgctgaggctgacaggagtattttcgaagacattggggattatacaccctccacaatcaagacaccttgggacaaggagcgggagagatatcgggaacgggagcgtgatcaggagacagagaccgtgaccgagagcgagagcgagaacgagatcaggagcgagaacgagatcgggaacgagaacgagatcgggaacgagagacctgggtcggccaaggagttgatcaagtccatcaatgaaaagtttgctgggtctgctggctgggaaggcacagaatcgctgaaaattgcagaagacaaaaagcagctgagagatttctttggcatgtccaacagttatgcagagtgctatccagccacgatggatgacatggctgtggatagtgatgaggaggtggattatagcaaaatggaccagggtaacaagaagagaaccttaagccgttgggactttgatacccaggaagactacagcgagtatatgaacaacaaagaggctttgcccaaggctgcattccagtatggtatcaaaatgtctgaagggcggaaaaccagacgcttcaaggaaaccaatgacaaagcagcgctcgattgccagtggaagattagtgcaatcattgagaagaggaagaagatggaagctgatggggttgaagtcaaaagaccaaaatactaa

SEQ ID NO: 4629 - DNA, 3165 bp, Homo sapiens
  SIMILAR (163)..(1998): 331254mologous to Homo sapiens ribophorin II,accession number AJ237734,Smith-Waterman Score=791.
atggaacagtttctatggcaggaactctttgccgaatacaaccgacaggcctccgcccaagtggatttgggtgaggatcgcacggagtactacgaccagttctgcaaggatgtgccaccgaaaaacgaagagaccgaggaagttctggtcaacaatgggccgacgtggagcgcccgcaccgtggacagtcacctggggcaaaaggatctcagccgcctgcaaaaagttttcgtggacggatttggttccagtgacctgcagtcgatcttcttctccagcctaaacattcaactgactgatgccactcagaaggagccgttgtgcaagaagattgctacgctgcattccgaatccaagctgaacagcttcgaaaaagactactactacattggtgctagcagaaacctgggttgctccgctaagattgacgagggtctgctttccaaggtgtatagttccctgaactcggagctcggcagctctcaggagatcttctaccgcgtggtcacccacaaagtgctcggcgtggagatcaatgaagccactcaggaaaaactagtgaagcgtttgcaagaactgctcaagaaggacgacacactcagcggcctgggatacgctttcaatgttgctccacttctgggtgccagtgcctcctttatcgcaaatcgcgtggaggatgccatcgtgcaagcagatgaagttgacggcaagctcttgcaattcgaaggcggtctcagtatcacatccctgatcatcaatggtgctttcggtgtgagcaagacctttaacaagcccgtgcccattactgctgaccaggcagttaagtttgctaactacttccttagccgccgatccgtccaaaccgccaaaggagctcatgtgctaatcgaggcgctgaagactattagtggagccgataaaattgctcccgtttgtgtgcagctcattggcaacggtcaattggacgctcagtcgccgactctgaacgtagccgttgttgatctgctcggcaagcctttgtcacctgcccccaaagtcatcaatgcaaaggttattcgcaagaaggacagctctgttttagctgataaaatcactgtggcctcgaaatcctcggacaaaaccacctatgtggctgatttggccagcttaaagccagctcgcggcgtttaccaggcggagttgagtgcagatggtgtctacacccagacactgcagttcaaggttcttggccgcgtcaaggttcaatctctcgaggtgggcattgcggaatctgatgctagcgctgctacccgcaagcagagtgtgacctatccaggaaaactgcaggaggttctctccgctgacagcacccagaagcttttgctgaaggccgttctggtagatgaatccaccagcaagcctctggctgtccatcaggcattcgttcgactctacaacaagaaaactgacaaggagatcatctttgtggccgagcaggatagcagcaaggcgtacaaattcgacatggatgttggcaacaacggaaagaactttaactaccagagcggcacctacagcatttacttgaccgtgggcgattcctctttgtccaactccttcgagtggttagttgctgaagtccaattgaaattcaacgaggataaggaagtcaagcctaagaacacttctggtcccctgcccgaaatcatccatcagttccgagtgcccgataagcgcccgccccgcattgtttctgatatcttcaccggactgtgcataaccccgcttgtgctgcttttcgttttttggggaaaactgggcatcaatgtatctaacctgacgctggcaccgagtacgatcgggtttcatctgggtttcggtggcattctggtgctgttcttcgtgttctggctgcagcttaacatgttccagacactgcgcctgctgattcccatcgcagtattcacattcctggctggcaaccgattactgagacgtctttacgcacaacgtaactcgaaggcaagtgcgtcgtataacacagatgttctggaacaggaattaaaagaaattaaggagtgtgcccagaccacactgaccacaaatgacattgtcattagcaagctgacccagatcctttcatacctgaggcagggaacccgtaacaagaagcttaagaagaaggataaagggaagctggaagagaagaaacctcctgaggctgacatgaatatttttgaagacattggggattacgtaccctccacaaccaagacacctcgggacaaggagcgggagagatatcgggaacgggagcgtgatcgggaaagagacagagaccgtgaccgagagcgagagcgagaacgagatcgggaacgagagcgagagcgggaccgagagagagaagaggaaaagaagagacacagctactttgagaagccaaaagtagatgatgagcccatggacgttgacaaaggacctgggtctaccaaggagttgatcaagtccatcaatgaaaagtttgctgggatggatgacatggctgtggatagtgatgaggaggtggattatagcaaaatggaccagggtaacaagaaggggcccttaggccgttgggactttgatacccaggaagaatacagcgagtatatgaacaacaaagaagctttgcccaaggctgcattccagtatggtatcaaaatgtctgaagggcggaaaaccaggcgcttcaaggaaaccaatgacaaagcagagcttgatcgccagtggaagaagattagtgcaatcattgagaagaggaagaagatggaagctgatggcactttggcctggtgctcatcattaggtgtcactactgcttcctggctggatgccacgctgccactgtctaccctgagcccaagatttgtggcctcaccagatccaagaaagctagaaagtcaccttagccattaccttgtctttgattatattcaccttgtccttctcagcatggaccgcacttgtgaggagaggcccgctgaggatgggagcgacgaggaggacccagactccatggaagccccaacccggatccgggacactccggaagacatcgtgctggaagctccggctagtgggctggcgttccatccggcccgtgacctactggctgcaggggacgtggacggggacgtgttcgtgtga

SEQ ID NO: 4630 - DNA, 3549 bp, Homo sapiens
  SIMILAR (427)..(2379): 991254mologous to Drosophila melanogaster BcDNA.GH07485,accession number AF145642,Smith-Waterman Score=3378.
atgccacgcaagaagcgcagttccagccccacggagttctttgatgacgacttcgatgaggatgccagttctcaaagctcccaaccgccggtgcagcgaaatgcggcaaatgcccgggagcggatgcgtatgcgggttttatccagcgcctacggacgtttgaagaccaagctgcccaacattccgccggacacgaagctctccaagttggacacgttgcgtttggccacgctctacatcaagcagctaattacggctgtggagacaggcagccactcgcagaaccacccgcacaaccacaaccagcaccacagcctcaaccacagtcactcgagtaccaccagttccgaaggcctggacacaagtcacatggcagattcgtccggtggaggcaattataatttccacaacaacggacacggcatgaaggaacgcagcacggccaccttcaatccccgggagttctccgttctgtgggccggcggcgaggagcgattcaaggagaagaaggccctggagaaattgtttttggaggatccagcccttcaggacgacttgcccatttcctatttgtcacacaaggagctctatgagcacagcttgcgcaaagcctgcatcataggagagaagatccgcaagctacgtgctgatggcgaggatggagtggatacttacaatgctctgcttggtggatccttgggatcggctattctaaaggagggcaatccgcttgcgctgcactacgtgatgttcgtgcccaccatcatgggccagggaacgatggatcagcaggtggaatggctgagcaaggcctgggactgtgaaatcattggcacctatgcccaaacggaactgggacacggaaccttcctgcgcggtctggagaccagggctgactacgatgccagcacccaggagtttgttataaacactccatcactcagtgcatacaagtggtggcccggtggattgggacacactgctaaccatgcggttgtggtggcacaactctacaccaagggcgagttccgtggtctggctccttttattgtccaattgagggattccgatactcaccgtcccatgcccggcatcgacattggagatattggtaccaagctgggcatgaagggtgtcaacaatggctatttgggactgaagaacgtacgggtgcctttaaacaacatgctgatgaagaaccagcaagtgctgcccgatggcacatatgtggcgccgaagaatagcgtgcttacctacggaactatgatgtttgtgcgttgtgctcttatccgtgataccgctcagagcctggcaaaggcatccactattgccactaggtattcagctgttcgccgacagagtcccattgatcccaatcaaccggagccccaaatcatggaccataccacgcagcagttgaagttgttcccccagatagctaaagccatcgttttcaaaacgacgggtgatggcatctggaatatgtacaacgtgatatctggcgagattgagcagggtaacttggatcgcctgcccgaaatgcatgcattgtcctgctgccttaaggccatctgtagtgccgatgccgccgccggcgtggaaacgtgtcgtctgtcatgtggcggacatggctacatggactgctccaacttccccacgatatacggcatgaccacggccgtttgcacctatgagggcgagaacacagtgatgctgctgcagactgctcgctatttggtgaaggtttatgggcaggccttgaatggagagaagctggtgccaacggtttcgtacatcagtgatgcaataaaccaaaccaagtttgttaactttgacggatcattgaggtctattgtcaaggctttccaattcgttgccgccaacaaaacccgaattgcctatgagcagattgaactgcgccgcaagcaaggttatggtaccgaggtggcagctaatctatgtggcaccttcctaacagcagctgcagatcttcatggacgcgccttcctagcgcagactgcctatacggagcttttggccttgtcgcgcgaggtgtccccagaactagctgaagtcctaaaggtggtgctggagctgtatctggtagacgcctgcctcaaccgcattggcgacttcttgcggttcattgatctcactgatcaagatgtcacgaaactggaggttcgcctggagaactgcttaaaacgattccggccgaatgccgtcagcttggtggacagctttgatcttcacgatcgcgtgctagattccgcattgggtgcctatgatggaaatgtttacgaacacatcttcgagtctacgaagaagaacccgttgaacaaggagccagtcaacggagcattccacaagggtttagaggccaatgaacgaaaacgtacgttaagggacgtctatgctctaaaggttggtgacagcgaaagaacgataacaaaatgccggagcgagatagtgagccgttctccaaccctttggcccccgatggccacgatgtggatgatcctcactccttccaccagtaatcgtcacctccacaaagagcgactcgctgtataccgttggcatgctagctttatctgttcgggcaatacgatgcccattgtacttgttgactggtctgatattcgtgagcaaaaacgacttatggtattgcgagcttcagtcgcactacacggtcgttctgttactctttatgagaaagcgttcccgctttcagagcaatgttcaaagaaagctcatgaccaatttctagccgaccttgcgagcattctaccgagtaacaccacaccgctcattgtcagtgatgctggctttaaagtgccatggtataaatccgttgagaagctgggttggtactggttaagtcgagtaagaggaaaagtacaatatgcagacctaggagcggaaaactggaaacctatcagcaacttacatgatatgtcatctagtcactcaaagactttaggctataagaggctgactaaaagcaatccaatctcatgccaaattctattgtataaatctcgctctaaaggccgaaaaaatcagcgctcgacacggactcattgtcaccacccgtcacctaaaatctactcagcgtcggcaaaggagccatgggttctagcaactaacttacctgttgaaattcgaacacccaaacaacttgttaatatctattcgaagcgaatgcagattgaagaaaccttccgagacttgaaaagtcctgcctacggactaggcctacgccatagccgaacgagcagctcagagcgttttgatatcatgctgctaatcgccctgatgcttcaactaacatgttggcttgcgggcgttcatgctcagaaacaaggttgggacaagcacttccaggctaacacagtcagaaatcgaaacgtactctcaacagttcgcttaggcatggaagttttgcggcattctggctacacaataacaagggaagacttactcgtggctgcaaccctactagctcaaaatttattcacacatggttacgctttggggaaattatga

SEQ ID NO: 4631 - DNA, 2234 bp, Homo sapiens
  SIMILAR (1172)..(1747): 391254mologous to Homo sapiens chondrosarcoma-associated protein 2,accession number AF182645,Smith-Waterman Score=250.
atgccggagcgagatagtgagccgttctccaaccctttggcccctgatggccacgatgtggatgatcctcactccttccaccaatcaaaactcaccaatgaagacttcaggaaacttctcatgacccccagggctgcacctacctctgcaccaccttctaagtcacgtcaccatgagatgccaagggagtacaatgaggatgaagacccagctgcacgaaggaggaaaaagaaaagttattatgctaagctacgccaacaagaaattgagagagagagagagctagcagagaagtaccggggtcgtgccaaggaacggagagatggagtgaacaaagattatgaagaaaccgagcttatcaacaccacagctaactacagggctgttggccccactactaaggcggacaaatcagctgcagagaagagaagacagttgatccaggagtccaaattcttgggtggtgacatggaacacacccatttggtgaaaggcttggattttgctctgcttcaaaaggtacgagctgagattgccagcaaagagaaagaggaagaggaactgatggaaaagccccagaaagaaaccaagaaagatgaggatcctgaaaataaaattgaatttaaaacacgtctgggccgcaatgtttaccgagtgctttttaagaacaagcatataagcggaatgagttgttcctgccgggccgcatggcctatgtgcaaggttgactgccccaccatggaggcccagaccatactgaccacaaatgatattgtcattagcaagcttacccagttgctttcatacctgaggcagggaacccgtaacaagaagcttaagaagaaggataaagggaagctggaagagaagaaacctgctgaggctgacatgaagtatgtatcctagcccctggcatctgatcagagggagggggtctgtacatttcttgtgtctggcattttggggaggtgctgacatgagaatctggagaaatggtcagggggagtgaaggtgtatgtgtgaatttggccagctagtgatctccattttcccagtatttttgaagacattggggattacgtaccctccacaaccaagacacctcgggacaaggagcgggagagatatcgggaacgggagcgtgatcgggaaagagacagagaccgtgaccgagagcgagagcgagaacgagatcgttaactatgagcgagagcgggaccgagagagagaagaggaaaagaagagacacagctactttgagaagcccaaagttatattgttgggcccctggacctttgacaaaggacctggttctaccaaggagttgatcaagttccttcattgaaaagttttgctgggtctgctggctgggaggctacagaatcccctgaagaagccagaagaccaaaaagcagctgggggatttcttgggcatgtccaacagttattcagagtgctacccagccacgatggatgacatggctgtggattagtgatgaggaggtggatttatagcaaaatggaccagggtaaccaagaagggggcccttaggcccgttggggacctttgattcccccaggaagaatacaagcgagtttttgtgactaccaaggaagctttcgccaagggttgcattccgagtatggtatcaaaatgtcctgaagggcggaaaacccaggcgcttcaaggaaccccaatgaccaaagcagagcttgatccgccagtggaagaagatttagtgcagtaagtaggatggccccttgggtgggagggtttcagctgggagaagacattagcctgcagattcaggaacaggcaaggggctggagagccatggaaatgagaggtcagccttgggcctcaggtgagcttagatgggcagcttggtgatagactatcctgttgtttttgcagatcattgagaagaggaagaagatggaagctgatgggtgagcggcattattcttcctctgtgggactggtgggaattgcttagtgtattgatcttatactgacccatttctccttccattgcagggttgaagtcaaaagaccaaaatactaatcactagttacaaccagagatgctccacaaggatatgctccccacggttttctttctacaatttccaaaggttgcaagatgtttttttgtggatgaatataaaattttattgtgtaattacttggttccattaaaattggttaacttgcaaaaaaagaaaaaaaaaaa

SEQ ID NO: 4632 - DNA, 1684 bp, Homo sapiens
  SIMILAR (909)..(1199): 911254mologous to Homo sapiens smg GDS,accession number X63465,Smith-Waterman Score=426.
atggataatctcagtgataccttgaagaagctgaagataacagctgttgacaagactgaggatagtttagaaggatgcttggattgtctgcttcaagccctggctcaaaataatacggaaacaagtgaaaaaatccaagcaagtggaatacttcagctgtttgcaagtctgttgactccacagtcttcctgcaaagccaaagtagctaacatcatagcagaagtagccaaaaatgagtttatgcgaattccatgtgtggatgctggattgatttcaccactggtgcagctgctaaatagcaaagaccaggaagtgctgcttcaaacgggcagggctctaggaaacatatgttacgatagccattcgcttcaagctcagcttatcaatatgggtgttattcctaccttagtgaaattactgggcatccactgccaaaatgcagctcttacagaaatgtgtcttgttgcatttggtaatttagcagaacttgagtcaagtaaagaacagtttgccagtacaaacattgctgaagagctagtaaaactcttcaagaaacaaatcgaacatgataagagagaaatgatttttgaagttcttgctccattggcagaaaatgatgctattaaactacagctggttgaagcaggcctagtagagtgtctactagagattgttcagcaaaaagtggatagtgacaaaggaaggtggtattactgagctcaaaactggttcagatctcatggttgtattacttcttggagatgaatccatgcagaagttatttgaaggaggaaaaggtagtgtatttcaaagggtactctcttggatcccatcaaataaccaccagctacagcttgctggagcattggcaattgcaaattttgccagaaatgatgcaaattgtattccatatggtagacaatgggattgtagaaaaacttatggatctactgggcagacatgtagaagatggaaatgtaacagtacagcatgcagctctaagtgccctcagaaacctggccattccagttataaataaagcaaagatgttatcagctggggtcacagaggcagttttgaaatttcttaaatctgaaatgcctcctgttcagttcaaacttctgggaacattaagaatgttaatagatgcacaagcagaagctgctgaaccaattggggaaagaatgttaaagttagttggagcgtttggtgggatggtgtgaagccaaagatcatgctggtgtgatggggggagcaaaacagactgctgtctgcccttatacgacacagtaaatcaaaagatgtaattaaaaccattgtgcagagtggtggcatcaagcatctagttaccatggcaactagtgaacatgtaataatgcagaatgaagctcttgttgctttggcattaatagcagctttagaattgggcactgctgagaaagatctagaaagtgctaaacttgtacagattttacatagactgctagcagatgagagaagtgctcctgaaatcaaatataattccatggtcctgatatgtgctcttatgggatctgaatgtctacacaaggaagtacaggatttggcttttctagatgtcgtatccaaacttcgcagtcatgagaacaaaagtgttcgccagcaggcctctctcacagagcagagacttactgtggaaagctga

SEQ ID NO: 4633 - DNA, 546 bp, Homo sapiens
  SIMILAR (161)..(544): 451254mologous to Human endogenous retrovirus K gag protein,accession number Y10392,Smith-Waterman Score=334.
aactcttcccaggttcttcagttttaatatttgtgggtaaatgaggctccatttcggctgctcacaatgccccagccctaccctcaaattaatataactgcagaccaactttgggggtcagtggctgtgctggtttagatgcacaagtggtttgccaggattgtgcatttgagcttgggaaaaaaccacttcaggtggagaacaatacccttcctctagtgctataaaacagggacctaaagaaccatatgcagattttatagctcggttacaggagtctcttaaaaaggtgattgcagatttggctgctcaggatatagtgttgtggttattagcttttgacaatgctaatcctgagtgccaggctgctctgcgacctatcagagggaaagcacatttagttgattataccaaggtctgtgatggtatcagagataaactgcataaggctactctgctagcccaggcaatggcaggactgagaatgggtaaaggaaatactccgtttcctggagcttgttttaactgtgggaagcatggtcatac

SEQ ID NO: 4634 - DNA, 541 bp, Homo sapiens
  SIMILAR (328)..(540): 401254mologous to Human endogenous retrovirus HERV-K(II) gag,accession number AB047240,Smith-Waterman Score=157.
atgggacaagtgtgggctctggttcgttccaccttggaactttttcacactgatgatgaggaggaaggagagtatgacgaagtaacagaagaggttacagagcaggtttatttgccagctaaagctaaagtggcacaggaggaagaggttcatccctacccttctgcaccccctcattattattttgaagaaaaagagtggccagaccctccagatctttcttttctggaggacactgggcgaaaagtagttgccccagtgactgagcagcacctcgagcgactgctgtcagttctattcaggcaggagttcagcaggctagacgagaggggaccaaaagaactgtatgcagattttatagcttggaatctcttaagacaggagtctcttaaaaaggtgatttcagattcagctgctcaggatatagtgttgcagttattagcttttggcaatgttaatctcgattgccaggctgctttgcgacctattagagggaaagcacatttagttgattatatcaaggcctgtgacggtatcggag

SEQ ID NO: 4635 - DNA, 1074 bp, Homo sapiens
  SIMILAR (241)..(197): 731254mologous to Homo sapiens protease,accession number AF074086,Smith-Waterman Score=62.
ttagctcagtggcaaaaactgccagtatcctctgcagagccggctgctggggtccatgccaataaacactaatggcacctttgctgtgaaggctatggtgaatcggcagatgccatatgggctgttgtaaccctcagtggcaaagtctgccaaggtgctctcattgttctgtaatggtggttttccacttttcttaccaataagctgctttgccttgtctatttgtgcttccaaatcctcctgtttaatttcacttttccccatttccacatacggcacaatcaggagctgtgctatgcgctctcctggctctgctttccagggaacagaagtagatgtaacaatttgaatttctccattgtaatctgaatcaatgactcctgtatgtatttgtactccttttaaatttaaattagaccttcctagaagtaatcctattgtccccgctggcaagggtccacagactcctgttgggaccttttgcaggggttccccaggcagaaggctcacagcttttgtgcagcataaatctaccacggcactaccagctgtggcaggggacagacattgcccaggggtgagggaatggcctgagccggaaatgctcccatttggaatggggcccgaaattgggttcccatctttatcaaagttagagtgacaccaattagcccaatgttttcctttttcacattttggacatatttcaggctcagcagttttcttttttcccctatctggcagcctgattcgctgattttttctacattcttttttagtatgaccatgcttcccacagttagaacaagctccaggaaactgagtatttcctttacccactctcagtcctgccattgcttgggctagcagagtagccttaggcagattacctacgataccatcacaggccttgatataatcaactaaatgtactttccctctaataggtcgcagagcagcctggcactcgggattagcattgccgaaagctaataaccgcaacgctatatcctgagcagctgaatctgcaatcacctttttaagagactcctgtaaccgagctataaaatccat

SEQ ID NO: 4636 - DNA, 1284 bp, Homo sapiens
  SIMILAR (765)..(97): 451254mologous to Human endogenous retrovirus K gag protein,accession number Y10392,Smith-Waterman Score=575.
ttagaatggggcccaggacgggcccataggtgtttcccgaaaccgggttcccacctttatcaaacttagagtgacactgattagcccaatttttttttttttttttttacattttggacacatttcaggctcagcagtttttttcttttttcccctatctggcagcctgactccttgattttttctacattcttttttagtatgaccatacttcccacagttaaaacaagctccaggaaatggagtatttcctttatccactctcagtcctgccattgcctgtgctagcagagtagctttatgcagattacctccgataccatcacaggccttgatataatcaactaaatatgctttccctctgataggtcgcagagcagcctggcaatcaggattagcattttcaaaagctaataactgcaacattatatcctgagcagccaaatctgcaatcatctttttaagagactcctgtaaccgagctataaaatcaacatatggttctcttggtccctgttttatagcactaaaggaaaggtattgttccccacctgaagtgattttttcccaagctctaatgcacactccactaagctgttctatggcatcatcctgcatgaccagatgtgcatctaaatcagcccagccaccaacccccaaaagctggtctgcagttatattaatttgaggttgggcctgggcattttgagcagcctgaatggaagcttcatctgcccaccaagttttaaattgtaagaaccatgagcatgggatgtgtttccatttgtttgtgtcatctctgatttctttcagcagtgttttgtagttttccttgtagaggactttcacctccttggttaggtatattcctaagtattttattttttttgcagctattgtaaaaggggttgagatattgatttgattctcagcttggtcgctgttggtgtatagaagacctactgatttgtatacattaattttgtatccagaaaatttactgaattcttttatcacttctaggagctttttggaggaatctttagggttttgtaggtatacaatcacatcatcatcaaacagagacagtttgactttctctttaccaattgggatgccctttatttctttctcttgtctgattgctctggctaggatttccagtaccggacggccactctgggcgctgtcacaggaataggctccatgcagggcccacagcaggccagaccaggcatgaacgagtgagtgcaggatctgaccagccagcactccgggcgccat

SEQ ID NO: 4637 - DNA, 462 bp, Homo sapiens
cttattctcatggacaaggcatgggtccacagaagagagaaaccatgccagcagacctcatatcatctaggcttggaaatgatgcactgttacacctccaccacaagatactggccaaagcaagtcataaagtactcgagtgtcctccagcttagttccacgttctccaaccgtcgctccggtgacccttcgacctggattcgagcccccgtgatggacgccacttgccaagaccagctcagtgctaacccagtggtgctagaggaattaaaggcgcacacacagaaatatagaggtgtggagtgggaaatcaggagtctcacagccttcagagctgagagccccgaacaaagatttacccgcgtatttattaacagcaagccagtcattagcattgtttctatggatattagattaactaaaagtatcccttatgggaaacaaagggatgggccgaaataa

SEQ ID NO: 4638 - DNA, 1062 bp, Homo sapiens
  SIMILAR (399)..(22): 561254mologous to Homo sapiens Gag-Pro-Pol protein,accession number AF164614,Smith-Waterman Score=360.
ctaaagcctccagtttttcttgtctctagcattagatattgcattagcaactaggcgatcagccatttgattcccttcagtcaaaggtcctggaagaggtgtatgagccccaatgtgagtgatgtaaaaagggtgcattctacttctaactgctgtttgcaattggataaataaagtcatcagtttttcatctgtatgaaatcgtaactgagcattttcaattaactgtgtggaatgaaccatgtatgaagaatcagaaatcacgttaataggcatatcaaaagcagtgaatacctcaattacagctacaagctccactctttgagctgaagtataggatgtctggaaaactttactttttgatccagaataagaagctttaccattactagacccatctccgataccatcacaggccttgatataatcaactaaatgtgctttccctctgataggtcgcagagcagcctggcaatcgggattagcattgtcgaaagctaataactgcaacactatattctgagcagccgaatctgaaatcatctttttaagagactcctgtaaccgagctataaaatcaacatatggttctctgggtcctcctctaagccgttctatggcatcatcctgcatgaccagttgtgcatctaaaccagcccagccgtcgacccccaaaagctggtctgcagttatattaatctgaggttgggcctgggcattgtgagcagcctgaatggaagcttcatctgcccaccaagttttaaattgtaagaactgagcaggagttagacaagctcgagtaagagtgtcccagtcagtaggaattatccgactggaaacagtaacattctttaacagtcccattacaaaaggagaacctggtccatactcatttattgcttgttttaattttttgagtaatttaaaaggaaaaggctcaaatgtagctgtaatatttccctcttgatctggggggtgtattctaacagggaactgccaagcctctaaatcaccctctcgtctagcttgctgaattcctgcctggatagaactaagagccat

SEQ ID NO: 4639 - DNA, 999 bp, Homo sapiens
  SIMILAR (294)..(4): 721254mologous to Homo sapiens Gag-Pro-Pol protein,accession number AF164615,Smith-Waterman Score=388.
tcatttaatttcacttttccccatttccacatatggcataatcaggggctgtgctatacgctctcctggttctgctttccagggaacagaagtggatataacaatttgaatttccccattgtaatctgaatcaatgactcctgtttgtacttgtatcccttttaaatttaaactagaccttcctagaaggaatcctatcgtccccgctggcaagggtccacagactcctgttgggaccttttgcgggggttccccaggcagaaggctcacagcttttgtgcagcataaatctactgtggcactactggctgtgatggggacagatattgtacagggatgagggaatggcctgagctggaaatgccccgtttggaatggggcccaggatgggcccctcatgtcgtttcccgaaatcaggttcccatctttatcaaacttagagtgacaatgactagcccaatgttttccttttttacattttggacatatttcaggctcagcagttttcttttttcccttatctggtggcctgactcgctgattgtttctacattcttttttagtataaccatgctgggctagcagagtagccttatgcagattatctccaataccatcacaggccttgatataatcaactaaatgtgctttccctctgataggtcgcagagcagcctggcaatcgggattagcattgtcgaaagctaataaccacaacactatatcctgagcagctgaatctgcaatcacctttttaagagactcctgtaaccaagctataaaatccgtgtatggttctcttggtccctgttttacaatgctaaaggaagggtattgttcttcacccgaagtgacttttttcccaagctctaatgcacactcctctaagctgttctgctctgttacttcttctgttacttccttatactttccttcttcttcatcatcagtgtgaaaaggttccaaggtggaacgaaccagagcccacactagtcccat

SEQ ID NO: 4640 - DNA, 1617 bp, Homo sapiens
  SIMILAR (1164)..(973): 651254mologous to Homo sapiens Gag-Pro-Pol protein,accession number AF164614,Smith-Waterman Score=225.
ctggatcttagaaccaaatttcacccagcaccaactaccactggggaggtgcagagtatggagaagacctgatacagtgacagccaaaagctgagcatgcagcactaaatctgaggaagactttccaacacgccagccataccccacccttttcagcacagcaataaaatccacaccgtccgcatcagccttggctatagcatgccctggtgcagcactgttcatgttctgacatgcaaaggcccagtgcttctggcccatagctcctggaaccttctccagatggagcagctgtaagatgccagtgccaccaccagcacaggttcctaagtcattgtgtggagtactaagctcctcttgttgacccggcaggcggtccccggggccagctgagcctcccagccgggcctgcaggccctgcaggcaggacagcgggcagctcaggctggtggtccatgcaggcaggacagcgggcagacccggcaggcggtccccgggacaagctgagcctcccagccgggcctgccagcaggagagcgggcaatcccggcaggcggcccctgcagacaggaccgcgggcagcccaggctggcgagctcggcaggcgggcactgtaggcagcttagagggcaaccccggcaggtgggccttgcaggctgcacagcgggcagccccggcaggcgggccctgcaggcaggacagcgagcagctcaggctggcgggccctgcaggcaggttagcgggccgacacggcaggcggtccccggggccagctgagcctcccagccgggcctgcaggcaggagagcgggcagctcaggctggtggtccatgcaggcagcacagcgggcagacccggcaggcggtccccggggccagctgagcctcccagcagggcctgcacgcaggagagcgggcaatcccggaaggcagcccctgcagacaggacagcgggcagcggaggctggcgagcccgctttcgcaactgctgtttcagggagagattaattctttccactatggcttgtccttgagaattgtatgggataccagtaatgtgtttaatattccacatagagaaaaatgtagctagagcttggctagtatagcctggggcattatctgttttaatagaagctgggatgcccatcaccacaaaacacgtgctgataactgtaatcagcggtgaaagcggcttaataatatatcgtgtgcacagccagtggataaaaagctgtgattccaatattgttgatgtgtgtggaaaagcttttccagccaggtttgaaggttcatcagctctgataccatcacaggccttgatataatcaactaaatgtgctttccctctaatagttcgcagagcagcctggcaatcgggattagcattgtcgaaagctaatgaccgcaacactatatcctgagcagccaaatctgcaatcacctttttaagagactcttgtaaccaagctataaactccacatatggttcttttggtccctgctctgtaacctcttctgttacttcattatactctccttcctcctcatcattagtgtgaaaaggttccaagatggaatgaaccagatcccacacttctcccagtgtcaccctcat

SEQ ID NO: 4641 - DNA, 766 bp, Homo sapiens
  SIMILAR (328)..(639): 441254mologous to Homo sapiens Gag-Pro-Pol protein,accession number AF164613,Smith-Waterman Score=253.
atgggacaagtgtgggctctggttcgttccaccttggaactttttcacactgatgatgaggaggaaggagagtatgacgaagtaacagaagaggttacagagcaggtttatttgccagctaaagctaaagtggcacaggaggaagaggttcatccctacccttctgcaccccctcattattattttgaagaaaaagagtggccagaccctccagatctttcttttctggaggacactgggcgaaaagtagttgccccagtgactgagcagcacctcgagcgactgctgtcagttctattcaggcaggagttcagcaggctagacgagagggatgatgccgtagagcagcttagaggagtgtgcattagagcttgggaaaaaatcacttcaggtggagaacaatacccttcctttagtgctgtaaaacagggaccaaaagaactgtatgcagattttatagcttggaatctcttaagacaggagtctcttaaaaaggtgatttcagattcagctgctcaggatatagtgttgcagttattagcttttggcaatgttaatctcgattgccaggctgctttgcgacctattagagggaaagcacatttagttgattatatcaaggcctgtgacggtatcggagctaagcaagacagtgaacggtttgcatttacaattcctgtggtaaacaatctgcagcctgctaagcattttcattatttcacagatgggtctagcaatggtaaagcttcttattctggatcaaaag

SEQ ID NO: 4642 - DNA, 1180 bp, Homo sapiens
  SIMILAR (1038)..(1139): 321254mologous to Human endogenous retrovirus K gag protein,accession number Y10392,Smith-Waterman Score=42.
atgagccagatgctgaggaagagattccgggaggatcccaaggacccctcggttgcagccatgtcgagactgatggctgaggaggaccccaactgtcacaagcaacacccgtctaacacagccacccacctggggacagatcaagaagctgtcacagatggcggaagaaaacctgaggaaagcgggacagccagtcacaatgaataatttaatggtagctatgatagtggttatcaccactactgaggaacaagagtatagtgaagtaacagaagaggttacagagcaggtttatttgccagctaaagccaaagtggcaaaggagggagaggttcatccctacccttctgcaccccctcattattattttgaagaaaatgaccccccaaatctttcttttccggaggacactgggcgaaaagtagttgcccccgtgactgttcgagcagcacctcgagggactgctcttagttctattcaggcaggcattcagcaagctagacaagagggtgatttagaggcttggcagttccctgttagaatacaccccccagatcaacagggaaatattatagctacatttgagccttttccttttaaattactcaaagaattcaaacaagcaataagtcagtatggaccaggttctccctttgtaatgggactgttaaagaatgttacagtttccagtcagaagattcctactgactgggacactcttactcgagcttgtctaactcctgctcagttcttacaatttaaaacttgtgctatgaaacagggaccaagggaaccatatgttgattttatagctcggttacaggagtctcttaaaaagatgattgcagattcggctgctcaggagatagtgttgcagttactagctttcgacaatgctcatcccgattgccaggctgctctgcgacctatcagagggaaagcacatttagttgattatgtcaaggcctgtgatggtattggagagtatacgccttctacttatgaaaagaaagttaactgtaaaacagcttcatgcaggtccttcaggaggtatccagaagaaggcattgttatcacaggagatgacagctccatgcgtgtcgttgtccctgaggaccttccagtggggcaagatgtggaggtggaagacagggatattgatgatcctgaccctgtgtag

SEQ ID NO: 4643 - DNA, 910 bp, Homo sapiens
  SIMILAR (144)..(371): 721254mologous to Homo sapiens exchange factor smgGDS,accession number AF215923,Smith-Waterman Score=233.
gcggccgccccccgcgggtccctccctggctgcgggagagacggaggttagagggaggacacagagccgcgccgcccgcaccatatgaccttcgcctcgccccgccggttcctcaccctcggggagcaacatggcagataattctcagtgataccttgaagaagctgaagataacagctgttgacaagactgaggatagttttagaaggatgcttggatttgtctgcttcaagcccctggctcaaaataatacggcaaacaagtgcaaaaaatccaagcaagtggcaatacttcagctgtttgcaagtctgttgactccacagtcttcctgcaaagccaaagtagctaacatcatagcagaagtagccaaaaaatgagtttatgcgaattcccatgtgtggatgctggattgatttcaccactggtgcagctgctaaatagcaaagaccagaaagtgctgcttcaaacgggcagggctctaggaaacatatgttacgatagccatgagggcagaagtgcagttgaccaagcagggtggtgcacagattgtaattgaccatttaaggtcactgtgcagtataacagatcccgcccaatgagaagctcttgactgtcttttgtggcatgctgatgaactatagcaatgagaatgattcgcttcaagctcagcttatcaatatgggtgttattcctaccttagtgaaattactgggcatgcgactgccaaaatgcagctcttacagaaatgtgtcttgttgcatttggtaatttagcagaacttgatgctattaaactacagctggttgaagcaggcctagtagagtgtctactagagattgttcagcaaaaagtggatagtgacaaagaagatgatattactgagctcaaaactggttcagatctcatggtt

SEQ ID NO: 4644 - DNA, 1086 bp, Homo sapiens
  SIMILAR (595)..(1077): 941254mologous to Homo sapiens putative p150,accession number U93563,Smith-Waterman Score=767.
atgggacaagtgtggggtctggttcatttcaccttagaactttttcagactgatgatgaggaggaacaagagtataacaaagtaacagaagaggttacagagcatgtttatttgccagctaaagctaaagtggcaaaggagggagagttcttacaatttaaaacttggtgggcagatgaagcttccattcaggctgctcaaaatgcccaggcccaacctcaaattaatataactgcagaccagcttttgggggttggtggctgggctgatttagatgcacatctggtcatgcaggatgatgccatagaacagcttagtggagtgtgcattagagcttgggaaaaaatcacttcaggtggggaacaatacctttcctttagtgctataaaacagggaccaagagaaccatatgttgattttatagctcggttacaggagtctcttaaaaagatgattgcagatttggctgctcaggatatagtgttgcagttattagcttttgaaaatgctaatcctgattgccaggctgctctgcgacctatcagagggaaagcatatttagttgattatatcaaggcctgtgatggtatcggagtgttggaagttctggtcagggcaataaggcaggagaaagaaataaagggtattcaatcaggaaatgaggaagtcaaattatccctgtttgcagatgacatgatggtatatttagaaaaccccatcgtctcagcccaaaatctccttaagctgataagaaacttcagcaaagtctcaggatacaaaatcaatgcgcaaaaatcacaagcattcttacacaccaataacagacaaacagagagccaaatcatgagtgaactccctttcacaattgcttcaaagagaataaaatacctaggaatccaacttacaagggatgtgaaggacctcttcaaggagaactacaaaccactgctcaacgaaataaaagaggacacaaacaaatggaagaacattccatgctcatggttaggaagaatcaatattgtgaaaatggctatactgcccaaggtaatttatagattcaatgccatccccatcaagcgccaatga

SEQ ID NO: 4645 - DNA, 598 bp, Homo sapiens
  SIMILAR (499)..(2): 341254mologous to Human endogenous retrovirus K gag protein,accession number Y10392,Smith-Waterman Score=258.
tacattttggacatatttcaggctcagcagttttcttttttcccctatctggtggcccgacttgctgatttttttctacttttttttttttcagtatgaccatgcttcccacagttaaaacaagctccaggaaatggagtactttctgtatccactctcagtcctgccattgcccgtgctagcaggtggcctgatgcagattacctctgataccaccacaggccttgatataatcaactaaatgtgctttccctctgataggtcacagagcagcctggcaatcaggattagcattgttgaaagctaataattgcaacactatatcctgagcagccaaatctgcagtcatctttttaagagactcctgtaactgagctataaaatccacatatgattcttctggtccctgttttatagcactaaagaaagggtattgttctccacttgaagtgattttttttccccaagctctaatgcacgctcctctaagctgttctatgggcatcatcctgcatgaccatttgtgcatctaaaccagcccaactgccaacccccaaaagttggtctgcagttatattaatttgaggttggtcctgcg

SEQ ID NO: 4646 - DNA, 1164 bp, Homo sapiens
  SIMILAR (465)..(4): 571254mologous to Homo sapiens Gag-Pro-Pol protein,accession number AF164614,Smith-Waterman Score=466.
tcactggataatagctttagcttctttccaggtaatgttgtatctgcgtttgagaccagaggcattaacatgggttaaattgtgaaagtgtctagcattagatattgcattagcaactaggcgatcggccatttgattcccttcagtcaaaggtcctggaagaggtgtatgagccctaatgtgagtgatgtaaaaaggatgcattgtactcctaaatgctgtttgcaattgggtaaataaagtcatcagttgttcatctgtatgaaatcgtaactgagcattttcaattaactgtgtggaataaaccatgtatgaagaatcagaaatcacattaataggcatatcaaaagcagtcaatacctcaattaccgctacaagctctgctttttgagctgaagtataggatgtctggaaaactttactttttgagccaaaataagaagctttaccattactagacccatctccaatatcatcacaggccttgatacaatcaactaaatgtgctttccctctgataggtcgcagagcagcctggcaatcgggattagcattgtcgaaagctaataactgcaacactatatcctgagcagccgaatctgcaatcatctttttaagagactcctgtaaccgagctataaaatcaatgtatggttcttttggtccctgttttatagcactaaaggaagggtattgttctcccacctgaagtgattttttttcccaggctctaatgcacactcctctaagctgttctatggcatcatccagctgggggtccctggcttgcaaagtgaccgagaagaaaattcctacagcaataacaatgacagaatttgtgagatgcttactggatttcagactctgcattttgctaggcttattgggtttattcttcatcaccattctcattcctctgtcctcagggacttcctggcctgttggagacacagatgtacatggtatcatgacatattcagggctttgctgtccattatagagaacacatacaaactttccctggctctctacagccttgtaaatgttgaagtttgtgtagtttgctcgttctttacaatcccgcagagctccttgggtcagtttcagcacagggagcgctcgactattaagcatttttgaggaccctgggcaggaaatacccat

SEQ ID NO: 4647 - DNA, 2844 bp, Homo sapiens
  SIMILAR (2844)..(2152): 811254mologous to Mus musculus F-box protein FBX17,accession number AF176532,Smith-Waterman Score=1059.
ttagttgagctcatttggggttccatttgtaagatcatctgtagcttgatagcctcgatcctgctgtaggcaaagctgggccttcgacctagatgcctcgtacccttgatttgctagaaagctcaagaaatctagagtagcctgctggcatgaggcttctgaactggtagccaaaagtaaatcatccacatactgaaggaccagagtgcctggacttgagaagtggcctagatcttgagccagtgcctgaccaaagagatgagggctatccctaaacccttggggcaagatggtccacgtaagttgggatgtgtggtctgtgagatcctcaaaggcaaagagaaacctgggcaccataagttctgttgttggatcatctggttgggagcttctggcccagagaaccatcgtactctggggcagtgtgccttccagtgattgcttttccttttgggcctgttcttcttggcccctattatagaacactgaagttgccaggtttaataatgcctccagattttgttcagggcccagggctcgcttttggagctttcttctgatttctgcagctgattgggtaataagcttatcttttagaatcaattgaccctctagtgagtcaggtgacagggaagtatattttcttaaggcctcccgtagccaatcgaggaaggcagaaggattttcttcctttccctgagtcatggtggacatcattgaataattcatgggctttttcctaattatccttagtccttctagaacacaggtcaacagatgtttatgactccagtccccatgatctgagtcaaggtcccagtggggatccatactggggatggcttgctgaccagtagggaatttgtccctttctttggctgtcagtctatcatttacttgactaagataccaggtatctccaaactcttgggctgcagctaaagccacattcttttcagtaaaggccagggtttgatctaacaatagcatgacatctctccaatgagatcgaaggtttgccctagacccgttttggtttgtttgtttctccccctgcccaagaacctgtgatggtccctggaccctgctgatcggaatagttgcactcaccaacacagcaacagaaacactagttttcctcctacaccacaaggaggactgaggaaggtcagagttagtggcccttactgatgcattctcaaaaagctggacccttgcctgtcctccttttgatccagaataagaagctttaccattactagacacatctgtgaaacgatgaaaatgcttagcaggctgcaggttgtttactgcaggaattgtaaatgtaaaccattcacagtcttgctcagccctcatggcatttcccgaaatcagggtcccatctttgtcaaacttagagtgacactgattagcccaatatttcccttttttacattttggacatatttcaggatcagcagttttcctttttccccatctggctgcctgactcactgatttttttctacattcttttttagtatgaccatgcttcccatagttaaaacaagctccaggaaatggagtatttcctttatccactctcagtcctgccatttcctgtgccaacaaagtagctttatgcagattacctctgataccatcacaggccttgatgtaatcaactaaatgtgctttccctctgacaggttgcagagcagcctggcaattgagattagcattgtcaaaagctaataaccgcaacactatatcctgagcagccgaatctgcaatcacctttttaagatactcctgtaaccgagctataaaatctgtgtacggttcttttggtccctgttttacagcaccaaaggaagggtactgttctccacctgaagtgattttttcccaagctctgatgcacactcctctaagctgctctatggcatcatcctgcatgaccacctgtgcatctaaaccagcccagccgccgacccccaaaagttggtgtgcagttatatcaatttgaggttgggcctgggtgttgcgaggagcctgaatggaagcttcatctgcccaccaagttttaaattgtaagaagtctctcccgtactgctcaaaagatacgtagcggatgcccttgccaaagttggtgaagacgtgggagacctgtcggcagcccctctcagtccactgaaggaccgggtcaggtgaggctgagaacttgaccacttccttttcatacacatccagaaggcggacccggagctggtagacgcagccgcagttctctcgagcgccccaccagtcagccacacagatctcaatctgggcgctgtccagcagctcctgccacaccccttccatcaccaggtccacaagctgcctcttggagcaccattcgaaagaggtcacgaagcaggtctgcgaaggagccccaggcaccggtgttaggttcttttctatggcccagccgttcccgccatgctccacctcccagcctctgaagccctgctctccgcaggagttgaagatgagattgcggccgaagggcgcgcgcagacagtagcgcgccagggcgcacagcgggaactcctccttgtcttcgttgctgggcaggcagcgttgagccactgcgtagagtgcgcggccctcggcgctgcggtcgcgggccagctgcagcagccacacagtgggcccgtccactatgtcgcgccaggcgcggcacactgggcggcatcgcgtgaccaaggagcgtggcggcacgtggctcagcacctgcaccagcagctccgggggcagcgcgtccagggccagggatgggtccgccggcagccgtcgccgcgatagccgggcgcccat

SEQ ID NO: 4648 - DNA, 2518 bp, Homo sapiens
  SIMILAR (24)..(590): 351254mologous to Mus musculus proline-rich protein MP- 3,accession number M12100,Smith-Waterman Score=213.
ctagcctccctccccgcgcttcgaggctgccaccagggccatctttttctggatggagtccaggggacaacagaaaacttcccaacactccacctcctcctcgggcgggaccaaggcctccgtctcgcgcaccgcctgcatgaacacccggtccaccatccgctggctcttggccatgacctccgggaacggggagcgcccctcgcggccccgcgccgtcagcacctggcgcccgtcgtccgggtcggcctgggtgcccaccagcacccgcgggacggccccgggttcccacggccggcgcaggcgcttgctcggcggcctcacggcccggaacgaggcctcgctgcacacgcccgggagcaccgcggagccgtcgccgtggcggatgtccaggtcctggagcgtgaccaggtgctcggcgcccgccgcgtccacgacctccagcaacgcgggcgccgcgttcgcctcgatctcctcgcggagccgctcctccgcccacgccgcgcactgctcggggagcggccgcacgcgaactgcgtgtccagcgtggtcctgcccactccacgctccccagcagcacaccccggcagccatagtgccgtataagatgtaaccgaaaatgcgtacactgacgcttaaacaagggttacttgtgtatgtggctgcctcgcactgattgactatatccggatggtctttctctcctgatggtgctttaattcgtggagaccttgtttctgggtcttctctgagaccccgaagactctggagccggcactctgtgcatcctccgtagactggccagaaccactctgaggtcggtggtctcttatcaggaggggatgctggttggtaaggttgtattgaaaatgcaaaaggaagcggcagcgtcagagtctggttgatgtcggggtggggtctgtggaccgcagtccgcaggggagaaagcctaagggcagctggctctagttgattatctcctggatctttctctgtggcttctgtctctttctgatcattttccttcacgcgtttcaggaagctatctcggctcatagagggcttaatgtgctcaatacgctcattaattctcttggcaggaatcttgcccttaacttgtttgttttcctcaggttttcttctgccatctgtgacagcttcttggtctgtccccaggtgggtggctgtgttcagcaggtgttgcttgtgacagttggggtcctcctcagcgtcagcctcaacatggctgcaaccagggggtcctcgggatcctcccagaatctcttcctcatcatctggctcatgataaggtttcaggtgtcttgatggtatccaaatcggctgttgattcggtcctctgatagcatcacaggccttgatataatcaactaaatgtgctttccctctaataggtcgcagagcagcctggcaatcgggattagcattgtcaaaagctaataactgcagcactatctcctgagcagccgaatctgcagtcacctttttaagagactcctgtaaccgagtcaccacggggactgctttaagagtacttggtgtcctccagcttagttccacgttctccaaccatcgctccggcgaccctttgacctggattcgagcccccacgaatggacgccacttgccgagaccagctcggtcagggacaccctcgggcgggatcagggcctccgtctcgcgcaccgccagcgtgaacacctggtccatcctccgctggatcttggccgtgacccccgggaacgggcagggcccctcgcgggcccgcgccatcagcacctggcgcttcggagtcccggtcggcctgggtgcccaccagcaccagcaggacggccccgggttcccacagcccgcgcaggcgctcgcgcaggccctcacggccgggaacgaggcctcgctgcacacgccccggagcaccgcgaacgcgtcgccgtggcggatgtcccaggtcctggagcgtgaccaggtgctcggcgtccgccgcgtccacgatttccagcagcgcgggcgccgcgtttgcctcgatctcctcgcggagccgctcctccgcccacgccgcgcactgctcggggagcggccgcacgcgaactgcgtgtccagcgtggtcctgccacgtcacgctccccagcagcacacccggcagctcctcatgtatgtccacgtccttaatcttcttggcgtgagacaatgaaccctgggtatttactccagacagcgatgccacttcatcagggggatagtggggaggggggatttcctgaagattgaggttgaaatattggtggtgagttccccagtaagttcctcttgaagttctcacagggaactgcaggtcagaacgtgagctgtcctgtgacacgactccaacatcagacccggagactccccacaagttccccattagatccatcttgcttgagttccacttggaatattcgacctggaaaaggcaggtgcggtgcctcacgaagcccactggacgcagctgacccttccacat

SEQ ID NO: 4649 - DNA, 406 bp, Homo sapiens
  SIMILAR (38)..(145): 691254mologous to Caenorhabditis elegans homology with ribosomal protein L21; coded for by C. elegans cDNAs GenBank:M79575, T01659, T00020, M79946, T01039, T00268, T00862, and T01086; putative,accession number L15188,Smith-Waterman Score=131.
ggcacgaggaaccgccatcttccagtaattcgccaaaatgacgaacacaaagggaaagaggagaggcacccgatatatgttctctaggccttttagaaaacatggagttgttcctttggccacatatatgcgaatctataagaaaaggggatattggagacatcaagggaatgggtactgttcaaaaaggaatgccccacaagtgttaccatggcaaaactggaagagtctacaatgttacccagcatgctgttggcattgttgtaaacaaacaagttaagggcaagattcttgccaagagaattaatgtgcgtattgagcacatttaagcactctaagagccgagatagcttcctgaaacgtgtgaaggaaaatgatcagaaaaagaaagaagccaaagagaaag

SEQ ID NO: 4650 - DNA, 1205 bp, Homo sapiens
  SIMILAR (1201)..(1103): 781254mologous to Homo sapiens Human secreted protein encoded by gene 44 clone HTDAD22,accession number AAY02693,Smith-Waterman Score=149.
  misc_feature (1)...(1205): n = a,t,c or g
tcaatgcagcaaactttattgttgtcttatttttaaaaattgccatagccaccccaaccttccgcaaccatgacccagatcagtcagcagccatcaacatcaaggcaagaccctccaccaacaaaaaattatgacttgttgaaggctcaaataatcattagcttttttcagcaataaataattctttaattaagataggtatattgggtgttttttttttttagccataatgctactgcacacttaatagactacaggatggtgtaaatgtaacttttatatgcaggggaaaaccaaaaaacttcatgtgactcactttattgagatattcactttattgcagtggtctgaaactgaacccacaataactacaaggtatgcttgtaaataccttatttttaacaaaaagtgaaaatgatttccctgttatttactaacaaatagaccagacatttgcatcagacagtgagcataaacttctctgatcacctctcaagaggacatctcccatttcctcatttgactctcctcaagatttcctggtaagaccaaacttttatcttccatatggtctcacagggtcagtggttcataatataccatcaggttatacaacaggcaatttaatgaatctcaggggtggaaggacaaattgcccggtttctgaggtagagggccgggatagggtcaccggggatacttcattggaaactaatggattcttcaacttctcctggcctttcaacttcaccagaggaatattagacatccacttgttagtggttctctatggggggatcagtagaggaaagccaaatttggggcattaatagaacaaatcttatgttaaatcctcgtattatttttcttgagataatatgactacagctcagatataaccatatccaatttttaactacttcaaaccaaggtaattccatattattctcactactcctatctaattgtggtatcaattggctctaaaaatattaaacacatatatattacttgagacctctagactataaaatacttcaaaagtctagtccttaaaacgtagggcaaaaaatacctcaattttggccgggcgcnggtgtcacgcctgtaaacccagcactttgggaggccgaggcaggtggatcaggaggtcaggagtttgagaccatcctggccaacacagtgaaaccccgtctccacttcag

SEQ ID NO: 4651 - DNA, 469 bp, Homo sapiens
  SIMILAR (468)..(427): 921254mologous to Homo sapiens N-acetyl-beta-glucosaminidase prepro-polypeptide,accession number M13519,Smith-Waterman Score=71.
tcaatcaataaaaatattttattcaaaaaacagtctaatatcttattttacatgatttcaaaataaagttgattgtagtacagattgctgtggcctttttcccctccattttttacatgttctcatggttacaatatccagcataaagaggttgtgcagctattccacgttcgaccatcctgcagcggtgccttgtcagtctgtcataggcgtcatccatatctctgacatctttggaactccagagtctctcaccaacagcacttgcccgaggccataatcttggagtgaggttagttgcatccacatattctccccatagacaagcttctccaccaatgaaaagttgtttctgtttctgagtaccgccaaaatcaagaggttccactttatagtatttcctccaatcttgtccatagctaatcaaatctttgctttatcatcaaaaacctcctgccagacaatggat

SEQ ID NO: 4652 - DNA, 770 bp, Homo sapiens
  SIMILAR (200)..(508): 871254mologous to Homo sapiens N-acetyl-beta-glucosaminidase prepro-polypeptide,accession number M13519,Smith-Waterman Score= 473.
aaaagggttgggcacgaatttaaagaaactagattctcttaattccaaagggttggggaattatggcaaccataaacaaggggttcatggtttggccagggggttttgatgaataaacaaaggctggccccgggaacaatggtgaaggtatgaaaggacggggcatatcctggggaactcagaagagtcacagattctgggtttcctgtaatccctttcggttcctgggacttaagattggataagctagggccaagattggagaaaatactataaagtggaacctcttaattttgggggtactcagaaacagaaacaacttttcattggtggagaagcttgtctatggggagaatatgtggatgcaactaacctcactccaagattatggcctcgggcaagtgctgttggtgagagactctggagttccaaagatgtcagagatatggatgacgcctatgacagactgacaaggcaccgctgcaggatggtcgaaggcctggcatctttcttgtgagacaagcttaaggacacaaaaagaaccacacctttgtgataccactcttctgaaggctacttatagtaataacttcatagatgaacagcatgattcagatctgccaggacagggctgagataatctctagctactgtaacctcaagattcatcagaggctccaaaacttgcttatcagctttcttcagagcctaaagaaattaaagaatgttaacttatctttcataaataaaaacttaaaataaaaaaaaaa

SEQ ID NO: 4653 - DNA, 392 bp, Homo sapiens
  SIMILAR (105)..(347): 401254mologous to Streptomyces mobaraensis elongation factor G,accession number AF153617,Smith-Waterman Score=144.
gttaaagcaagcttatgtctttttgtatgagctctaggctgtatttatttgagggttttatttatgaaagataagttaacattctttaatttctttaggctctgaagaaagctgataagcaagttttggagcctctgatgaatcttgaggttacagtagctagagattatctcagccctgtcctggcagatctggcacaaagaagaggaaacattcaggaaattcagactcgccaggacaacaaagttgttattggatttgttcccttagcagaaattatggtaggtactttgtaactgaaaagtacatattcttcttaattcaggggatattatatgccaatgaatagacaatcagtaacctgaaagaaacattaaggctttgatttagag

SEQ ID NO: 4654 - DNA, 1514 bp, Homo sapiens
  SIMILAR (1070)..(1240): 631254mologous to Homo sapiens transformation-related protein,accession number L24521,Smith-Waterman Score=175.
caaagttcaccctctgtgggtgtcccatggaacaccccttattttcttgtctttagtaaagtccctactatataattcaaccaaactgtaatggattcctttctaatcaagacccttgattccgtacagaaaatctcttatgtatcaccaattaataacctgtttggggacaaaacttccttactgatataagcatgggagaactactcatatttccgagtgtgctggtgaatgatataatgagcattactttctaatgagattctctcccttagcacaccatgtacctgtcagtcatacaaccagtatttggtgagatgctgttatacactagtgtttactttcagcattatcctgtttcctatgcagaaagtgctcagattgttccaacaataggtctccttttgtacacaggcacaatactaaacttcagcatgttaataaaggtttgacttagaatttttcttttgccaattagcaccaagaaaagaggtgaaaaggaggaagacacattccatagtaagaattctacaatgtacagatttgaatggaacgtaactcagaacaaagccaaaccattcaattactttacctactgttaggaagctgttcctctaacatatttacactgggaaatcaggctcccattatactaacaggcaacaataaacaatctactttaatagtcaaagtctcttgttctaatggaagggggttcaatgaagttgacaattaactgacaacaccatggaaaacattccaagcctttatggtgggaggaagggatatttgtactgtgtacgcatgagcaactttctccagatttagtgctacagtgaaaaccgaaactatgtgaaaacaagttaaatttacaataagaatgattatctgcaaccctatttgttaacaatcaccactagctcttagaagagaaccaatagatttttatagtcctatagattttgcccaacagaaatagcacaaggagatgtaaaagttacagagtacaaatgtatatataactaaacctacttcagtactaaacctttttttttttttgagacagagtctcgctctgttgtccaggctggagtgcagtggcatgatctcagctcactgcaacctcccatctccagggttcaagcaattctcctgcctcagcctcccaaatggctgggcctacaggagcgtgccaccatgcccagctaatttttgtgttttttagtagagacagggtttcaccatgttggccaggctggtcttgaactcctgacctcaggtgatttgcccgccttggcctctgaaaagtgctgggattacaggcgtgagcacaccgcgcgcggcccagttactaaaccttcttactttcaagttttgttttttagactacaccccatctttataaatcacttgaatacatgaaaagacttcatgtttaacatctttaattcaaatgtaaaagttcaatacaagccatttatagggcttgagatttgttggtcttttaaaaacaa

SEQ ID NO: 4655 - DNA, 1578 bp, Homo sapiens
  SIMILAR (736)..(1377): 811254mologous to Homo sapiens Sop2p-like protein,accession number Y08999,Smith-Waterman Score=914.
cgccatgcttggcacgagggttgagcggtgcctaagagtgttggatggtgcagtggctgaatttgatgcctctgctggtgtagaggcccagactctcacagtatggaggcaagctgataaacacaatatacctcgaatctgttttttaaacaagatggacaaaactggagccaagctttaagtatgcagttgaaagcatcagagagaagttaaaggcaaagcctttgcttttacagttaccaattggtgaagccaaaactttcaaaggagtggtggatgtagtaatgaaagaaaaacttctttgggaattgcaattcaaatgatgggaaaagactttgaggaggaaagcccctcttgggaaatgaatgatcccggaatttgctggaagggaaacaacttgaaggcaaggaatgcctttaattggaacaagttgcagatttggatgatgaatttgctgacttggttttagaagaattttgtgagaattttgatttgttaccagctgaaaagctacagactgcaatacatagagtgacactagctcagacagcagtgcctgtgctttgtggaagtgccctgaaaaacaaagggatacagcccttgttagatgctgttactatgtacttaccttcacctgaagagcgtaactatgaatttctgcagtggtataaggatgacttatgtgcattggcatttaaagttctccatgacaagcagcgaggaccactggtttttatgcgcatttactcaggcactataaaaccccagttggccattcataatattaatggaaactgcacggatcgtacccagattgccctcagtgtcaataatcacgaagtgcacatctataagaagaatgggcgccagtgtgtgaaagctcacgaactcaaggagcacaatggacacatcacagatattgactgggctcccaagcatgaccacatcgtcacttgtggggcagaccacaatgcctatgtctggagtcagaaagatggtgtctggaagccaacactgatgatcctgagaattaatcgcacagctacttttgtgaagtggtccgccctagagaacaaatttgctgtgggaagtgaagcacgactcatttcagtttgttactttgagtctgaaaatgactggtgggtgagcaagcacattaaaaagctgattcgctccacagtcctcagcttggattggcatcccaacaatgttttgctggcagcaggatcatgtgacttcaaacacagagtgttttcttcctacattaaagaagtggatgaaaagctggccagcatgccctgggacagcaagatgctttttgggcagctgatgtcagagtctggtggcggtggcactggtggctgggtccacgggttagacattccaaaacagagcatccaacgcaacatgtctgccatggaatgcttctgcaacacggacaagagggccacgactgagggctccaacatggctttgaagatgctgcgccagaatagcatcactcaagtctctatttatgaggtggatgagaaagattgtcgcaaatattgcactactggcatcgatggagagccatga

SEQ ID NO: 4656 - DNA, 1886 bp, Homo sapiens
  SIMILAR (719)..(135): 401254mologous to Homo sapiens N-acetyl-beta-glucosaminidase prepro-polypeptide,accession number M13519,Smith-Waterman Score= 214.
tttttttttttttttttcaatccaataaaattttttaattcaaaaaccagtctaatatcttattttacatgattttcaaaataaaagttgattgtagtacagattgctgtggcctttttcccctccattttttacatgttctcatggttacaatatccagcataaagaggttgtgcagctattccacggttcggaccatcctgcagcggtgccttgtcagtctgtcataggcggtcatccatatctctgacatctttggaacctccagagtctctcaccaaccagcacttgcccgagggccataatctttggagtgagggttagttgcatccaccatattctccccataagacaaagcttctccaccaaatggaaaaagttgttttctgttttttgagtaccgccaaaaatcaagagggttccacctttatagtatttcctccaatcttggtccataggctaatcaaattctaaggtaccaaggacagaaagggatatcagggaaggccaaaagcttgggactcttactgagttcctcaggatatgcccccgcctttccatacctccaactattgtgccccggcgcaggctttgctttatcatcaaaaacctcctgccagacaaatggatccctctgggtattggttgcaataatatcccaaacccttttgaatgtagaaagaatctagtttctttaaatctgtgccaaaagcctttttgcctcatgaaattcttgaatttttggatttgattcccaacatttaaattccacttcatctccctccaaatgaaatgattgatctggaaacacctcactaatttctttgaaaaatgtagtaaggaagctgtatgttgtattcagagtagggtttataggtccaaaagagtccaacttgttttgtctactgtaacatggagtcaggaggtctttctgaccttttccccaagatagtgtatgcccaggggtatcaaattctggcaggactcgaattcctcgtaatctggcatattcaatcaccatacggacatcatttggtgtataaacatgagacaaagaatagcttcctttattgcttaactcaggaaaagtgatgctctgatatgggaaagactggtcatcaactatgtgccagtgaagaacattaaacttattaaaagccatggcatccagagttttaagaataatcttaactggcagataatgtctggatgtatcaatcaaaattcctctgtgagaaaaccttggagaatcaataatggtggattcattgatggtgaaagttccataagaatcttgataaactaactggctaaaggtctctaaacctcgtaatgctccccaaactctgttggccttaaggacagccactggttctttcacaagtaaagtataagactcatctgaagatatgttggggaaagcatcacactctgactgaagggtgattgagacaagaagttgctgaacctgggttttagcctggaattcagcaggttcatgatgccacttgtagaaaccaaaaatatagccatgatatcgtcgaaacgcttcctccagcagggtgcaggaggggcccgccgtggaattggggctgtggctgatgtagaagttctccggggcgagatgcagcaggttcggggtcatcttcaccgagagcggcaggggccacagcgccggccccggcttggccgagacgctcggggcccgagccgcctccgccacctgcaccaccagcgccacctgagtcagcagcgccaacatcgccgccagcagtgtcgccaacagcagcgccagcagcatgggcggccggggcagccccagcccgcacagctccatggccgctcggctgctttccgcccggtctgccgagccggagcctcgggac

SEQ ID NO: 4657 - DNA, 2976 bp, Homo sapiens
  SIMILAR (450)..(707): 341254mologous to Thermotoga maritima translation elongation factor G,accession number AE001799,Smith-Waterman Score=103.
atggctctgaagaaagctgataagcaagttttggagcctctgatgaatcttgaggttacagtagctagagattatctcagccctgtcctggcagatctggcacaaagaagaggaaacattcaggaaattcagactcgccaggacaacaaagttgttattggatttgttcccttagcagaaattatggttgcagatttggatgatgaatttgctgacttggttttagaagaatttagtgagaattttgatttgttaccagctgaaaagctacagactgcaatacataagagtgacactaagctcagacagcagttgcctgtgctttggtggaagtgccctgaaaaaccaaagggatacagcccctggttagatgctgttactatgtacttaccttcacctgaagagcgtaacctatggaatttctgcagtggtataaggatgacttatgtgcattggcatttaaagttctccatgacaagcagcgaggacccactggtttttatgcgccatttaactccaggccactataaaaaccccagttggcccattccataatattaatggaaactgccacggagagaataagtcgtctgcttttgccgtttgctgaccaacatgtagaaatcccttcattgactgctggtaacattgctttgactgttgggcttaaacatactgccactggagacaccattgtctcatccaagtccagtgcattagctgcagctcgtagagccgaacgggagggagaaaagaagcacagacaaaacaatgaaggcagagagacttttattggctgggagtgggagattccaggaacctgttttcttctgtaccataggaacccccatcactgtctaaggcagccagatttgggaacatgcgtttgaaatgtctttcagcgtgaggatccccgttttgaaagtgaggctagatcctgactctggacaaactgttctgtgtggtatgggggagttacatatagagattattcatgatcgaatcaagagggaatatggactggagacctatctcgggcctctccaggtggcatatcgagagaccatcctaaactcagttcgtgccacagataccttagatagaactttaggagacaaaaggcatcttgtgactgtagaagtggaagcaaggccaattgaaacatcatctgttatgcctgtgattgagtttgagtatgctgaaagtatcaatgaaggccttttgaaggtctcccaagaggccattgaaaatggaattcacagcgcatgtctccaaggaccattgcttggatccccaattcaggatgtaggcaattacctttacattccctgacaaattcatccctgggcaccttccacaacttatgatttctgcctgtgtctcaagatgccgtgcaaaaaggctcttgaaagaaaagctgataagcaagttttggagcctctgatgaatcttgaggttacagtagctagagattatctcagccctgtcctggcagatctggcacaaagaagaggaaacattcaggaaattcagactcgccaggacaacaaagttgttattggatttgttcccttagcagaaattatgggttattcaactgtgcttcgaacgctaacatcaggctcagctacttttgccttagaactatctacttatcaagcccatgaatcctcaagatcaaaatacactgctcaaccggagaagtggtttgacctaaatgttttagtttttgggagaggaaattcagggaggcaccctaggctacttcatttttcagtaaggaacaatttttattgcctttatttattgggacggaataaaggtactgtttcaggtacattcaggggaacctagggataaaggatataactttaagctttgatagtggcactggagcccacccgttttaatttatataatgagaaatgtgctttgatgtttaaagccactgtacctgaatcatgctgttcatctatgaagttattactataagtagccttcagaagagtggtatcacaaagttgtgtttcttttgtgtccttaagcttgtctcacaagaaagatgccaggcctctaaatgtaataagatagagggtcaaaggttcaatcaataaaaatattttattcaaaaaacagtctaatatcttattttacatgatttcaaaataaagttgattgtagtacagattgctgtggcctttttcccctccattttttacatgttctcatggttacaatatccagcataaagaggttgtgcagctattccacgtctgtagataacatgaataaagatattttagattgatttagattgatatcattcataaagatattttagattgatattcatgtcatcttagaaacttaaattagaatcactaaatcacagcattactgaaaataagggaagaaaattaaagcaactcaagatggagttctaagttacaccaacattttttgtatctataaaacagtcacaagtctgaatatatctttacaggtattattacttacaaaaaaataattcctggtttcttctaattactatttgttaggtaacatacatttctatttatagcaaaagaaactaacactgaataagaaggttaaaaatcacactggacttaatagatttcttactcgaccatcctgcagcggtgccttgtcagtctgtcataggcgtcatccatatctatgacatctttggaactccagagtctctcaccaacagcacttgcccgaggccataatcttggagtgaggttagttgcatccacatattctccccatagacaagcttctccaccaatgaaaagttgtttctgtttctgagtacctaaattaaaatcattgaattaagttcagaagttcaaagcttatacacagaggcaatatttcatcaagatttgtttcctccatctttatcctagggcaacatttcttgcccgtggttagcaggaccttgggaaatgc

SEQ ID NO: 4658 - DNA, 2214 bp, Homo sapiens
  SIMILAR (2)..(262): 1001254mologous to Homo sapiens Amino acid sequence of human intracellular signalling molecule INTRA44,accession number AAB64412,Smith-Waterman Score=484.
gcgttgtcagaaagcaaaattcacacctgttaatcgtcgccaccattgccgcaaatgtggttttgttgtctgtgggccctgctctgaaaagagatttcttcttcccagccagtcctctaagcctgtgcggatttgtgacttctgctatgacctgctttctgctggggacatggccacatgccagcctgctagatcagactcttacagccagtcattgaagtctcctttaaatgatatgtctgatgatgatgacgatgatgatatgcagtgactaaggacacatttgggagtatttaatcaggtgaggctctctgagaaatcaactttgggggaaatgcaagactctgagctctctctctggattgttctagccatgaatttgcctgagaaacttggaacctatgtgcctcaatatattccatagaaagaaggtgcccctgccttctgccactcctcacactcttctacagggataggcttttgcaaatatatcagataaattttttgtttcttgtttatttttaggttattttcttggaaggttgggaaaagaggtttgtttaaccaggtcatgtactacggtgttgtttttcatgttctgttataagtaaaactaaaaagcacagaattggtgggaaaaggggctataatgtgggttccattaataatgttagcagcttttttctaaccatcctgtctaatggttaagacacccagtaacaaaaacacatgatttggaaatactttggctttttcatatacctagtggtgccttatcataatagcaccggtaacatgaaataagcccctaccttcttactttctggtttgttgaaaaaatacactggtgctctttgaagtgataaaatgagtgtttatgaatgggtgtaattaggaaatacttctcatctgacagctacaaataactaagttgtggaggtattttcactctatggtgaataaatatttttccataaaataggtgggaatatatttttgcgtttatatagggctccaaattataattggcgaatatatattgtaaattaataaaagctgtcattcttaggaatttggtttgaaatttatcagttatacagaattgtcatactgcattagcttctacctttagtaagacatattttttaggtataaattcttatgctttaacattatttctggattgaaaatcttataaaacccttgaaaataaacagtctcttttttacaaagcctgtgttagagcacagatttacctaggcttgaagatttggaagaaataatatgtaagaatggcctcaaggcagaccactttaagtttggctagacttcatatcgtggaagtattgtctatttcagtgtgaaactatcttgaatttgcaaatatagtgttatattttataaagttttgtaaaatcccaaacaatatttctatttttgtaaaacaattgtatgtataatctgtatttgaaatcattttgcaatctatggaaatagagtagcaattgctatttctaaattgtgaactttaagtcaatctagatttattttgagaagtaattgttcactctttacttttgaggcagccattaggttgaaagtatatatttatcatataaaacttgatgcgttttgcactactctttccatttatatgctgcaaacaactacagtctttgaaatatggaaaatcagcagtctaaagtttgttttaaattctaaatttaaaaaatcttcaaatctgaatataccgcaaatgtcatgaggaagtttgattcagtaacttggtgatggaggattctttgggtatcttactgtttgggttaagggcactaatttttacttacctattggattttgaaagtatctgagatataccaaatcctccccgtaggaaatgtgaaagaaaagccacaacaaaacctagggttttttgttccatttgccttgccttttatgattttttttggtttgttttaatatcaggtgggattttttgtttctaaggcaatatatacataaaatcaacccacatatctggaaaagggatcctggaaacctgagaaatgctaatggagatttgctggtacataggaatctagcaaattcaggaaccaaggggaaatgttgtgagataacatttacattgtcaacctttattgactttgtttttacaataaaaaatattttacaacttaaaaaaaaaaaaaaaaa

SEQ ID NO: 4659 - DNA, 424 bp, Homo sapiens
  misc_feature (1)...(424): n = a,t,c or g
gaatgtgtaccatctgtgtgcctgcagctgtgtagtgctggacagtgacaaccctttctctccagttctccactccaatgataatagttcacttacacctaaacccaaaggaaaaaccagctctaggtccaattgttctgctctaactgatacctcaaccttggggccagcatctcccactgcctccaaatattagtaactatgactgacgtccccagaagtttctgggtctaccacacccctgctccttcggaggacgtgccctcacccctcactggtccactggcttgagactcaccccgtctgcccagtaaaagcctttctgcagcagctgnnnnnnnnnnnnnnnnnnnnnngggcgccccgttaaaaggagaccagttaaacgcccgggggtggggaaggatatatttttttttggggc

SEQ ID NO: 4660 - DNA, 764 bp, Homo sapiens
  SIMILAR (113)..(454): 861254mologous to Homo sapiens glutathione peroxidase,accession number D00632,Smith-Waterman Score=516.
  misc_feature (1)...(764): n = a,t,c or g
ggcagcggctcaggcgaccctgagtgtgcccccaccccgccatggcccggctgctgcaggcgtcctgcctgctttccctgctcctggccggcttcgtctcgcagagccggggacaagagaagtcgaagaactgaatgcactacaggaagagcttgcaccattcggtctggtcattctgggctttccctgcaaccaatttggaaaacaggaaccaggagagaactcagagatccttcctaccctcaagtatgtccgaccaggtggaggctttgtccctaatttccagctctttgagaaaggggatgtcaatggagagaaagagcagaaattctacactttcctaaagaactcctgtcctcccacctcggagctcctgggtacatctgaccgcctcttctgggaaccccaagaaagttcacgacatccgctggaactttggaagttcctggtgggccagatggatacccatcatgcgctgcaccaccgaccacgtcagcaacgcagatgacatctgtctactgagcgcagcagcctggggcagagaatactgagccgctatcatgcacatgtaggaggcttgtcagagaatcggctcaaccctttacataagaccttctatatagccactgccatgaagcaacattgcgcaccccatgtgcccctgtaccctcacagtcnaatggtnnctggcaccctcactagttttgggacatggccgctgagtgcagacctttcccccccaagctccccacgaaactttgcgg

SEQ ID NO: 4661 - DNA, 485 bp, Homo sapiens
cctatgtgtctttctgggaatgtgtaccatctgtgtgcctgcagctgtgtagtgcctggacagtgtacaaccctttctctccagttctccactccaatgataatagttcacttacacctaaacccaaaggaaaaaccagctctaggtccaattgttctgctctaactgatacctcaaccttggggccagcatctcccactgcctccaaatattagtaactatgactgacgtccccagaagtttctgggtctaccacactccctaaccccccactcctacttcctgaagggccctcccaaggctacatccccaccccacagttctccctgagagagatcaacctccctgagatcaaccaaggcagatgtgacagcaagggccacggaccccttagccttcggaggacgtgccctcacccctcactggtccactggcttgagactcaccccgtctgcccagtaaaagcctttctgcagcagctgaaa

SEQ ID NO: 4662 - DNA, 1806 bp, Homo sapiens
  SIMILAR (181)..(624): 941254mologous to Homo sapiens glutathione peroxidase,accession number D00632,Smith-Waterman Score=766.
atggcccggctgctgcaggcgtcctgcctgctttccctgctcctggccggcttcgtctcgcagagccggggacaagagaagtcgaagatggactgccatggtggcataagtggcaccatttacgagtacggagccctcaccattgatggggaggagtacatccccttcaagcagtatgctggcaaatacgtcctctttgtcaacgaagagcttgcaccattcggtctggtcattctgggctttccctgcaaccaatttggaaaacaggaaccaggagagaactcagagatccttcctaccctcaagtatgtccgaccaggtggaggctttgtccctaatttccagctctttgagaaaggggatgtcaatggagagaaagagcagaaattctacactttcctaaagaactcctgtcctcccacctcggagctcctgggtacatctgaccgcctcttctgggaacccatgaaggttcacgacatccgctggaactttgagaagttcctggtggggccagatggtatacccatcatgcgctggcaccaccggaccacggtcagcaacgtcaagatggacatcctgtcctacatgaggcggcaggcagccctgggggtcaagaggaagaaggtgacttctcaataccaggatagggacaacaaatttcagaatgtagagagaatccctctttcggggagtcacagaacagtatgtatgatgggtgtgaaaggaaaagttaaaacgcaagctaagccactaagtggagaggagtctctggagctggaacaatcaggcttggccatggcggctggtgctgataaccatttcttggcagaagtgcccgccaaagctgtggccctagtcctcaccaccacagagagccagcaaggccttcaggaagtctccggaggtgtcaccctggcagaggcagagagcagagcgctgggccccctgccccgtgaggacggcaacctgatgctgcacctgcagcgcctggagaccacgctgagtgagccggaccacggccagctcttcacccacctgggccgcatggccctggagttcaaccgactggcatccaaggtgcacaagaatgagcagcgcacctccattctgcaggaatacaaagatgtgcaaagtacgctcctgcctcaggaagttcccagccagatgggcaatgcccgcaccagtcagacacatgctgtaccaggtggcaagcctcggagaggaccgtaccggatctacgaccctgggggcagcgtgccctcaggagaggcatccgcagcttttgagcgcctagtgaaggagaattcccggctgaaggaaaaaatgcaagggataaagatgttaggggagcttttggaagagtcccagatggaagcgaccaggctccggcagaaggcagaggagctagtgaaggacaacgagctgctcccaccaccttctccctccttgggctccttcgaccccctggctgagctcacaggaaaggactcaaatgtcacagcatctcccacagcccctgcatgccccagtgacaagccagcaccagtccagaagcctccatccagtggcacctcctctgaatttgaagtggtcactcctgaggagcagaattcaccagagagcagcagccatgccaatgcgatggcatcttttcacagcctagggaagtccctggctagaagaggcaaggaacagaggccaagtctgacggtggcttctaggctacagaggaatggagggagagcggggaggggccataaagaagagggtgtgggagaggacaaggaggaagtggtgccctag

SEQ ID NO: 4663 - DNA, 2220 bp, Homo sapiens
  SIMILAR (1699)..(1226): 611254mologous to Homo sapiens glutathione peroxidase,accession number D00632,Smith-Waterman Score=412.
  misc_feature (1)...(2220): n = a,t,c or g
ttggttgcatgccaggnnnncgcaaatttttcaactgccaagctatttagagtggggtgtccccctttctcctttaaaattttatattttccctcaagggtttattctttgggggggggttggtccattttgttccccccccaaaataaaggttctttcccaaaattcccaagtaggtttttattaggccccccttaaggaaaaaagtttttccttgccagcccccgttaaatttgggccccccagaggatcctctaaaccggccgccccttttttttttttttttcagctgctgcagaaaggcttttactgggcagacggggtgagtctcaagccagtggaccagtgaggggtgagggcacgtcctccgaaggagcagcgggtggcatccctgcccaggggccttaaccctgaaatgcaactaaagggctggcccccctcaaaacaagcctcaagggaaggttcccccccacaaaggctttgggccccctcccctcatgaaagacgcccacccctgcccatgggagtccgtggcccttgcttgtcacatctggccttggttgatctcagggaggttgattctctctcagagagaactgtggggtggggatgttagccttgggaagggcccttcatggaagtaaggagtgggggggttggggagtgtggtaagacccacgaaactttcttgggggacgttcatcattagttactaatatttgggaggcagtggggagatggctggcccccaagtttgaggtatccgttagagccgaacaattgggacctgaagctggttttttcctttggggtttaggtgtgagtgaactattatcatttggagtgggagacttggagagaaagggtttgcactgtccagcactacacagcttcaggcacacagatggttcacatttcccagaaagacacataggtaggacacgtggctgtaccacccatgcaacaacacacacaatcaacgcaatacctgtaaggcaatgtgtgtaaaacaccccacattgcacccacaccccacatgcctggcagtacacagaactgtatgccatccatttgtgcccaggctggggccttgaagtgataggaaaggggtctgtgaatgggtagatagtgtgattggagacggcgattttcttcctgaacaaagtccctcccctacatggtggacatgggatgaaaacggccttcagttacttcctctttaaccccccagggctgcctgccgcctcatgtaggacaggatgtccatcttgacgttgctgaccgtggtccggtggtgccagcgcatgatgggtataccatctggccccaccaggaacttctcaaagttccagcggatgtcgtgaaccttcatggggttcccagaagaggcggtcagatgtacccaggagactccgaaggtgggaggacaggagttctttaggaaagtgtagaatttctgctctttctctccattgacatccccctttctcaaaagagctggaaaatttagggaacaaaagcctcccaccttggtcggaccataccttgaggggttaggaaaggatcttctgaagttctctcctggttccttgttttccaaaattggttgccagggaaagcccgagaatgaccgagaccgaatggtgcaagctcttccgtgtagtgcagttcagttcaagtgtacatggcccgtcaggccgtcagtagcgtggccacgttgacaaagaggacgtatttgccagcatactgcttgaaggggatgtactcctccccatcaatggtgagggctccgtactcgtaaatggtgccacttatgccaccatggcagtccatcttcgacttctcttgtccccggctctgcgagacgaagccggccaggagcagggaaagcaggcaggacgcctgcagcagccgggccagtgacggggtgggggcacactcagggtcgcgctgagccgctgcctgatccctggccaccgtccgtctgaggtgtccggcgctcccagccacctttcaagccctcgggtgtgattaatccgcggccaagccgagacccttgcagccaatcgctaggcggctgggatttcaggggcgggcgcgacttgccctcagctccccacctccccgtcccggggcgacagtgacataagcaaatctgggcagagaggtggaagtcaggtccctgtggacgtgggaggccggtcccttcctcttttggct

SEQ ID NO: 4664 - DNA, 406 bp, Homo sapiens
gatgctcctgcctctgcctcccagcccctcacccagcacagctctgcctggacttggagagatgggaggcagacccccaccaccatacatgctgtctgtggcccctcagacattctgtttcatctcccattcatctccctcctcccaccgtgtcagtttttctgcctttccctgctctgttcttccccctccttcccagaagtttttgcacagaacttcattttgaaagtgtttttctcattctccatacctcccccaagctctcctccgacccttccacaggctcagccctgctgtcctgagcgtctcctgggccagagagaggagatgggggtgggagggactgagttgatgttgggtttttcattcaataaattggtgatttcttaaaaaaaaaaaaaaaaaa

SEQ ID NO: 4665 - DNA, 513 bp, Homo sapiens
gactctcccgtttcgagccacgcgcccggtccagggagctgccccggcgtctctctggtttcctaatctgggcaaagccgcgggagagaacctttaccttggctgcactaagttctcggtgccactccctggcagggcgggaccttgtttaggccctgtgatcgcgcggttcgtagtagcgcatggcgcagaggggaccttgacccgcctagggcgggaagagtttggcccgccgggtcccaaagggcagaatggacgggctcctaaatcccagggaatcctctaaattcattgcagaaaacagtcgggatgtgtttattgacagcggaggcgcacggagggtggcagagctgctgctggccaaggcggcggggccagagctgcgcgtggaggggtggaaagcccttcatgagctgaaccccagggcggccgacgaggccgcggtcaactgggtgttcgtgacagacacgctcaacttcttccttttggtcggagcaggacgagcacaagtgg

SEQ ID NO: 4666 - DNA, 1499 bp, Homo sapiens
  SIMILAR (1352)..(1408): 361254mologous to Chlamydomonas reinhardtii vegetative cell wall protein gp1,accession number AF309494,Smith-Waterman Score=46.
ggcactttccctcctggcactgccaccagcctcaccgcctgcggcagggggaggccagcaggcccgggcccagcaccccttccctggcaccagggtctgcctctcactcgcccaggtcccgaaggacactgccacagggacgccttccctcccctcccctacagcccacccctgcacagcccctcctccttcccgcttttccccttctccctcctgctccaggcccaaggcgtgttggttttgccttctggtgcccatagtcccctggactgagtcccccaggccttccttcacccgacttccaaactcttccttgtggtatcagtttccttctcggaaatgagaaagctggaatcctggtccccagcaggagagcctagtcctcccccagcccctccagccaccagggtgtcctctaggatgcagctgccagatccactcactctgctgcctccagcaggacccaaggccactttcaactcttatggggttctccacctgccccagagcttctcaagggagggtaagggggcaccctgagcccacaggacccctacttcacagctcacaggggcaggaggcagctcccctgcctccaggaccctgttgctatggtgacacagcgtttctaggacagaggggcctccaagtctccccccaaccacccgtgcacgactttcctcaccaccccccaggttccctgcagatgtcgtgtgtgtcctgagtgtttctttggttctttgcacgccaagtctcttggttgtaccartgtgacacacccrtgttgcactgggtcgctgtcttcgtggcttccacccttgttaatgatgctcctgcctctgcctcccagcccctcacccagcacagctctgcctggacttggagagatgggaggcagacccccaccaccatacatgctgtctgtggcccctcagacattctgtttcatctcccattcatctccctcctcccaccgtgtcagtttttctgcctatccctgctctgttcttccccctccttaggccccagcctgggcccaagacccaatcctcccagccagggtttcccctccaggcagggttcctttccctccctgtcacctccctctcacccaaccccggggtctgaagcccctcattcctgaccgtccgtgttcctcaggaagtggttgaaggcaacagggcccccagcccagccctctgcaccccccaagcccggcaatttggggccccacaagcccctttggaagcttttctcttgtgcctctcactccttcccaagaagtttttgcacagaacttccattttgaaagggtttttttcattttccatacctcccccaagctctcctgccagccccttcgccagggctcagccctgctgtcctgagcgtctcctgggccaaagagaggaaatgggggtgggagggactgagttgatgttgggtttttcattcaataaattggtgatttcttaccgccaaaaaaaaaaaaaaaaaaa

SEQ ID NO: 4667 - DNA, 1216 bp, Homo sapiens
  SIMILAR (34)..(258): 521254mologous to Homo sapiens Human G-protein coupled receptor,accession number AAR97222,Smith-Waterman Score=149.
ggttcctcttctgggtcttccagatcccggcccccttccccgagtacgtcactgacctgtgcatctgcacaccaaccagcgccagccccaacggttaccttctggcccggaagggacaaagcccaacggctgttgggagcggctcagggtggtcttcccagcgggccctgcgggacggcgcttgagctggggaagccggggggcagcacgcccaacacagtcaccatggagatgcagtgtcccccggggaacgcctcttgagactccagcgcctggaggaggcaggggcaggaagcggcctccaagacccttcgccttgggacaggaatgggcacctgcttctaagtccatacaggagaagaaagatctgtttcctctcctcgggcctccttctccctgggctggggacttccaggggtggctgggagactgggcagccaccagcaaaacagaccctgtggcccctgcccggctcccccacccattctgctcccctagagacctcttgtacagaagttgcccccaggtggtggggcccctccttgccctaggctggttggtaaaagagaggaggtcaacacccagcctagccacctctgcctcttgggtcagccctccttgactgtgtcccagcccagcaccaggccagcagcctcatccctgccattcagggctgttccagagattcgatcctcttaaggcattatcagtgagccaaatgtgaaggaaatggtgtcctggaaagaaaagttctggttcaaaatgcccttgtagctaaagtctttctggcaaacaacctccccttcccccccgtcgaaatcatttgggtgacctttgatgggggggatttctggttatgttcaaggctctgggagacagggaaaaaggctttggccgccttgggtagttgaccatgccttttctgactccgggacgagccagtcctaggcatgcctccgggagcacttgaaggtatcccgcaaggccatgaaggacccactgggcaagcctcctggacagcctcttggctccaacccccaccccgaaagtggaacactggctccgcccttggccacctggggacttggcactgtggtgcacagtgggcccacatgtggccaacgggaagttttataaaaagacaaaaatgtatatcaataaaccattttataacttgcagccaggaaggcttcatgcccacaaaaaaaaaaaaaaa

SEQ ID NO: 4668 - DNA, 1041 bp, Homo sapiens
  SIMILAR (2)..(205): 551254mologous to Homo sapiens PRO2550,accession number AF130089,Smith-Waterman Score=164.
  misc_feature (1)...(1041): n = a,t,c or g
ggctggagtgcaatggcgcaatctctgctcactgcaagctccgcctcccgggcncaggtcattctcccgcctcagcctcccgagttcccaagtagctgggacttacaggcgcccgccaccaagcccggctaattttttatatgtttagtagagacggggtttcaccacggttaaccaggatggtctcgatctcctgacctcaggatccgcccgcctcggcctcccaaagtgctgggatttcaggcgtgagccaccgcgcgcagcccagctttacatttttcagactggcttgccatgtctttgtcagacattgccatttacctacctagcatccattcttcctagcagatccctgacttcactcagggctgggatgtcccagcttaaaatactttccccaactctcttacagcaagggatggctatgtgattcagttctgtcccatgagacatggatggaagccactaagtggggcttccagagattttaaataaggacacctttgactgacatgctccatttggtctcttaagcttcatcttcttcctgcttgaaatgtagatgtaatacttagaggtgaaataacttttctgagacaatgaggatgaaagccactcaccaaagatggcagaatagagcaataaatggaccttgagttcttaataacactgttaaactgccatatcagttatggattatgtaaccttggatttattacgtgaaaaaataaactcacagtgaagctagtaatcacaggaatttttgtttcttgcaaccaaatatgttcctatctgatacagtatccccacttatttaatattccatctttttataccaatttgacatgctaccttcatcaccttcccatgtataattaattgggtataattctggaaaccctcctgtttcattgacctaaatgacttaaatttttaatagctaatataataacagccaatgtttgttgaatgccaaaactattctgtttattacattaattatctagttcatttaaccctcacaacagcgcgaattgcacg

SEQ ID NO: 4669 - DNA, 5264 bp, Homo sapiens
  SIMILAR (1381)..(1671): 631254mologous to Homo sapiens Human myelin oligodendrocyte glycoprotein gene,accession number AAZ29204,Smith-Waterman Score= 290.
ttacaattgaaactctgggaattcaaaattaacatccttgcccatgagcttcttatagacaccagaaaagggttcaaccttgtgttccacattgttctgctgtgcttcgtccaaatgaatctttatgaggtggctgccatccagtttcacgtggattctcttgcccacaatttcgcttgggaagaccaagtcctcaaggatggcatcatgcacagctgtgagagtacagctcctgggaagcttttgcttattgtttgtacagcttttttgagttggcttaggcagaattctccttagctggacttgggttttctggaaagatttcagttgaggaacgggaacaaagattatgatagctttccgaccaccaccaacttcaatttccttggctgccgtaatattcagctcccagagctgagccttgaggtccaagttcatctccagctccagaagagcctgggagattccggattcaaactcatccggcttctcgccattgggcttcacgatcttggcccttgaactgaacatggtcttctccttgctgagcgctgtgttggtgaggtttgttgatgagtcccataacattgtgtctagttgatcttcttcctcttctccttcttcttcttctccttcttcttcttcttcttcttcttcttcttcttcttcttcttcttcttcttcttcttcttcttcttcttcttcttcttcctcctcctcctcctcctcctcctcctcctcctcctcctcttcttcttcttcttcttcttcttcttctttttttttttttttttgagacagggtcttgctctgtcatccaggctggagtacagtgacgcgatcatgggctcactgcagccttgacctctctagctccagtgatcctcccacctcagcctcttgagtagctgggaccacaggtgcacgccaccacacccagctaatttttgtattttttgtagagacaagttcttcctgcgctggccaggccagtttcacacgcctgggctcaaacagtcctcctgcctcaatctccccaagtgctaggattgcaggtgtgagctgccacatctggctttttactttgtatccttattctataagctcttttcttttcttttttcttttttttttttgagacggagtctcgctctgttgcccaggctggagtgcagtggcgcgatctcggctcactgcaagctccgccttccgggttcacgccgttctcctgcctcagcatcccgagtagctgggactacaggtgcccgtcaccgaattttttttgtatttttagtagagatggggtttcaccgtgatctcgatttcccgacttcatgatctgcccgagggattacaggcgtgagccactgcacccggcccttttctttttttttttttttttttttttttgagacggagtctcactctattgcccaggctggagtgcaatggcgctatcttggctcgctgcaacctctacctcctgggttcaagcaattcgcctgcctcagcctctcgagtagctgggattgcaggcatgcaccaccacgcccggctaattttttgtattttagtggagatggggtttcaccatctctaacttgaactcctgatctcaagtgatccacccgcctcggccttcaaaagtgctaggattacaggtgtgagccaccgcgcctggcctatacgcttttttctgttaaaaaatatttttaagtttttaaacttttgttaaaaattgagacagaagcaaacacattacttactaggcctacacagagccaggattatcagtatcaatcccttccgcctccacatcatgtcccactggaaggtcttcggggcagtaacggacatggagctgttatctcctaacatgccttcttctggaatacctcctgaaagacctgcctgaggctatttaacagttaactttttttttatatgtaagtaggagtactctaaaataacaatataaaatgtagtacaataaaataaataagccagtaacgtagttgtttattatcaagtatgtactgtacataattgtatatgctagacttttatacagctggcagcacagtaggtttatttataccagcacctccacaaacatgtgagtaatgctttgcacttgaccttctgtcagctatgacatccctaggttgcaggatttttcagcttcattataatcttatgggaccatcttcatatgtgagtggtctcttgacccaaacattgttatgtagcacatgactgtaaattttggaatcaccttgtcagtatttacaaaatagctttctgagatttagtggcaggatctcagctcactcctacctgcacctcccaggttcaagcgattcttatgcctcagcctcccaagtaactgggattatagacgtgcaccaccaagcatggctaatttttgtatttttagtagagacagggttttgccacattggccaggctggtctcaaactcctggcctcatgtgatctgcccgcctcagcctcccccagagtgctgggattacaggtatgagccactgcgcctggccaaaattgcctaaatttttaaaatcctaaattggtgttgaattttgtcaaatgctttcctgcattgattttgatgatcacttgatttttctccattcttttgttaatgtgctaaattatgttgcttaatttttgaatgaaaaaataatcttacattcctgaaataatttcggtttggttgtgatgttttattcattctatttcgtgctgaattcagtttgctaatattttgtttaggaattttgcatctatgttcatgagacagatcggcctgtaattttacttttttgtaatgtccttgtcaggtttaggcctcaaagttatgttgactttataaaatgaactgtgaagtatttcctcttttttatgctttagtttgagtaagattgattttttttaaaacttatgtcgtccttaaatatttattagaattcactagggaagttatcttggcctgttactttctttcttgagtaaattttgttttcattctttttttatagttaagtatattgagttagaatgcatacacaaacaaatgcacacaacttaaagtccagttctatgaattttgactaatgtataaacctgtttaacttccactgtaagcaaaatatagtgaattttcgtcaactaaaaagtccccttgtacccatttaccttcagtacctatccctaccccagccacaggcaacaaatgattttcatgtgcttatttgccatctgtatacctctttggttagttttctgtttatatcttttgcccatttatttttttttttttttgagacagagtcttgctatgttgcccaggcaggtcttgagctcctgggcttaggggatcctcccgcctcagcctcccaagtagttgggactacaggcacacactactactcttggtttgcctatttttaaatcaggttgtttgttttcttattattgtgttctctacactgtaggatattctacctttcctagaatttcatgtaaatggactcagacatactgttgtgtctggcctcttttgttcagtgtaatgtttttgagcttcatccttgcatgttatgtgtatcagtgattgattcaatttttattgctgcatagtattggattgtatagctataccacaatttgtttattcattctcctgttgatggaatattggttgtttccagtatttagctattattattattattttttttttttgagacggagtcttgctctgtcaccaggctggagtgcagtggtgcaatctcggctcactgcaacctccgcttcccaggttcaaacgattctcctgcctcagcctcctgagtagctgggactacaggtttgtgccaccacgcccagctaatttttatatttttagtagagacgggatttcaccatgttagccaggatggtcttgatctcttgacctcgtgatctgcccaccttggcctcccaaagtgctgggattacaggcgtgagccaccgcgcctggtcttttttgtttgttttgttctttttttagacagagtctcactctgtagcccaggctggagtgcagtggcatgatctcggctcactacaagcctgcgcccctcaggttcaagtgattctcctgcctcagcctcccaagtagctgggactacaggcgcccgccactacgcccggctaatttttttgtatttttagtagagactgggttttgccatgttggccaggctggtcttgaactcttgacctcaagtgatcttcctgccttggcctcccaaagtgttgggattacaagcgtgagccaccacacccggccagggatgtcattttttataactagccataaactttagctttgaagtaaaactatttctagcaagtgattcttacctgatattttttgttgttcttgcccatattttaattgggttgtgttattatggttctctatgtattctagatttaagtttttgtatatggtgtgaggcaagtgtcaagtttaattttttttctacaaacatcctgttgttccagtaccttttgatgataagactgtcttttcccccattgaattatcttaacgccctcatgaaaagcaattggccatatgtatgtggatctacttttggactctcaattctgttccagtgatttatatgtccacccttatgtcaataccacattattttgattattgctgctttatagtaagtgacatcatgttgcctgaaatcacgttttccacctttattcttctgttgatggttgctttggcaattaggggtcctttgcattttcgtagacattttagaatcaacttatctattgctactaaaaatgcttgattgggattgtggtaaatctagaaactaatttaggaagaatggtcatattaacagtttcaagtttcagatccatgagcatattttcactctccattaggtcttttaaaatttatcctagcagtgttttatggtttttactgtagaggtcttacacattttgttacatttgttgctatgtgtttgaccttttttgatactagtgtaaatggaaattttttcttttatgttctagttgttcattattacactaaatcatctttgggtgactactaaacattctattgaaaatttgtgaatggcgtgaacccgggaggtggagcttgcagtgagccaagatcgcgccactgcactccagcctgggcgacagagcaagctccgtctc

SEQ ID NO: 4670 - DNA, 503 bp, Homo sapiens
  SIMILAR (202)..(35): 661254mologous to Homo sapiens PRO2411,accession number AF130087,Smith-Waterman Score=197.
ctgcagcctcagccgtcctggactcaaccaatcctccctcctcagcctcctgagtagctgggactacaggcacatgccaccatacccagctaatttttgtatattttccagagacaaggttttgccacgttgcccagactggtctcgaactcctgagctcaagtgatcctccctactcggcctcccaaagtgctgggattacaggcgtgacgaccgcgcctgacccaggttcacactttgtactggacttattagaggtcagcatggagagaagggacttgctcaaggccacaatgtcagagcctcatccagcatccagggcagtgtggtcacctgggggcttaggggtctgttcttccctcatcattgaaccagggaaagtcccctctgtgaggctaccttcatcatcagctggggtctgggagagaatatctggtgataaaaaccttaggagttgaagtgagtgggcaacatgcctcagggaaagcaaagccacttcatac

SEQ ID NO: 4671 - DNA, 419 bp, Homo sapiens
  SIMILAR (23)..(154): 1001254mologous to Homo sapiens bA122O1.2 (A novel protein similar to the yeast actin-like protein ARP5 (YNL059C, N2430 or YNL2430C)),accession number AL133519,Smith-Waterman Score=229.
gcctgaggaattccgcacgagagacagcaagccagagacccctgacctggagcagctggagccgtctttggaagatgtggaaagcatgaatgattttgatcccttgttttcagaggaaacacctggagtggagaagccggtcaccactgttcaggtttgacttctacagcccagaacatgcttattctttgaaggtgttgacctaaatggctgggctagtctgtttctttaggacttaaaactgttatgttttttagaaaattgggtaccaatacttaaaacatctgaaatcagggatttttttcccccggtgattgatcgattggttctagtaccaagatctgtgaatctctgagaaacagtccacccggcagaaacatttggtaaagtaattgggaacttgagatctgaatactggc

SEQ ID NO: 4672 - DNA, 1806 bp, Homo sapiens
  SIMILAR (680)..(1168): 731254mologous to Homo sapiens bA122O1.2 (A novel protein similar to the yeast actin-like protein ARP5 (YNL059C, N2430 or YNL2430C)),accession number AL133519,Smith-Waterman Score=541.
atgcagatcttcgactacaacagtgagataactgaccctggaattcagcaggaggcagcgggcctagaaggcaccaggaagccatggaacatctccatgctgttgacaacaaggaacatctctctttgccagtggttctccaagtgtggccctgagccagatacatcaacgtcatggggaacccctcaaaaagaacactgtcaccttgtgaataaagtcggagtagactccttaaggatgagaggctacatgcacggaataatccagccactcaacctgttccaggaatcccagctgatgccccagacattgtttccatttcataactttcaaaattgtttctttgaagaattacacaaatggcggtgtcctgattattatgagaataacgtccgcaagatgcagctcccattttccagcaagctcctgggcagcactctgacctctgaggagaaacaagaaaggcggcagcagcaattgcggcggctgcaggagctcaatgcccggcggcgggaggagaagctgcagctggatcaggagcgtctggaccgactgctatatgtgcaggaacttctagaggatggccagatggatcagtttcacaaagctctgatagagctgaatatggactccccagaagagctgcagtcctacatccagaagctcagtatagcagtgggagcaggctaagcagaaaatcctccaagcggaagtcaacctcgaggtgggatgttgttagacagcaagccagagacccctgacctgggagcagctggagccgtctttggaagatgtggaaagcatgaatgattttgatcccttgttttcagaggaaacacctggagtggagaagccggtcaccactgttcagcccgtgtttaacttggcagcatatcatcagctatttgttgggacagaaagaattcgagctccagagattattttccagccatctctcataggagaagaacaggctgggattgcagagactcttcagtacattctggacaggtacccaaaggacattcaggaaatggctggttcagaacgttttcctcactggcggcaacacgatgtatcctggcatgaaaagccagaatggagaaagaactggtggagatgagacccttcccggctttctttcaaggttaacttggcttcgaacccttgtgctggaatggctggtacggggggctcgtgaactgggccttgaaccacctagatgataatgaagtttggatcaccaggaaagagtatgaagaaaagggaggagagtacctcaaggagcactgtgcttccaacatctatgtccccatccgcctgccgatgtcatgcctcccgctcctcagatgccccaggcatcccagccaaggctccgctgctggtggaggtggtgctgggtgagcaggcatagcagaggccctccagagagactgccctgcacgcccatgccttgggccacgttggcagtgtgacaggactgtgattgtgctagatgtacctgccccaagtctgctggtcacatttggcagcaaaatggatttctcctggggagaacaaagttaaaggacccctgagacctgcccttcagaattcggttcacttgggggcttctgtggtagagactaactggccttctgatgtctttgttcaactgtggccagctgtggcatcagcttcctggagcagtaaatgaagacagagtggaggacacaaatgtacaaaatgcacaagactgatttcttaccacattttagtctttcattgttttaaaaaaaattctttaaaatttaaaaaaaaaaaaaa

SEQ ID NO: 4673 - DNA, 304 bp, Homo sapiens
  misc_feature (1)...(304): n = a,t,c or g
atcctcctgcctcagcctctcaaagtgttgggattacaggcataacccccaactcaataaaaaagtttttaaaaatttccaaagctcatatttgatccagctaggattttaccctgccctccagcctgagtgacagagtgagacccccatctccaaaagaaaaggctatcaatacaaaagtttatttaaatttctgtacagctatacaatggaatactctacaaaatggagagatccataagataaagcaaatgaataaagcaaaatgcatgtgttgcccnnnnnnnnnnnnnnnnnnnnnnnn

SEQ ID NO: 4674 - DNA, 898 bp, Homo sapiens
  SIMILAR (481)..(257): 491254mologous to Homo sapiens Human secreted protein, SEQ ID NO: 4433,accession number AAG00352,Smith-Waterman Score=173.
ctcagctctcaaagtgctgggattacaggcataaaccacaactcaataaaaaagtttttaaaaatttacaaagctcatatttgatccagctaggattttaccctgtacatttgtatttcttgtaggctggcgcacagatatcttaaatggctactaattgctgctgtgtatgaaaacaaatggctatcaaggccgggtgcagtggcttacagatctggtcttgaatctcaagtccagaccagtccagagttcaagacccagcctgggcaacatggtgaaacccccatctatacaaaaactcggcaaggcatgggtggcatgcacctgttgtcccagctactcgggggctggggcaggaggatggcatgagcccaggagcttgaggctgcagtgagctgtgattgtgccactgcactccagcctgagtgacagagtgagacccccatctccaaaagaaaaggctatcaatacaaaagtttatctaaattactgtacagctatacaatggaatactctacaaaatggagagatccataagataaagcaaatgaataaagcaaaatgcatgtgttgacagctgttgtgatacctcagttcttgtcttcttggtttaaaagaatttaaatgagacagcaaaggagatgcagcataatttattgcaaaagaaaaggagtattttgaaagttaggtgcagaacagacagtacacctgagagagagaattcagggccggctgctcgtaagggtgagacagcattgattattgctggagaaactccctttaatggagttttgcattattattcataaggaggggaggtgttgcagtaatcatgtcctgggtggtcctctgcacaggtgcagtagctggtaatgcttgttcatacaccacatgtctc

SEQ ID NO: 4675 - DNA, 719 bp, Homo sapiens
  SIMILAR (390)..(1): 901254mologous to Homo sapiens unnamed protein product,accession number AK022291,Smith-Waterman Score=620.
cgacaggaaggggctggagtccagcccagaaccaccctctgactgcagacgacctcctggcatggacttattagccatctcggccagtactcctagccccaagcccacagccagtcccccaaagttggccaagcggctgatgcgggaggcaggcaccttgcgttctcgagagcggtcactcagctggggccggggtgtcttcctgggacgggcctcccgtgccctgcaaatgtcctcctcacccaggcctctcccaggcccatcctggtaaaacttttgggcccaagaacctccacatggtccccagcggtggggcccaggccccagggccccacaaggccaaccaacagtcctggcccagctgtccaccggtcccccgaagtaggccccccaccttcagccacattgcggaaaatccaatggagcgtaagtcatttgctcagggtagcggagctgggaactggcagaggaaggtctcgaacccacacccgtgggaactccaagtctttgaaagtccgtcccgcccctgcgtgaagaatgggcgcgcggctggactcgtcaccgggggttttagggaaggttgaacttgtcattcaaccgtgtagggagggtggtttagtcacaggggtggagggagggggcccactggcgcgccaccaggaccccggtgccctagatgcatacctggccgcgctacgaaatcgtcgacccgggaattc

SEQ ID NO: 4676 - DNA, 827 bp, Homo sapiens
  SIMILAR (540)..(791): 471254mologous to Homo sapiens Human secreted protein, SEQ ID NO: 4718,accession number AAG00637,Smith-Waterman Score=185.
atcgagaccctagtccacgtggtggaattcgggaaataaactggtgatatggcagctgggccatcttgaatagtgagaaccagtaagaatattgggtattgcctgaagagcatctgtaaaaacatatcagaacaaatgaaagaggaaagaatgaaggatttatatgtgtgcatagagtgaatatatgtgtgcatagagtgaaatattcaacttatacttatttctaataaaatctgaaaattatttttcataaatattcaaattccctttaaacagcttaaaatacagatttagtgactcagtacttcaaaccttgaatagaaacaaatatgattataaaatatttccaaacttatgttacatctaatctgaaacatattaatattataagcttaattcatgtcatcatttctttattttttattatatttcctgggaggtataaggatatttatttttataatttccaagcactgagtaataatttatttcagaaagtttcagaaggttacagtaaactttaccaaacttgaagaagaatgactcagatcagtaagaagagtctgagttactcactaattgatttttattttatttatttattttttttgagacagggtctcactctgttatccaggctggaatgcggtgacacaatcatggctcgctgcagcctcaacttcccaggctcaagcgaccctcccgcctcagcctcctgggtagctgggactgcaggtgtgctctaccacacctggctaagtttcgcgtttttccgtagagatggggtttcgcgagttgcccgggctggtctccaactcttggcctgg

SEQ ID NO: 4677 - DNA, 615 bp, Homo sapiens
  SIMILAR (45)..(275): 531254mologous to Homo sapiens Human secreted protein, SEQ ID NO: 6953,accession number AAG02872,Smith-Waterman Score=163.
ttttttttttaaacagacagggtctggctctgttactcaagctagagtacagtggcatgattatagatcactgcaagcctcaaatttctggggctcaagtgatccttcccgtctcagcctcctgggtagctaggcctacaggtgtgtaccaccatgcctagctaattttttttaagtgggggagggaggtagagacagagtcttgctatgttgcccaggctggtcttgaactccttgcttcaagcgatcctcccacctcaacctcccaaagggcttgggattacaggcttgagccactgtgcctggcctgcttaatctctttaagccatagtttcttccttcataaaacagcgatgatgacaatagtaactactttataaaattacggtaaggattaaaggagataatacatataaagtgcttaacatgatacctggcacatagaggttcaaaatataatgacttctattatcataatttttgcagtgaatcattaagttttatagattaaaaaaagatttttaaaaatgttgacttttgctagtgacaaacagacccaaattcacataaagcacaggtgtgtacagccataccacaaattaaggtatcttttct

SEQ ID NO: 4678 - DNA, 386 bp, Homo sapiens
atttttcatgtactgaaaaactgtcaaactagatctatatatctggcactaatgtctttcaaaaatgaaggtgaaataaagatgttttcaaacatacaaaagctgaaagaatttattactgacagatccaaatacaagagatgttaaagaatgccctctaggcagaaggaaaatgataccagatggaaatctaattctaaccaaaaggaataaagagaactagaaatgataaatacctgagtaaaaatatgaattttttcttattaagtcttttaaaatatatatttgacaatttaaacaaaaatagcagcaaggttacgatgtttataatatatatgtagaagtaaaatgtatgtattgtaagttgtgagcgcggccgcgtcgac

SEQ ID NO: 4679 - DNA, 487 bp, Homo sapiens
  SIMILAR (7)..(252): 591254mologous to Homo sapiens Human secreted protein, SEQ ID NO: 6953,accession number AAG02872,Smith-Waterman Score=218.
ttttgagacagggtctcactcccatcttctgggctggagtgcagtggtacaatcacagctctctgcagcctcgacttcctgggctcaggtgattctctcacctcagcctcccgagtagctgggaccacaggtgcacacccccacgcccatgtaatttttctatttttagtagagacgggttttcatcatgttgatcaggctggtctcaaactcttgggctcaagtaattcacccgcttccataggggtgagtcactgcaccctgccaacatttttcaaaagtaaaaaataaattaaaaaaaaagtctttagtggattgctgagtcccctctgacaggaggtaccaaatgtgcttttcctgaggacaggggaagagttcactattcagccatacctttgcatattttacaaaattcacttctaccaaggatgcctctccacaaaatgaggagtagcacaaagaacacctaagaaaccaggcctgaccc

SEQ ID NO: 4680 - DNA, 1899 bp, Homo sapiens
  SIMILAR (443)..(312): 791254mologous to Macaca fascicularis hypothetical protein,accession number AB052151,Smith-Waterman Score=190.
atggtcagtcagggctgcagaagcagagaaatgcgggatgcccatgctggctgggactcgcccactgccctgcacatggcgagaggacttggacgcagggtcttctctgctccccgtcacacagagggtggcacacccgatgggaactctcatttatcaccaaaccaaaagatggagaaactgacagagaagggctgcaagcagctacggcagggcgggctgtgtgtaagagtcagtgacagaactgtacgcagcgtgcaagagacaactgccatcactgccaccttgaagggcagcctgggcacatactgtcgagggacaaggaacttgctgacagcagaaggcttcatgccacatgcttcggtctgtatacagtccaaatccggcaaagtggcacgcaacactgtccaggggttcactgcacatggcaaagctgtcctagaggccgccgtctctgcttctggccctgccgggacttggggctgcctgcgcattaaatggcccaggtctgtgtcctggttactcaagcctgagagagctgccacccttgtaggtcatggctgcaggaaatcaggctgtcccccaggtctaggtgggtctgccaaaatgccccgagacatcaatcggctgcccccgctggaaggggacgctgtccctgctggggtccggagcccacttcgggctccctctctaaccaacagtggctccctggagactctacatgccccacccttgccctctgctccactgctgggaccacctttgctctcaaggactgtggacaccgggcctggaggttcaggcagggaggtggaggcgactacatgtggacgcaggttaaaggacaaggattctgaacatgccggggctgggtcccggcaccatcagagccaagtcaccggctccctcggggaggagagagctgtgagggctgagtcaccgggggaggggccggctgaattcctccgcaggatccaaggggctgtgcagacacgggccgtgactgctgggtcctccgtggagaaaatcaataccaagttggagacctgtgactgtgacgcatcagaggaggaggtgctaggtggagacaacgtggagactgaggaaagatctgtctgtgtcccagaacctgtaaagatgaccttatttgaaaaaagggtctttgcagatataatcaggtgcctggcacgctgggctcctgccgccacaaaccgacgtgacttggtgaacactctgatcccaggacacggcccttcctgctccttggtggccttcctgggcctccaagtccgcgaccatacccatgacctgctgcccgctgctggtgggcctcagatttcccggaaagagggaagaggctcagaccagcccatagcagctttccagtgcccgcacccccatgcgtccccgtacagtcccagtcagggccgctcccctgcaccccccgtcatttcccacttccgttcccagcaccggcattcggcatttgccgcgggccgagggctgctcccgggggtgcaaggcagtggcaacgcagcggccctggtggctttatgctcccggcacggctccgggggggctgccgtggtgacagtgcctggtcacaacaaatccatccctccccagcctgtttccaacttgactgaaacacccctaaatgctccacaaagttcctgggcagccctgggctccaagaggcttggccaggggtgcagccacgggttctttgctttctcattcaccgctgacgtctgtactaatgacgacacgctttcgaatgccaattcactgactgaagtactagccacagagattaaacatgacataaacctggccaatgaagggcttgcctgggaccgtggctgggactatcagggaaaagatatgctttctctgtag

SEQ ID NO: 4681 - DNA, 499 bp, Homo sapiens
ttttggaagagtccctattctgtacagccacgcactgaggcaagagcacaaggaaacaagcagaaggaattcagagaaacagctccaggctccagctcaaaggccgacaccaaaagcgaacacctctgggcgctcttgccttcaagaaggtggggaggctcacagacgcagcatccacccctcgcaagggaacctcagttcctggcctgtggtcccatgaaggacatcaggctggcagattggagcacaccccttctttctaacccctcttgaaagcttccttgaatctgccagtcctgccccctggagcaggaaggaaaacagaaggcctaggacgctagaggggtcccgagctttccggagctccagccaccatcaggtctgactgctcagggacagacacaccgaccacatcctgacctcaggatgacctgcggaaggacttggcatttcttcttagccaaaacccttcattaaaagacgggtgagggttccaaaa

SEQ ID NO: 4682 - DNA, 536 bp, Homo sapiens
  SIMILAR (176)..(307): 791254mologous to Macaca fascicularis hypothetical protein,accession number AB052151,Smith-Waterman Score=190.
gtctcggggcattttggcagacccacctagacctgggggacagcctgatttcctgcagccatgacctacaagggtggcagctctctcaggcttgagtaaccaggacacagacctgggccatttaatgcgcaggcagccccaagtcccggcagggccagaagcagagacggcggcctctaggacagctttgccatgtgcagtgaacccctggacagtgttgcgtgccactttgccggatttggactgtatacagaccgaagcatgtggcatgaagccttctgctgtcagcaagttccttgtccctcgacagtatgtgcccaggctgcccttcaaggtggcagtgatggcagttgtctcttgcacgctgcgtacagttctgtcactgactcttacacacagcccgccctgccgtagctgcttgcagcccttctctgtcagtttctccatcttttggtttggtgataaatgagagttcccatcgggtgtgccaccctctgtgtgacggggagcagagaagaccctgcgtccaagtcctc

SEQ ID NO: 4683 - DNA, 1686 bp, Homo sapiens
atcattccttcagccagctggttctccaccgggattccaggaaagaatgaggccttgcaaaatgctctgaatggctgttcccaccaaaggtggtgggagccaagccctttccagccacaaagggactcactcaaggtcacagggctgcagcgggctgcgttcaacccagtggcccccacacactccttcaaggaccagcatcccatgcccagcttctgccacttcctctctgggcctgtgcccagcagcaggacaacccttgccacaggcagagcagccccgcactctagtccattgaaaagcctggtccaaggctacgcgccctggcagacttccatgagctgcgactaccagccaccaagacggcaagagcacaaggaaacaagcagaaggaattcagagaaacagctccaggctccagctcaaaggccgacaccaaaagcgaacacctctgggcgctcttgccttcaagaagacctgcttcctgaagcccagcctggtctctctgtgcccgtgtgtcatccttgcccactcttacatgctgcgaggctggctgtgtctgcagccgcagccatcagaggcctggaggtagcagaagcagctctggtgtgcgctcaaaagctccttgcggcttgctccagccactcacttatcaccgtgtggagtagagggaaagtaaaagaaacaggtcttccttccactgtgcaggcagtcagcgagctcctgcaggtcctgctctgtaagcagaaagctggaggctgcaccccagatcaaggccctcacacctcaaaggttctcacggaggcctcgtctctgccccgcatctccagaatgtgcttgctgcagccaggtccattctctgacaacatcccactgggcacagccacactgactcctgctgccactgcagccacacctgggcctctcctcccctgcaccaagcatggcaaccctctaggccatggcctcacctgccattaccccctggccccattacccctgcccccagctccgcatgtcaggtttgctgccctgtcctgcctagaacgctccgcaggctgctgtctctgtaccccctcctgccgaataacgactgttggcggctctgtgggttcatgtgcttcggaattaaaccacagggcctgcttctcattgccactgatgctcggcttccaagcccccatcgccacccaccaatggctattcagtgtccgcaatgacaagaacaccctggatactcccagatcggctggctgtgatggtgctcacaggcccaggcaagagccagccccagatgggcccatagtgctgctctgcttagagccaatgcctgcaccaggcagctaccctggaggtgcccctgtgagtgggcataggcaggtacacccccagcagtggcaggtgcagcatctcgggcagtcggggggcatccgcacaggcctgggtgcaaactgcggcaaatcccatgattctgcatacaagaagggtggggacgtgtgttttccaggggaaatggtccctgtcgtgcatcagattctcaaaggggtccagcacccaaacaagtgcaggggtcactgggggacactggtgcaacagaagcagccctggactgggagtcggggccccactgccgaccagctccaccctaaaaactcatcactcaccctcgtgtttcctagcagatag

SEQ ID NO: 4684 - DNA, 1668 bp, Homo sapiens
atgcctgcaagccctgtgggaaatcggggtggagggagcgggcggggccgagcggccgcgggaacgagcagtgccctgcctccaagggagccccgggtcctctccccactggctggccctgtcgtggacatgagctctcaggtttctgacgggctgagcgtagtggctgagggctccctcaggcaggggcagactctgatcccaggacacggcccttcctgctccttggtggccttcctgggcttccaagtccgcgaccatacccatgacctgctgcccgctgctggtgggcctcagatttcccggaaagagggaagaggctcagaccagcccatagcagctttccagtgcccgcacccccatgcgtccccgtacagtcccagtcagggccgctcccccgcaccccccgtcatttcccacttccgttcccagcaccggcattcggcatttgccgcgggccgagggctggtaaaccggtcagtgaagaaacactccgaacaagtcaaggaggaggctcagccctctggttactccaggaagctgccggtcttcacccacacagagccccggcccttcagggaccacggtggaaatgccagcgagacggtggtgtgctggtgccactgggcctggtgccacatcaccacgtccctgaaagtaaaagaaacaggtcttccttccactgtgcaggcagtcagcgagctcctgcaggtcctgctctgtaagcagaaagctggaggctgcaccccagatcaaggccctcacacctcaaaggttctcacggaggcctcgtctctgccccgcatctccagaatgtgcttgctgcagccaggtccattctctgacaacatcccactgggcacagccacactgactcctgctgccactgcagccacacctgggcctctcctcccctgcaccaagcatggcaaccctctaggccatggcctcacctgccattaccccctggccccattacccctgcccccagctccgcatgtcaggtttgctgccctgtcctgcctagaacgctccgcaggctgctgtctctgtaccccctcctgccgaataacgactgttggcggctctgtgggttcatgtgcttcggaattaaaccacagggcctgcttctcattgccactgatgctcggcttccaagcccccatcgccacccaccaatggctattcagtgtccgcaatgacaagaacaccctggatactcccagatcggctggctgtgatggtgctcacaggcccaggcaagagccagccccagatgggcccatagtgctgctctgcttagagccaatgcctgcaccaggcagctaccctggaggtgcccctgtgagtgggcataggcaggtacacccccagcagtggcaggtgcagcatctcgggcagtcggggggcatccgcacaggcctgggtgcaaactgcggcaaatcccatgattctgcatacaagaagggtggggacgtgtgttttccaggggaaatggtccctgtcgtgcatcagattctcaaaggggtccagcacccaaacaagtgcaggggtcactgggggacactggtgcaacagaagcagccctggactgggagtcggggccccactgccgaccagctccaccctaaaaactcatcactcaccctcgtgtttcctagcagatag

SEQ ID NO: 4685 - DNA, 2361 bp, Homo sapiens
  SIMILAR (1472)..(1347): 781254mologous to Macaca fascicularis hypothetical protein,accession number AB052151,Smith-Waterman Score=181.
agcagcctgcggagcgttctaggcaggacagggcagcaaacctgacatgcggagctgggggcaggggtaatggggccagggggtaatggcaggtgaggccatggcctagagggttgccatgcttggtgcaggggaggagaggcccaggtgtggctgcagtggcagcaggagtcagtgtggctgtgcccagtgggatgttgtcagagaatggacctggctgctgggaaaggtgattgtgtttgtctgagccacactggactcttctctgaccagcaagcacattctggagatgcggggcagagacgaggcctccgtgagaacctttgaggtgtgagggccttgatctggggtgcagcctccagctttctgcttacagagcaggacctgcaggagctcgctgactgcctgcacagtggaaggaagacctgtttcttttactttccctctactccacacggtgataagtgagtggctggagcaagccgcaaggagcttttgagcgcacaccagagctgcttctgctacctccaggcctctgatggctgcggctgcagacacagccagcctcgcagcatgtaagagtgggcaaggatgacacacgggcacagagagaccaggctgggcttcaggaagcaggtcttcttgaaggcaagagcgcccagaggtgttcgcttttggtgtcggcctttgagctggagcctggagctgtttctctgaattccttctgcttgtttccttgtgctcttgccgtcttggtggctggtggtcgcagctcatggaagtctgccagggcgcgtagccttggaccaggcttttcaatggactagagtgcggggctgctctgcctgtggcaagggttgtcctgctgctgggcacaggcccagagaggaagtggcagaagctgggcatgggatgctggtccttgaaggagtgtgtgggggccactgggttgaacgcagcccgctgcagccctgtgaccttgagtgagtccctttgtggctggaaagggcttggctcccaccacctttggtgggaacagccattcagagcattttgcaaggcctcattctttcctggaatcccggtggagaaccagctggctgaaggaatgatctgggtgccggaggacgagcatgctgccctgacgaggatgatcagatacggggcggggcagttctggctgaagtcacttagcagtgttcttgctcccccatgccagatgctgcccaccaccggcacagggtcagagttggggtcagcggggcagccgtgtgcccccagtgggagcttggaggtcacggaggaaatgcgagaccagatgcaggcaggggagtcctccggagctgtcgagggacaaggaacttgctgacagcagaaggcttcatgccacatgcttcggtctgtatacagtccaaatccggcaaagtggcacgcaacactgtccaggggttcactgcacatggcaaagctgtcccttgccctctgctccactgctgggaccacctttgctctcaaggactgtggacaccggtgaagaggggcacccggtcgatgccagctggactccgtccacccctcgagagccagggcgttgggctcactgtcttccccagaggaagcctcgctggggccacgggaggctcgggcctctgttcctccggcacattctggcacggtggcaggggaggctccccccgtcatttcccacttccgttcccagcaccggcattcggcatttgccgcgggccgagggctggtgcgacagaagccctgccagcgccacgagccgacgcccctgtaaaagcggctgttccgcgcacacaggagccgcctctggcctgccagacacgtccgaccatttcctacagcgactgcaccattcacattcccgtcagcagtgcacaagggctccggcttctccacttccttgcagacacttgtaattttctgttgtgttttgatggtagccatcccaatgggtgtgcggtggcatctcaccgtggttttgtggaccaaccttgccgttatttcaagggtgcccatcagtgtgtgcgccctggaccttagcttcatctctgtgccctgccctcttcgatgctggtgttggtggaatcgagtctccccaaaactcgcatcccctggatgctcagaatgtgacctttgtgggcaaatgagggtgatggtatcgtcccatttctctgtggagtagctgtgtggctgcatctgcaggttggagccacccacaagctcccgttttccaaagaattcgtctggaatagtcacagtgcagattgcatttttcgaagatgcttctagaagtgtttccacaaaatgtctggtcttctttttctcatgcgtcat

SEQ ID NO: 4686 - DNA, 532 bp, Homo sapiens
  SIMILAR (28)..(141): 681254mologous to Homo sapiens PRO0898,accession number AF130051,Smith-Waterman Score=155.
cctcccgagcagctgggattacaggcgcccactaatttttgtattcttagtagaaacgaggtttcaacatgttggccaggatggtctcaatctcttgacctcttgatccacccgacttggcctcccgaagtgatgagattataggcgtgagccaccgcgcctggcttatactttcttaataaaaaggagaaagaaaatcaacaaatgtgagtcataaagaagggttagggtgatggtccagagcaacagttcttcaagtgtactctgtaggcttctgggaggtcccttttcaggggtgtccacaaagtcaaagctattttcataataatactaacatgttatttgccttttgaattctcattatcttaaaattgtattgtggagttttccagaggccgtgtaacacaagaccatacaagcacacattcctttaacaatgatgtcagaaagatgatgtaatgtgtgcttgtatggtcttgtgttacagtcttttacatctatcaattcaccacattagaaattaaaactgaaa

SEQ ID NO: 4687 - DNA, 699 bp, Homo sapiens
  SIMILAR (481)..(513): 721254mologous to Mus musculus ribosomal protein L7,accession number X57960,Smith-Waterman Score=40.
ttttctgtatagtgatttattagggcccttgggagagcactgttttgctgttttctctaactagaacaatttatactctatttatattttattatgcaaagaatgtagctggcatgaaccttaacccaaaaatctgagcagacaagaaaagtcacattaaaatttttctcttttgtagttgtagttctgactgagccctcattctgcctgatttgatgggttgagggcaggaaattcaacctcacacatcataggggctgtctcctcttctctagggtttgcacaaacattggggggaaggaggcgtggcttccgtgctgctaagacacaggaaaaggcttttagctttcagtagattctatctacctaatgcaggtcattgtccaggcctcagtgtttgtctgaagatggaaggcatgtgctattcacatcctgaattaagtagaagagggtgggagtgaggcggggtgggccttaaggatcaaatgtatcaatggtgtgagcccaaaactctgttgcaacttcttcactttccccagatcttcaatggcagctttgttaaactcaacaaggcttcagttaacacgctgaggattgtggaaccatatatcacatggagtacctgaacttcattcttcccagtaggagaacccagggcctgttccacgcccacagactttggtcaggcaaagcggccgc

SEQ ID NO: 4688 - DNA, 1264 bp, Homo sapiens
  SIMILAR (1)..(405): 1001254mologous to Homo sapiens bA13B9.1 (novel protein similar to a glycosyltransferase),accession number AL137067,Smith- Waterman Score=718.
atggcggaggagcagggccgggaacgggactcggttcccaagccgtcggtgctgttcctccacccagacctgggcgtgggcggcgctgagcggctggtgttggacgcggcgctggcgctgcaggcgcgcgggtgtagcgtgaagatctggacagcgcactacgacccgggccactgtttcgccgagagccgcgagctaccggtgcgctgtgccggggactggctgccgcgaggcctgggctggggcggccgcggcgccgccgtctgcgcctacgtgcgcatggttttcctggcgctctacgtgctgttcctcgccgacgaggagttcgacgtggtagtgtgcgaccaggtgtctgcctgtatcccagtgttcaggctggctagacggcggaagaagatcctatttctactgtcacttcgcagatctgcttctcaccaagagagattcttttcttaaacgactatacagggccccaattgactggatagaggaatacaccacaggcatggcagactgcatcttagtcaacagccagttcacagctgctgtttttaaggaaacattcaagtccctgtctcacatagaccctgatgtcctctatccatccctaaatgtcaccagctttgactccagttgttcctgaaaagctgggatgacctagtccccaaggggaaaaaattcctggctgctctccatcaacagatacggaaagggaaggaaaaatctggactttgggcactgggaaggccctagtacagctgcgtggaagattgacatcccaagattgggagagggttcatctgatcgtggcaggtggttatgacgagagagtcctggagaatgtggaacattatcaggaattgaagaaaatggtccaacagtccgaccttggccagtatgtgaccttcttgaggtctttctcagacaaacagaaaatctccctcctccacagctgcacgtgtgtgctttacacaccaagcaatgagcactttggcattgtccctctggaagccatgtacatgcagtgcccagtcattgctggtaattcgggtggacccttggagtccattgaccacagtgtcacagggtttctgtgtgagcctgacccggtgcacttctcagaagcaatagaaaagttcatccgtgaaccttccttaaaagccaccatgggcctggctggaagagccagagtgaaggaaaaattttcccctgaagcatttacagaacagctctaccgatatgttaccaaactgctggtataatc

SEQ ID NO: 4689 - DNA, 2473 bp, Homo sapiens
  SIMILAR (208)..(894): 681254mologous to Homo sapiens bA13B9.1 (novel protein similar to a glycosyltransferase),accession number AL137067,Smith- Waterman Score=665.
  misc_feature (1)...(2473): n = a,t,c or g
atgaggagatctggctgcagccaatgtgtgggtcacaaggtgggatggaacttggcatgcacaaggaacagagacaaagccagcgtggtagctggggtggcagcagcagtggctgcagtggacagtggcagagcctgtcctcagggcatgtgcacagcagctcctctgctgggggcagttgagttgctgcttgtggtagctctcccagaccctgatgtcctctatccatctctaaatgtcaccagctttgactcagttgttcctgaaaagctggatgacctagtccccaaggggaaaaaattcctgctgctctccatcaacagatacgaaaggaagaaaaatctgactttggcactggaagccctagtacagctgcgtggaagattgacatcccaagattgggagagggttcatctgatcgtggcaggtggttatgacgagagagtcctggagaatgtggaacattatcaggaattgaagaaaatggtccaacagtccgaccttggccagtatgtgaccttcttgaggtctttctcagacaaacagaaaatctccctcctccacagctggcacgtgtgtgcttttacacaccaaggcaatgaggcactttgggcattgtccctctgggaaggccatgttacatggcagtgccccagttcatttgctgtttaattcgggttggaccctttgggagttccatttgaccacagtgttcacagggtttctgtgttgagcctgacccggtgcanctgtgcctngccanggnaaaagggggcaataaaagtcaccgtgaactccttagaagccaccatgggcctgggctgggaagagccagagtgaagggaaaaattttcccctggaagcattttacaggaacagctctaccgatatgtttaccaaacttgctgggtataatcaggattgttttttaaggatcttccatttaatgttcatttttatggattgtagacccagttttgaaaccaaaaaagaaacctagaatctaatgcagaagagatcttttaaaaaataaacttagagtgttgaatgtgaagccactttcctatataccacacctccctgtccacttttcagaaaaaccatgtcttttcatgctataatcattccaaattttgccagtgcttaagttacaaatgtggtgtcattccatgttcagcagagtattttaattatattttctcgggattattgctcttctgtctataaattttgaatgatactgtgccttaattggttttcatagtttaagtgtgtatcattatcaaagttgattaatttggcttcatagtataatgagagcagggctattgtagttcccagattcaatccaccgaagtgttcactgtcatctgttagggaatttttgtttgtcctgtctttgcctggactccatagcgagaggtgctctgtatttttttttaagataatttgtatttttgcacactgagatataataaaaggtgtttatcataaaaaagaaacagtattagattttggtctccataatctattttggtattgttacgaacatggatatgacaaccaaactggaaatcagaacactagggtaaagtggatattgaaatgaagcaagaatattgtcacacatgtgttgtgcatcttgtttagggtatatttcttaatgtcatctaggtcattagttttgttaatatttgtgttggcttgaccaagctcctactaagtataggacacaaatgttttttatcttccaaggcctgggctcaaatgccactgctggcaaagcttttctttgaccctctgggccacctcccaaggccaggaaggtttatctttccccctcccatggtactctaggcccttttcatggacactggatatttttcggtggacactggacttatagtttcaccgttttacctggttgggtctaacaggcaaatcattaaacagtagtttttcaacatacttctaaggctaaattcatttccagaagtagcaaagcttactagccaaaggctccacatttatcaactcttaagagctagacttgagagcctaacagcctgatatgattttgtgtaaattgaatctctatacctcagcttcttcatctgcaaagtgagataattgtactattctactttcctcatagtgcggttataacagattatgataatattaccaaagtacctaatacctggcatatagtatatatattagcctattagtattttgcaatttggggatattgaaaattagaaattgcatgttagttcatgctgcactaccatattgttcttttggggctcttcaatgggtgaaattccattttacagtttatcatgtgcatctgtatcacaggagtattttggcaaaatgattctgtaccaaaaaggagtactataaaatgagggtgccaaatatattgagtcttttatgggattaaaagttcaaaaaaaaaaaaaaaaaa

SEQ ID NO: 4690 - DNA, 439 bp, Homo sapiens
  SIMILAR (37)..(2): 751254mologous to Homo sapiens Human secreted protein, SEQ ID NO: 7879,accession number AAG03798,Smith-Waterman Score=46.
gagagggggtctcgctctattgccaggctggagtgcaggggggatctcagctcactgcaacttccgaccccctggttcaagtgattcttctccctcagcctgccgagtagctgggattacagggacacgccaccacccccagctattttttgtatttttagtagagatggggtttcaccatgttgcctaggatggtctcaaactcctgacttcatgatccacctgcctcagcctcccaaagtgttgggattacaggtgtgagccaccgcgctcggccaggactctgtttttgtatatctgcacaggtctgcccaactcttaaagggacactacctaatctcttccaccctgccccttccgcctaaggcctaaaaatgattttaagtacatggcaagtactttatgatatggagatctcagggagataaaagaaattcca

SEQ ID NO: 4691 - DNA, 399 bp, Homo sapiens
ttgggttttgtaaatcatttattatgactgaaagggaagaaaatgataggagacaaatattacaattaaacatgtaacattattctcttgtaaccaatcataataacatactttgaatttttgaatggctatataatttcccagaaaataaaattttcacatcatcagttacagaaaattgatttccttccatcaaaatattttatctctgctctatcaaaaataaatgccaagtctaaggtactacacagtttaagataagccttcactacttgtttaaattagaggagtgtggggaaacagtcaattgaaatctattttgatggggtttaaaaaatattctttttgtcattatcaataaagtaaaatattatttgagcaatgtatttcttagttctg

SEQ ID NO: 4692 - DNA, 1404 bp, Homo sapiens
  SIMILAR (48)..(302): 551254mologous to Homo sapiens Human secreted protein, SEQ ID NO: 6953,accession number AAG02872,Smith-Waterman Score=220.
atttttttgaggcagggtctcactctggttgcccaggctggagtgaaagtggtgccatcatagctcactgtagcctcgaccttccgggatcaagcaatcccacttcagcctcttgaatagctgggactagaagcatgcaccaccatgcccatctaatatttgtatttttagtagagacaggatctccctatgttgtccagcctagtctcaaactcctgggttcaagcaatcctcccacctcggcctcccaaagtgctgggattgcaggcatgagccaccgtgcccagcctcaaaaatattttttaaaagaaaagagaaaataattcttctgtcaaaggaggttaaattttagttgatagagtacttaaatgcattactttattaggttatgtaagtggtcagtgcattccagtatgtgtcacaacagtgtagttcatattcatgataaaaatgaaactgtgataagacatgaaaattatatttattaaaatgttcaattgtaatggtaatcatgagtatacttgatttttatttatggtatagaatgatttgtatttattttttggacatatatttatcactttgtcatttttttttaaccaatttgagaaatgttagctgctgaattaatttgttgcccgagccttcatattttcttctttgctgccttctccctgtggcaatgtactgttctcacattaagccttttaaaaatgttccatactgtattagcatccttagaagggacagaactaagaaatacattgctcaaataatattttactttattgataatgacaaaaagaatattttttaaaccccatcaaaatagatttcaattgactgtttcccctacatcttttgagccacagtcgcccatcgaataagcaaatttgtttttgagaataaactggtaaccagtttgtgatgactctcagaagccttttggctggcgttacagaagagtttctaagttcctagagagccatttaataattagttggtgaaccagaggcttgacagagctgttacttatgtgtgagggctttattctcaggcagtagtttattcatcatttgggtaagcccctccccacactcctctaatttaaacaagtagtgaaggcttatcttaaactgtgtaggtaccctagacttgggatttaattttggatagagcagagataaaatattttgatggaaggaaatcaattttctgtaactgatgatgtgaaaattttattttctgggaaattatatagccattcaaaaattcaaagtatgttattatgattggttccaagagaataatgtaacatgtttgattgtaatatttgtataaaaatcatttcattccctttcagtcataataaatgatttacaaaacccaaaaaaaaaaaaaaaa

SEQ ID NO: 4693 - DNA, 1500 bp, Homo sapiens
  SIMILAR (365)..(772): 571254mologous to Mus musculus putative,accession number AK019849,Smith-Waterman Score=352.
  misc_feature (1)...(1500): n = a,t,c or g
catggaannnnntactcagttcgaggcctcgtgccagcggaacggcggaccccgtaccctggcagcatcgtagcaccggcggatggtatggtgtatgctctggagggaatgggccctgacacggccccccaggcccaggtacgtgtgtatgagccccgtcgggactgctggctttcgctaccctccatgcccacaccctgctatggggcctccaccttcctgcacgggaacaagatctatgtcctggggggccgccagggcaagctcccggtgactgcttttgaagcctttgatctggaggcccgtacatggacccggcatccaagcctacccagccgtcgggcctttgctggctgcgccatgggctgaaggcagcgtctttagcctgggtggcctgcagcagcctggggccccacaacttctactctcgcccacactttgtcaacactgtggagatgtttgacctggagcatgggtcctggaccaaattgccccgcagcctgcgcatgagggataagaagggcagactttgtggttgggtcccttgggggccacattgtggccattgggggccttggaaaccagccatgtcctttgggctctgttggagagctttagccttgcacggcggcgctgggaggcattgcctgccatgcccactgcccgctgctcctgctctagtctgcaggctgggccccggctgtttgttattgggggtgtggcccagggccccagtcaagccgtggaggcactgtgtctgcgtgatggggtctgaaggcttggtgggagctgtccactggagcagctcattgccagaggcagctatttctatgggctccttttgctgctgaggacactcactgtggctctgtgggatgagagaggcatgggggtgagcacttgaaacacttgccttggggccttgggttaggggaagcctttgtctttagtgcaggacacacatatgcttacacctacctttatcaccattcgttcaatgaatcaatgcctagctccatccttggccctggggacctactaggccttcccatccaactggggaaatggggagaaagcaaagctgggcctcatgctcttcagggtcagttcctatctgtgagttgaccaggcctaccccagttgcccattccctgaaaaatcctcagctccccaggctgccctttagggtcccctgtagacccagggagagttgagagggtgggggacacagagagattaggagaggatgtggggaactgccagagggccggagcgcagggatttcaagtggaggaatgctggctttgagccctctacactgctggttgtatgaccttggacaagtcacttcacctctctgtgcctcagcatcctcatctataaatggggatctctgaaaccttcctaccctacctaccttacagggctgttgttaggacccaggggagtttggatgtggaagtaaaagtgctgctaaaacctaaaaaaaaaaaaaaaaaa

SEQ ID NO: 4694 - DNA, 939 bp, Homo sapiens; identical to SEQ ID NO: 1576
  SIMILAR (145)..(249): 771254mologous to Homo sapiens Human secreted protein, SEQ ID NO: 5327,accession number AAG01246,Smith-Waterman Score=134.

SEQ ID NO: 4695 - DNA, 1026 bp, Homo sapiens; identical to SEQ ID NO: 1577
  SIMILAR (145)..(249): 771254mologous to Homo sapiens Human secreted protein, SEQ ID NO: 5327,accession number AAG01246,Smith-Waterman Score=134.

SEQ ID NO: 4696 - DNA, 1540 bp, Homo sapiens
  SIMILAR (6)..(287): 451254mologous to Homo sapiens PRO0898,accession number AF130051,Smith-Waterman Score=171.
ttttaaatttacttatgtattttagagacaatgtctcattttgtcacccaggctggagtacagtgatgtgatcatagctcgctgcagcctcaaactcctgggctcacgtgatcttcctgcttcagcctccaagtagttgggactagagctgattgccaccatgtccagctaattttttttttttttccagtagagacagaatctcattatgtcatccaggctggtctccaactccctcccagccccaggtgatgctcctacctcagcctctcaaagcattaggattataccgtgtgagccatcatgcctctgttaaagtttttaatgtcctgattaatatgtgattcagactacgtaagaataaaatctatgatcatatccaatcgttatgaagcttttaaaaatagataataatgatttgttacatgcagcttccatctagatgcataacgttatttctggaaatgcgggccgcctacaatgtaaagcaggctaaacaaggcagcttgtgatttcattttaatcagaaacacaccaaataggcatcatggcagcagatctggctgttagtgttttaaatacagatggattgattaacatctttattattcataattgtctgtcaatgttctgtggatgatcaagaaactctttgtgcctcgccataatcactgaagtaatgaaagaagatcccctcagcaaggcctgcaactgtaaatgttgcaatcacacatatgtttagctaaattttcaataacaatgtagtcttaattggttgttttgggttgttcatcatctgtgttgtccaatgaagcttgactattcatagaagaactcattacaagctgtgtttgtttcctgtgcaatttccaaatcttctatttgaattgtgtgatccaacatctccataaaatggtcccctgatttccttcagctgactcatcgtcaaatttataatcacacaacattacaggtggatccaggaaggggaacaaagactcggataaagggaggacggtggaactctttttcaggaatcttttttttctggaatttcattcaaaagcagatcctcaaatagcatttcacaacgatcagcaactgtgttcaatatatccctctttactgcctgcacagcatctttaactttgggtttactgctgtggatataagctctgcatttcacagcacccttaaggtttacagaaccgctacatatctggactgtggctgtggatctgtggtctgaattcaggagcaactgcgttagcactctgacatcaaaagaatgactagttgcttgagtatttcctctagaagattttttctgtccttctaataggtcacaatcttcatctttaacgcgtcctttaatccaatgaactccatcttgtatattccttggcccagcgtgtaagtccattctttgtatttttatccagagtatacactgatagaagtagcagaaagtgggatgtgaatattaatgtgaactgtacgctctaaagaaagccgtacgcgtggtcggacgcgtgcgcgc

SEQ ID NO: 4697 - DNA, 477 bp, Homo sapiens
  SIMILAR (175)..(267): 671254mologous to Homo sapiens Human secreted protein, SEQ ID NO: 7870,accession number AAG03789,Smith-Waterman Score=103.
ggagatggagtcttactgtgccgcccaggctagagtacagtggcactatctcagttcaccgcaatctctgcctcctgggttcaagcgatcctcctgcctcaacctcccaagtagctgggactacaggtgtgcaccaccatgcccggctaagttttgtatttttagtagagacgggggtttcaccatgttggccaggctggtctcaaactcctgacctcaaatgatccacccgccctggcctcccaaagtgccaccgctcccggcctgtgtatggtatttttctatggcatgtaattttctgtacacaccctctttctttcttaggcttttttgtcagcagcccaagatggaaaaggcagctttatgtcaaggttcgccaaagacagtcaagagctgtgaaagccaaatgttcacatttaactttttttaaagtatttattactcggcatcaatgtatttcttaatcattatcctgag

SEQ ID NO: 4698 - DNA, 441 bp, Homo sapiens
  SIMILAR (78)..(224): 1001254mologous to Homo sapiens Human secreted protein, SEQ ID NO: 5473,accession number AAG01392,Smith-Waterman Score=269.
gcggtggaattcgaaggaagcttctaacttttcttctggttgccggatgctggacaccggaagcgagccctataattatggcgacctccgcgacgtcgccgcacgcgcctggttttccagctgagggtagatgcggttactatgtggaaaagaagaaacggttctgcaggatggtggtggccgcagggaaaagattttgtggtgaacacgctggagccatggaggtgtggtatcgccctactctctcaagagtcggaaataagtatcctggtcctgtcggtgctggaacccggcccctcccctctttgacagctttctgcttgtgtcccctggattctccagctttcactttaataaacccagttttgccctccttgcggagcgattatgagttctagtgatgagaaattttttatttttctaagtaaagcgccagcagtg

SEQ ID NO: 4699 - DNA, 1101 bp, Homo sapiens; identical to SEQ ID NO: 74
  SIMILAR (94)..(1098): 1001254mologous to Homo sapiens dJ146H21.2 (similar to CYTOCHROME B-245 HEAVY CHAIN),accession number Z83819,Smith- Waterman Score=1798.

SEQ ID NO: 4700 - DNA, 792 bp, Homo sapiens; identical to SEQ ID NO: 181

SEQ ID NO: 4701 - DNA, 1397 bp, Homo sapiens
  SIMILAR (454)..(630): 691254mologous to Homo sapiens Human secreted protein, SEQ ID NO: 6953,accession number AAG02872,Smith-Waterman Score=189.
taaatccaatagtagagataaccagtttattttggggagcaaagagaaagggtccctaaccccagaactgcctgcgaaagaggtgaaaatggaattgaatgggattatggtcagccaagtccttcctagtggaagctgctacctgaactgagttttaagaggggtaggaaagaaaaaatgtagtgggtcataatggcattccagatacaggggacacaaacaggtctggggttaatgaactacaaccagttgttgacttttgtttcaagtggctccccttccccagtgctgtgtggacgatggactgaagaggagaaggctgggagcaagggaccagtaagctgttgcagcagtgcaggtgagatatgaggcctcaactctgcagtgttgacaaccatagagagcagagagcagaattcatcaatatttatcagcaccaatttttttttttaagacagagtctcacttctgtcgcccaggctggagtgcaatggtgcagtctcagctcactgcaacctctgcctaccgggttcaagccattttcctgcctcagcctcctgagtagctgggactacaggcacatgccaccaagcctggctaattttttttgtatttttagtagagacaggggtttcaccatgttggccaggctggtcttgagctcctgacctcaagtgatccgcccgccttggcctcccaaaatgctgggattacaggcatgagccaccatgcctggccaacaccaacctttagttacttgctgaatacacaggattaaggaggaagagaaagtatcaaggatgactcccaggtttcctagcttggtggtcccagtaattgagagagagaatgccagccaggaagaagccagctctaggggggaacagggatgaggtatctccacatgatggggttgggagggtacctgtgaagtcacatccagggtgggatttttttcctgttgggcagttgggacgcgaagtcctgaaagcctcaggcaaaaaggctaaaagttaacacctttgggaagtccatcaagccctaatggaggacttttggcatcccaggtgcccaaaagcttaggggaaacggctctggaagagagaggggctttcttaattgacctgtatgctttgaagctctattagagacacaatccttatccctttcaggcctgtattttccttgggccactaagatgtggttacatattttctctcacatcttcctagaacgtttgcaaaacaattcccagtcctatgatcatttctcccttcttctgagaactaattatatatggcacttaatatctattcacatgtagcactcatggtgaggtgttttttttgtttgtttgtttttgttttttttttttttgagacagacctgtgccgaat

SEQ ID NO: 4702 - DNA, 1711 bp, Homo sapiens
  misc_feature (1)...(1711): n = a,t,c or g
tttttttttttttttttttaatgttgcataacaatgtttatttagttttacatttgtttacaatttcttataaacacttcattataattgttttatacaaacaacagtttaaatttacttatgtttatcatttatttgcttactagtttttcaatttcagataatccttttagaatcatttcccttcttgaagatcatccttttgtagtctctttactgaagttgtgctgaggataacatctgtttttcatctgagcatctgttagattcagtttcgcttgttgcaaattctaagcttaatagtttttctcagaattctaccctcttttggggnacattgtttgctgttaggaaagcccactaagtatttgactgtcttgctttcactgatctttttctccccatggttgcttttaaaatcttggtatttgggtatcttgtcatttacaataccttgagtctaggcctggattttatttaaatatatgtttggtatatattgtgcttcctgaatttatgaattcatgtttttccaacaaatttgtaaaattgtgttatctttcaagtactgcctctcctttattctctaaattttctctttctaggactcctagtctttataattcttccctcgaactctcttaactttccaatgttttctagctccttgtttctcctcactgctcactgggtaatttctttagatccacgcttatagtttagttcacttgtctcttcagctgagtctaataaaatattcaacatgtctgagggcttttttcttatttcaataaatatttctcatttttaggagctctatttggttctttttcagatctgcctgtggttccaacttcattccttatgttggtgatgaaaccttgaagaactgagttcaatgtttattttttctatagctttcttgtcatgttagtttgtttcaacttgtgcctgtgatctctagtcataaaatactactacttgataataatctgtaggaatcttggaactaaattaggaatgtttccctcttgcttctgccaggagctagagcactgcaaactgaggaccactgaaccttctttaactgtcctctctagggcagcatctcagattccgatgtcttcttgtttctgatttgaggcaaactgcatatgacaatgttgctattggtatctgccatccagacaaccataatccacttgtatggtcaatacagtattcatgactcctaacttaaaaaaggccgttccattttttgtggccagaggaaaatgtccgaagtatgggttcttggaaaattcctccctacttcccagtgaacctattaaaagccagattttattccaggatcctagttgttttataatatctagtctaacatacttgctggaagcaaaagtcttaattttatatattaaatatattataacagttatacagtaacctgagaaagcacgtattttatgtcatttcttactaatgggacttctctggaaaggttccctaccccttgatcagaacaaaacacacagtatacaggaactgagtgcacattagaaagctcctagaggatgaacttatcctaaagttgttgtctcatttggtagaaatttttctggtgctctattatwtaagatgttacatcaacattcactgttcaaattattattcttttttttttaaatttacttatgtattttagagacaa

SEQ ID NO: 4703 - DNA, 2219 bp, Homo sapiens
  SIMILAR (17)..(217): 791254mologous to Homo sapiens Human secreted protein, SEQ ID NO: 7870,accession number AAG03789,Smith-Waterman Score=274.
  misc_feature (1)...(2219): n = a,t,c or g
tttttttttgcccccgagacagagtcttactctgttgcccaggctggagtgcagtggcacgatcctggttcactgcaccctctgcctcccaggttcaagcgattctcctgcctcagcctcccaagtagctggtactacaggtgcgtgccaccacacctggcttattttagttattttagtagagatagggtttcaccatgttggccaggctggtctcggaactcctgactgcaggtgatccgtcctccttgggctcccaaagtgctggggattatagggtntgagcccccacgcctggggccaacttgattatattaattttgggttttttgttttgttttgttttgttttttaatttttcaaagaatttgtggatcttggtataaagtcattggaacatatctgttttaacagcaagagatcctaggcagatacttcaaaaggttaaaaattcttaatcctacagaaattttaaatgaatcttatcaatgttttgtaaacaaacaatatgaatggccaaaaaaattgccctccattttactggcaggtaatttatattgtcttacttaaaaatccccccctaatttttccaattgtactttatcgtgttgttttcaatgagataagtattttcctaggggaaagcattttccagcataatatttgcttgggtagcatcccgggttttagtattttaaccaaggggccttttaaatattgaaaacccatagttcagaaaatgttagtattgctgcccttctttcacataaatttttttttaaattatactattattttgcttaattttatattgggttaaaacaaccttcaagaaggttaactaggaaagaagacctttttgttttatttttactatttatatatagaagacaaatcaggcattggtggatagttttacatggaccagttatccaacgggtcatagtatggaagtgtggcagttggttccttattagtaaattatgtttgatttttaaacctatttaagtactaaatagttgagatgaaaactgaaggaaaaatgccaatgtggacgtttgtgtatagctagccttaaaaaaacttcccatggtttttagggtgacttttttcccccctccttaagtactctgggggaaacaatgaagaatggggccatctccaattccagatgtaaacaaaaagtaatttttatttcaacatttaatgtaactgctattattgtggattcttgtcttgtgtattttctttcccttattcaagtaatatatgaataactttccttaaaatgatttgatccaagatacgtcatttctgtattggcaaaaatgcccctattaaaagtgtaattcttgaatttaggttgaattgatgactttttaaaacaaaacaaaccctggacagttttacattgtattgccgtttgcgaattgccgtgaacaccacgcacacgtgcaggagaatgtagtggccataagaacactggcgctttttaaaactttcccaagctagctacttattttcattttcagggttgagtactctaagctctctacttactgtgagaagttttctacattgtaaaattaaaagattatatttaaaatacttctttagggatgttattcagccatcaaaaaaaaacccaactaaaatgtcttacccgtaaaagtatttatttaaaagcctcatttgtgggagatttcggtggactttccttgggttaagctggtcttggtatttacttaatttgtccccctcaacccaggtgttttcttttcagcctgttactgtccctgtgcccatttttaaaaatagcccatccatgagtaagggccttcctttaaaataatcccctgacaatatcctttggcattaatacgacaataaagacaagacagtatatgtatgttttccattccctgttttgtacggagtgccctcattttgtagtcatgaaagtaacatagtaccttaaataaaaatgtaatgactaatcctaaggtcctaggaataactattgtagaagctaagtagaacgacttagtttggggtgtcaattttctatcaacgcaaacaccttagggtacccagaccaattttatgtatatatattctgaaaatgctccctttttaatgtggtccatttgttgccttctaagttgagaggacaaaactgaataaaatggaatgttaattgtaaaaaaaaaaaaaaaaaa

SEQ ID NO: 4704 - DNA, 483 bp, Homo sapiens
  SIMILAR (162)..(284): 801254mologous to Homo sapiens Human myelin oligodendrocyte glycoprotein gene,accession number AAZ29204,Smith-Waterman Score= 175.
tttttttttgagatggtgttttgctcttgttgctcaggctggagtgcaatggcaagatcttggctcactgcaacctctgccacctgggttcaagcgattctcctgcctcagcctcccgagtagctgagattacaggtgcccgccaacacgtctggctaattttttgtatttttagtagaaatggggtttcaccatgttagccaggctggtctcgaactcctgacctcaggtgatctgaccaccttggcctcccaaagcgctgggactacaggcgtgagcagccgcgcctggccagatttgtatctattttcatacttaatagagaaaacatcaccttttaaattcagtattccatttcatttagaaatataaatgtgcatccttttaaccaatgcagttagacgtgccaagttcatcaaacatatcagtttaagtggaaaattacaaaacgggtacttaaatatcttatagctttgtaaaaga

SEQ ID NO: 4705 - DNA, 1490 bp, Homo sapiens
  SIMILAR (1197)..(502): 611254mologous to Mus musculus putative,accession number AK017685,Smith-Waterman Score=761.
acgagggggatagcaagcaggttcagttcagaaactaaaggcaaaatcttcatactcataccctgtttgagtccaagaggaagcaggaatgagagtaagggtggggcacataatccttattcaagttacctgatatttgaaaagaaggacacatgaacactagagttaatcttttagtgctactgaaatggctacacagttaatctggaagtttaagagctaacaaagctgcaaagacaagctgctctttgttgtaaagtggactgaagatgtttcaaataaaactacatccaaaaactggtagtaagaaaagggatctcttagcaaataggaatctaggtgtagaatttatacacatatatattttttaaagtataaaaatgagaaagtatgtacaaaaaatcatcctaaatcttagaaaggagacataaaaaaaaggctgtggaaagcctggggagttatgtgggtgtatgcctagcagttggaagaatgcatattgcccaactgcccagcagacagcacaagaatatctttcttctccttgtggaagcgcagctccttgcctgccagtcgggcttcatccagctcccgctcagtagaggccagctctctagacagtgcccccggcacactctgctgccggctcacccagtccaaggccatttggtggcgaatatcatcatccagggcccggtgcgaataatgagccaacacctcctgccgagagcattgtcgttccctcatggccttaaggctgccattccagtgtagcagttgaaaaactgtcattagctcctggaactccaacattgatttgcccttgttggattccagcatgaatcggaaggcaccaatccctgtatttgggttgtcagcttcctccctgttgccattaaaagatgccagggcctcagagacactcttctcgatgaactcatcagtgattcttcgggaaggatgttcattaaacacagaattcattagcgcaatctttgcagcactcctccgggcctcagcttttgtggggcaaaactggaaactcccaaagcagcttcccccaggcagggtgacatagcagacataaggagggctgttggagggaaccatctcataaaccactagagccccattctttaagtcagcaccacgggactgcttcatctgccagaattcctgaagtgcctccaccacattcactcggccatagccctgcgtgtgcttggcgaagctcctcaccacggcctccacggcctctcgcagcactgccgggctgccggcggcgccggggggcaggaagtagtcataaggccccagacaggagcaccgcgcggccggggcggtgcgggaggcggcggggcaggcggggggcccgcagggggtgtggcggtggcagccgcggccccagtcactccgggccgcagcgctcggagagtgcccctcccgctggtgcccacaccaggctgcagccgctgcgctcgcatagtctccat

SEQ ID NO: 4706 - DNA, 2809 bp, Homo sapiens
  SIMILAR (497)..(2053): 921254mologous to Mus musculus leucine-rich-repeat protein,accession number D45913,Smith-Waterman Score=2463.
  misc_feature (1)...(2809): n = a,t,c or g
atggctaggatgagctttgttatagcagcttgccaattggtgctgggcctactaatgacttcattaaccgagtcttccatacagaatagtgagtgtccacaactttgcgtatgtgaaattcgtccctggtttaccccacagtcaacttacagagaagccaccactgttgattgcaatgacctccgcttaacaaggattcccagtaacctctctagtgacacacaagtgcttctcttacagagcaataacatcgcaaagactgtggatgagctgcagcagcttttcaacttgactgaactagatttctcccaaaacaactttactaacattaaggaggtcgggctggcaaacctaacccagctcacaacgctgcatttggaggaaaatcagattaccgagatgactgattactgtctacaagacctcagcaaccttcaagaactctacatcaaccacaaccaaattagcactatttctgctcatgcttttgcaggctttaaaaaatctattaaggctccacctgaactccaacaaattgaaagttattgatagtcgctggtttgattctacacccaacctggaaattctcatgatcggagaaaaccctgtgattggaattctggatatgaacttcaaacccctcgcaaatttgagaagcttagttttggcaggaatgtatctcactgatattcctggaaatgctttggtgggtctggatagccttgagagcctgtctttttatgataacaaactggttaaagtccctcaacttgccctgcaaaaagttccaaatttgaaattcttagacctcaacaaaaaccccattcacaaaatccaagaaggggacttcaaaaatatgcttcggttaaaagaactgggaatcaacaatatgggcgagctcgtttctgtcgaccgctatgccctggataacttgcctgaactcacaaagctggaagccaccaataaccctaaactctcttacatccaccgcttggctttccgaagtgtccctgctctggaaagcttgatgctgaacaacaatgccttgaatgccatttaccaaaagacagtcgaatccctccccaatctgcgtgagatcagtatccatagcaatcccctcaggtgtgactgtgtgatccactggattaactccaacaaaaccaacatccgcttcatggagcccctgtccatgttctgtgccatgccgcccgaatataaagggcaccaggtgaaggaagttttaatccaggattcgagtgaacagtgcctcccaatgatatctcacgacagcttcccaaatcgtttaaacgtggatatcggcacgacggttttcctagactgtcgagccatggctgagccagaacctgaaatttactgggtcactcccattggaaataagataactgtggaaaccctttcagataaatacaagctaagtagcgaaggtaccttggaaatatctaacatacaaattgaagactcaggaagatacacatgtgttgcccagaatgtccaaggggcagacactcgggtggcaacaattaaggttaatgggacccttctggatggtacccaggtgctaaaaatatacgtcaagcagacagaatcccattccatcttagtgtcctggaaagttaattccaatgtcatgacgtcaaacttaaaatggtcgtctgccaccatgaagattgataaccctcacataacatatactgccagggtcccagtcgatgtccatgaatacaacctaacgcatctgcagccttccacagattatgaagtgtgtctcacagtgtccaatattcatcagcagactcaaaagtcatgcgtaaatgtcacaaccaaaaatgccgccttcgcagtggacatctctgatcaagaaaccagtacagcccttgctgcagtaatggggtctatgtttgccgtcattagcccggcgtcccattgctgtgtcctttcccaaaagattttaggagaaaaaactaccaccacttcattaaaaaagtattatggcaaaaaacctctttcaatcccactaaatgagctgttacccaccactcatttaacctctggggaaggtggacagcgagaaagacaaagatggttctgcagacaccaagccaacccaggtcgacacatccagaagctattacatgtggtaactcagaggatattttgcttctggtagtaaggagcacaaagacgtttttgctttattctgcaaaaagtgaaacaaagttaaagacttttgtatttttgactttgctagtttgtggcagagtggagaggacgggtggatatttcaaatttttttagtatagcgtatcgcaagggtttgacacggctgccagcgactctaggcttccagtctgtgtttggtttttattcttatcattattatgattgttattatattattattttattttaagttgttgtgctaaactcaataatgctgttctaactacagtgctcaataaaatgattaatgacaggatggggttcccctggtgccttttaaccagtagcatgacccccttctgaagccatccgtagaaagtactttgtcctcccaaaagctaaacatacgggttttgaagcagcattgaaacttttgtagcaatctggtctatagacttttaactcaagaagctaaggctagacttgttaccttcgttgaatgatgttagttgactgtactgtaatgttgtatcaactgaattgaatgtttgcctttaaacaatgaattttctttttctttccnnnnnnnnnnnngggggaaaaagtaaaagaggcttaaaccaaccta

SEQ ID NO: 4707 - DNA, 1052 bp, Homo sapiens
  SIMILAR (162)..(677): 321254mologous to Homo sapiens zinc finger protein,accession number L11672,Smith-Waterman Score=169.
gaggaaattgactcgatatccatatccatgtggtggaattcgcttttaatcactgctcaaaccttactacgtaagaatttttactaaagagaaatcctacaaatgtaaagaatgtggcaaattccataaatcttgctcaaggcattgaaatcacaagataattcatactggagagaaacactacaaatgtgaagaatgtggggaaagtcttcaaccattgctgacagcttattgcacagaagaaaattcatgctgagaaaaattctgattttaaagaatgtggcaaagcatttaataactactatgaacttactcatcagaggttttgtgctagataaaagcaatgtaagtgtaatgatacacattacatttatctgtggaaagatgtcaccaaataaaagccttagagtacacaaggtgtaatgatagtgatacattacatttgtacatggaaagacttcaaaaatataagccttagagtacacaagagtttttatactgaagaaaaacattacaaatataaagattgttgcaatacttttacttatgttacagattttgttgtacataggagaatttatactgaaaggtaaccctctaacagttgctcaaattttattccattttagataatttacattggaaagaaaccctacaactgtaatgaatatgaaaaaaattgtttaaaaagtacaccttagaaaacactagtttaaggccgggcgcggtggctcacacttataatcccagccccttgggagggccaaggcaggcggatcacgaggtcaggagatcgagaccacgatgaaaccctgtctctactaaaaatacaaaaaattagctgggcatgttgtcgggtgcctgtagtcccagctactgggagaggctgaggcaggagaatggcgtgaacccgagaggcggagcttgcagtgagccgagatcgcgccactgaactccaacctgggcgacagagactctgtctcaaaaaaaaaagaaagaacgctagtttatatgaaagcatttaacagatgcagtaaatataaaaaattaat

SEQ ID NO: 4708 - DNA, 2046 bp, Homo sapiens
  SIMILAR (733)..(1380): 1001254mologous to Homo sapiens Human NIP2b protein,accession number AAY70847,Smith-Waterman Score=1147.
atggtctcgatctcccgacctcatgatccgcctgcctcggcctcccaaagtgctgggattacaggcgtgagccatcgtctgcgcttctatttcgatcaccaagatgtggctccggaatgcggggcttacttcttccatgaattggccaaggagaagcgcaagggtgttgagcgtctcctgaagatgcaaaaccagcgtggtggccctgctgtcttccaggacatcctgaagccaggtcaagatgagtggggtaaaaccctggaagccatggaagccgccatggccccggggaaaaatctcaaccagagtcttttggatcttcatgcactgggttccgcccctacagacccccatctctgtgacttcctggagagtcacttccgagatgaggaagttacctttatgcctcggaagagtgcagacctccatgcagcgggtgaggctgccagcctaggtggggtgtcattgaatgtcatgaagggagccagccttcatgcactctgcctgcgtctcctgaacagctttggaccaggagttgctaccttgtgcggagaacgtgtggtgcataagaacaaccgagcctctgctcttcgaaaatgtatattctggccagtctccttgaattcctccagggcgaggccacgccagcgcacaactgcagggggcgccgttcccacagcagccctgcaaagggtcatccctgcttcaagccagtgcctcttcccagctcccatggggaccaccgaagccacgctccggatggaaaacgtggacgtgaaggaggaatggcaggacgaagatcttcccaggccactcccagaagagacgggggtggaactgcttggcagcccggtggaagacacatcctctcctcccaacacgctaaatttcaacggagcgcatcgtaagaggaagacgctggtggccccagagatcaacatttctctggatcagagtgaggggtccctgctgtccgatgacttcttggatacccctgatgacctggatattaacgtggatgacatcgagacccccgatgagaccgactcgctggagttcctggggaatggcaacgaactggagtgggaagacgacacccccgtggccaccgccaagaacatgcccggggacagcgcggatctatttggggacggcacgacggaggacggcagcgccgccaacgggcgcctgtggcggacagtgatcatcggggagcaagagcaccgtatagacctgcacatgatccggccttacatgaaagtggtcacccacggagggtactacggcgaaggcctcaacgccatcatcgtcttcgcagcctgcttccttccagacagcagcctccccgactaccactacatcatggagaacctcttccttccgccaggacagcagacaacacctggaccagtggggctgacccagccagcggcaggagtggaggcaggcagggtcggcaccgcaggtgtcctgaccctggacccctccatgttgggtccctgccttctgtgccccgtgagcaggtacgtcatcagcagcttagagctcctggtggctgaggactacatgatcgtgtacctgaacggtgccacgccccggcggaggatgcctggaatcggctggctgaagaagtgctaccagatgatcgaccggaggttgcggaaaaacctgaagtccttgatcatcgtccacccctcgtggttcattcggactgtgctggccatctctcgccctttcatcagcgtcaagttcatcaacaagatccagtacgtgcacagcttggaagacctggagcaactcatccctatggaacacgtccagatcccagactgcgtcctgcatgaccggcagatcatccttaccacactctgtgcttatggggaaggagaagccttggcaagccacctcttccacgtcatcctcccattccatatccactcctgcttcccctccagcacggagacctcagaccctccctgtggccctggactcgacctggcatacaccacaccgttcagcacacattttgcacagaggggcaaatag

SEQ ID NO: 4709 - DNA, 1603 bp, Homo sapiens
  SIMILAR (34)..(177): 321254mologous to Volvox carteri extensin,accession number X65165,Smith-Waterman Score=43.
acaatgttaactttcgattaagaaagaaaaaaaccccaaacatcttcaggaattccatgccaggttcagtctcttccagtgagcccgcttgctaaaagtccacgtgcaccattaattagctgggctggcagcaccatgtaaaaagaagcctattcaccaccaaccacacagcctagacatgtaaagtaggatcaagtaatggatgacaaccatggtcgtggaatatggtcaatgagagtcagaaaagtacaggcaccagtacaagcagcagataacagagttgacgggccaaaggataaaataggcttatttaaataggatgctacagaacacatccactcctaattgtagctgctttacactgggtgccattgtaccatatgcatcagccacccttcaggcaccccatggtgaaagaaaaggattcagaatagaagccaagcaggggactgttgttaaccccgaatatccattatgcatagaaacagctcacatatcccagggactcaaacagggcttcaaaatggttgtgaagggtcccaaatgacatctaggcctcagtttcctctctgtagcatgaagaaattgtgattcttaactcttctgggtcacagcccccttggaaaacttgctagcgatggatcatcattcccctaaaacgcacattcccacaaattcccatcattcccccaaaccgcacattcccacaatttcaggaagtttggggatccccaactccaatccsayggttccgaggttcaaaacccaaggattggggaactgctaagttttcttacaactcaaaaaaaattataaacaataaccatcctttacgtacacccacgctttatagtttacaaagcgatttcaaccccacacacattgataggcagaggaggaaactgaggcgcagacaaattacagagtgactcgcctaaggtcactccgccaactggtggctaggcccggaagaaaacccagctcttccgactccggagctcgtctccccaccccggggctgccgccagagctcccgcccctcactaaggcggcataaggaggaaaaggcaaagtagaaatccccacaaccaaccatcctccggccccctcctgcccccccaactgggtccttgcaggccccgaagggtggcgccaggcctccaagccggccccggccacccccgcctcgcccggccgctccaaatcccgcggccgctgccgccgccgccttccccggagcggggcggagcagctgcccggcgccgccgaccacccggacgactcctcgtcgaatcgcaaacgcataggccgccgcccgagttctgcgtacgagaagaaagacgcggcgcgagcgccaacggccaccgggcgcgcgccgcggcggccgggcctgcgccccaagagctggatgccagagcaggagaaagagccgccaaccgatcgctcgatcgaccgcacgcccgttccttcgccctaccagacccgggagggggggagggcgcgccagggcttcttcgatttaggggcctgactccccggcgacgagacaagatggctcctccggtccgcaccgcagctaccgtcccggctgcgtcgcacgaaa

SEQ ID NO: 4710 - DNA, 960 bp, Homo sapiens
  SIMILAR (4)..(318): 981254mologous to Homo sapiens Human secreted protein, SEQ ID NO: 5473,accession number AAG01392,Smith-Waterman Score=562.
attatggcgacctccgcgacgtcgccgcacgcgcctggttttccagctgagggtagatgcggttactatgtggaaaagaagaaacggttctgcaggatggtggtggccgcagggaaaagattttgtggtgaacacgctggagccatggaggaagaagatgctcggaaaagaatcctgtgtcctttagatccaaaacacacagtatatgaagatcaactagcaaagcatttgaaaaaatgtaactcaagagagaaaccaaaacctgatttctatattcaagatattaatgcaggcttaagaggtgaaacagaaatacctgaacaattagcttgaattctacacttacagatcatattatgtcccatccagcattacacgatgcacttagtgaccctataaatggcgattctgcaaccaagcacctgaaacagcaggcttctatttttaggtaacattgaaaatttaaagttacttggtccaagaagatgctttgttgagtttggagcgggaaagggaaaattatctcattgggttgatattgccttaaaagatgctgaaaaagttcacttcatcctagtggaaaaggtgaccacaagattcaaggtggatggaaaacacagaaagaaaaattcagtgtttgaaagacttcaaattgatattcaacacttgtgtttgaacaagattcctgtgctaagagaagaaaaactacctgtggtaggaattggaaagcatctgtgtggtatggcaacagatcttgcattacgatgtttggttgaaacctatgctgccagttttgaggaaaggaatgaagaacctttagccaaacgcataaagaatgataaaacagaaaaagaaatttacactttggccaaggaaggaaatgaaaaaaatgtcccagagaagtggaaccctgtggctggcattgttattgcactcttgtgtcaccacaggtgtgattgg

SEQ ID NO: 4711 - DNA, 880 bp, Homo sapiens
  SIMILAR (52)..(285): 731254mologous to Homo sapiens PRO2852,accession number AF130079,Smith-Waterman Score=277.
ccaccacccctggctaattttgtatttttagtggagatggggtttcaccatgttggccaggctggtctcgaattcctgacctcaggtgatccgcctgcctcagcctcccaagtagctgggattacaggcgcccgccaccacgctcagctaattttttttgtatttttagtaaagacggggtttcaccatgttggccaggctggtctcgaactcctgacctcgggtgatccgcccgcctcggcctccctaagtgctgggattacaggcgtgagccactgcacccggccgatgtatgcatttttaaaacaattaaattttcatattatagataagtctgactataggttatataggaaactatacctaaaagcaaccactatggtttttagatatgccttcctttaagttaaaaagtttaaggctcctattttggagggataccctaaagacattttctcacagtatgacctcaatgcatctacatatatgctactggaaaactggaaataaaacacaactcttgttaaatatatcattcttcaactttaaagagaaacagaaaaccattttaactacatcccttcttatttctcaatactggtttgttaagaacttctgccactcaaaaaggtaggtgcaaatccataaatttagcttaaaacagaagattaaataggtggggagcatggtaagacaatgacatataaaacaaaacccttactatcttgatttataccttccctatcccatgaaacttcctacgttgcaaacactgatttcctacaaaccatgaagatttcctatgatatttgcctatccttttattaaactaggggccaaaactgacatcattgctgcaattaacttttacttgttctgg

SEQ ID NO: 4712 - DNA, 1433 bp, Homo sapiens
  SIMILAR (5)..(325): 551254mologous to Homo sapiens Human secreted protein, SEQ ID NO: 7874,accession number AAG03793,Smith-Waterman Score=266.
tgaaacggagtctcattctgtcacccaggctggagtgcagtggtgtgatctcggctcactgcaacctccacctcccaggctcaagcgattctcctgcctcagcctcccgagtggctgggactacagacatgtaccaccacacctagctaatgtttgtattttttagtagatatggtgttttactatgtttgccaggctggtctttaactcccgacggaccccaagtgatctgatcacctcggcctcctaaagtgctgggattacaggtgtgagtcaccgcgcccagcctatgtattttttatttttatttttttgttgcagagatggtgaggatgtcttgctttgttacccaggttggtcttgaatttgtggctttaagtgatcctcccaccttggcctcccaaagtgctcgggttacaggcgtaagccaacagtgcctggcctgtattttattgtaattcctttttccattctcatctcaatgcatttccaaattagagaaggacatccttcttgtctcacactttaaaaaatagcagttttcatggcaagccaacattttaacatcttttctatggccagcaatgatagtcatcttgtggaaacgtgtctgaggcattctcctgtctataaagtcaaagatctcattaagtgctttggcatgttttgaggaaaccgaaaggtgacccaaaactttcattatgaaagctggtatcacaggtaagcaaattacacccctttgtgacagtgtcgggtacgaggtgtgaacatttagcaggtaagatgttttcattttcattggtaagaagcttatggactaaatgaaatttgctcaaattaactgtgtactgtctgccaaatatgtagataaatgagcaaagtctaggttgtatttgcacaagagaacaacaatctcttacgtcttcagtggcttcactaaaatcttcacagaaatcgagaagacgatctgaaactccagttttcaaatcaacatacctaagagctagcggaaacctgtagccatgacttcaggcagcccttgacgcactcggaagcacgaatgctggaaggatcagacagggtcagcactactgtaaaggggcaatgcatctgttactgaaagtccctcgtcctttggttcacacacaggacttttagtttgtaacctccgaatcaggaaatgtaaccttcttggtttgcggtgcaatcaagggaacaagatgataatggcgtccattcaaggagtgcgcccaagctaattctgcgaccactgtttttgactgagaactgctgtctctttggaggtcaaaaaaaccttgatttagaaagatatgcctcagacttgagagactcaatgtccaatgtgcctccacctccccttctccatatgcccattctcacgaattccaccacactgactagggactcagtaa

SEQ ID NO: 4713 - DNA, 690 bp, Homo sapiens
  SIMILAR (22)..(303): 541254mologous to Plasmodium vivax pva1,accession number X92485,Smith-Waterman Score=236.
gactgtcctgtttcccacaggccactttttttttttttatcttttgagacagggtcttgctcttgcccaggcaggagtacagtagtgcaatcacagctgactgcagccttgacctccagggctcaaggatcctcctgcctcagtctcccaactaagtgggactacaggcacgtgccaccatactcagctttttttttgtttgttttagacaagagtctcgctttgttgcccaggctggtcttgaattcctgggctcaagcaattcttccacctcagcctcccaaagtgctgagattactggcttgagccactgcacccacccctccagactactttaaatgtctctactctgactgaattgaaggaattgtaagtttcagttgctgaatatatcagtatatctgaactccggatctttttatttcctatttttggcttcctacataaattaataaagtctgtctatatttaaggtttctgggagtagttttgtctatatttaatccatagatgtgctcctagtcatcagtcttatttcagtaaaaccatctttctggccaaatctctaacacgttttttacttcagtagtgagggcaatgagaagctttattaagaaagatcctatttaaagggctaatttggtattgaaagcatgctgatataaagtccagtatttgaggatataaaga

SEQ ID NO: 4714 - DNA, 855 bp, Homo sapiens
  SIMILAR (230)..(415): 531254mologous to Homo sapiens Human myelin oligodendrocyte glycoprotein gene,accession number AAZ29204,Smith-Waterman Score= 130.
ctgatttttatattttattatgtgtttccttttactgaagatctttgtatcttcataaggctttgaataagagagtttggtaaggtttatgggtacagatcaatataataataacggttaacaattttttttttttgagatagggtctctctctgtagcccaggttggagcgcagtggcgatactacaagcccactgcagccttggtctcccgggttcaagtgattctcccacctcagcctccccgagtcatgggaacacaggcccatgccacaaggcctggataatttttgtattctttgtagagacggggttccgccatgttgcccaggctagtatcaaactcctgggctcaagtgatctgcctgcattggcctcccaaagtgctgggatgacaagcatgagccaccatgcctggccaatagttaaaaattttgtttgcatttattatgtaccagacattgtgctaagtatgttaagtgtaaaatctattaatattcacatcaatcatgtgagaggactacagtaacgaccctgttttacagagttggaaactgagacccagaatttactaatctgttcaagtaagtggtggaactaggatttgaattccatcaatctggatccagagacaatgctctcaatcactatgttgcactgtttctcaaagttaatacctgctccctgcatcagctactttaaaatgtcattaaaagacatagatcccattcacgatgtcaaaaataagtaaatcaattcaaccttattggaggtcattttagatggtctaaataaatggggggatacagtcactcacgtttgggaagtatcaagctaagtatctaaaacgagttcc

SEQ ID NO: 4715 - DNA, 361 bp, Homo sapiens
  SIMILAR (18)..(194): 731254mologous to Mus musculus putative,accession number AK010652,Smith-Waterman Score=215.
  misc_feature (1)...(361): n = a,t,c or g
ctcacaggcaggttatcaagtgtgaagtggtcagctggagatttgatgtgcagctcaaagatctaaaaagatggcagaatcatctgctcctgtcccagcagctggcctgcattgtgctgacctcagctggcatcatggaccacaaagagatgagatgaaaacacacaggaggaaaaagcctgggattctttttctaggggtgtaatacacccatgnnnnnnnnnnnnnnnnnnnnnnnnnnnnnnnnnnnnnnnngcctcaatgggggaaaaaaaacgcaccagagacaaatacttatttaggatctgtaatgtacccattgccatacctaggcatcctagatacagcaacatatccctgc

SEQ ID NO: 4716 - DNA, 1050 bp, Homo sapiens; identical to SEQ ID NO: 4352
  SIMILAR (169)..(273): 771254mologous to Homo sapiens Human secreted protein, SEQ ID NO: 5327,accession number AAG01246,Smith-Waterman Score=134.

SEQ ID NO: 4717 - DNA, 963 bp, Homo sapiens; identical to SEQ ID NO: 4353
  SIMILAR (169)..(273): 771254mologous to Homo sapiens Human secreted protein, SEQ ID NO: 5327,accession number AAG01246,Smith-Waterman Score=134.

SEQ ID NO: 4718 - DNA, 470 bp, Homo sapiens
  SIMILAR (10)..(135): 761254mologous to Homo sapiens PRO2550,accession number AF130089,Smith-Waterman Score=165.
gagacggagtttccctcttgttgccaggctggagtgcaatgacacgatctcggctcacggcaacctccacttcccaggttcaagcgattctcctgcctcagcctcccgagtagctgggattacaggcatgcaccactagtctcgcgacgttttaattagaattttagaattagaggagggcttagaactctgccctcatttttcagtgaggaacctgcccaagacaggacaaatacttaccctaatgcttagcctggctccagtgaaattagctccccagccaaagctgagctggatggaactaacaaggcacagcaggctgtgggcagccctttcgggaggtgggcaggtataggaagcagaaaggttttggtgcctatcgctgctgatggtcggcgtcaggccaggccaggcgtcttcttgtaggctctgggaaaggggaaaggaagtcctccgggtgttaaatagat

SEQ ID NO: 4719 - DNA, 406 bp, Homo sapiens
  SIMILAR (4)..(219): 531254mologous to Homo sapiens Human secreted protein encoded by gene 22 clone HMSJW18,accession number AAY02671,Smith-Waterman Score=168.
gttatatttttagtagagacagggttttgccatgtttccctggctggtctcagactcctgggctcaagcaatctgcccgcctctgcctcccaaagtgctgggattacagacgtgagccaccacagctggctgaagattatactttcaattcagagcgagtttgaagatgacactttgaggcatcgtgtctatggttcattactacagaagcttctctggatgtgtaaagcacagggaaaccaggcagaggagggcacaggggtggctctcccagaacgagaagccagctcctggagttgtttgctgcaactgccattccccgttgatgaaccatgctcttccttcaaaagaagggagagtgagaaggaaccaagtccaaatgggtttcccaatttgaacatttaaa

SEQ ID NO: 4720 - DNA, 1231 bp, Homo sapiens
  SIMILAR (340)..(522): 961254mologous to Mus musculus putative,accession number AK004542,Smith-Waterman Score=289.
agggcccagggttgtatattcttaacagatacttagtgattgttttcaggaaagtttgaaagtcactgctctgagttcccgtgttctttgcaatgctgttttctttccttagaacactttgcaggccccagccctcagcaggattcaaccttcatgtttcagcttccacagcctacctcccatcccctttccctgggccgtgtcgcagcactggttcactcactgatctacaattgcccagtgacctctctgtaccctccttggaaggcaagctccctggggtagggcacccctttgacacccctggctggtctcaggccctgcctctttccccactaggtgggttcagtagaagaattccaaggccaagaacgaagcgtcatcctcatctccaccgtgcgaagcagccagagctttgtgcagctggatctggactttaatctgggtttccttaagaaccccaagaggttcaatgtagctgtgacccgggccaaggccctgctcatcatcgtgggggaacccccttcttctggggccatgaccctgactggaaagtgtgagcccccccaccccattctccctcttagtggccacagcccctgcctagggcaggtggatcttttttaagcgcttgcttatcgctcagttaatcctcagatgtgtccattttcacagcatcactattgtatttataagttaaatgacatccagaggttgagcaagtacagctcagatgggacaggaccgtggcttagcctccagtctctgctgggcactcctctgtaccccacagattcctgggagttctgtaaagaaaacggagggtataccgggtgtcccttccctgccaaactggacctgcaacagggacagaatttactgcaaggttctggagcaagctcagcccctctacctcaggggccccacagccatggacttacctcccccagggagcgggagggtgaaagggggcctgtgttctgcaagtgggagccagagtggaggaatgagctctgaagacacagcacccagccttctcgcaccagccaagccttaactgcctgcctgaccctgaaccagaacccagctgaactgcccctccaagggacaggaaggctgggggagggagtttacaacccaagccattccaccccctcccctgctggggagaatgacacatcaagctgctaacaattgggggaaggggaaggaagaaaactctgaaaacaaa

SEQ ID NO: 4721 - DNA, 349 bp, Homo sapiens
  SIMILAR (114)..(158): 601254mologous to Mus musculus putative,accession number AK019463,Smith-Waterman Score=41.
ttgtgttattgtggctctactgggaactctttcttaagtgtggttagctattgtaccgctttttacactgaaactatacttgcgcagcggcgcctgtacatactgtctaaagcttggactctgactcaggatgtaaggcctatgtgggagatgaatatcctgcctggaccttgtagatctgcatgcacagccttcccttttgaaggaacatgaagaggaaaaaatgttcacacttaaaggaaatcgtttgccggcagctgatgtgaagaatataattttttttgtcagacccaggctagagttgatggatataatcgctgaaaacgtgctcagtgaagatagacgaggc

SEQ ID NO: 4722 - DNA, 1111 bp, Homo sapiens
  SIMILAR (1109)..(1053): 681254mologous to Homo sapiens Human GTPase associated protein-1,accession number AAY99650,Smith-Waterman Score=60.
tttttttttttttttttttgcatagaacaaggatttttgttttcagagttttcttcctttccccttccccccaattgttagccagcttgatgtgtcattctccccagcaggggacgggggtggaatggcttgggttgtaaacttccttcccccagccttcctgtccccttggaggggcaagttcaagctgggttcttggttcaggggtcaggcaggcagttcaaggcttggctgggtgcgaaaaaggctgggtgcctgtgtcttcagaagctcattcctccactctgggctccaacttgcagagacaaggcccccttcaaccctccccgctccctggggggagggtagtcatgggctgtgggggccctgaaggtagaaggggctgaagcttgctcaaaacctttgcagtaaaattctggtccctgtttgcagggtccaatttgggcaggggaaagggacaccccggtaatacccctccgtttttcttttacaaaactccagggatatttttccagtcagggtcatggccccaagagaagggggttccccacgatgatgagcaaggccttggcccgggtcacagctacattgaaccctcttggggttcttaaggaaacccagattaaaagtccagatccagctgcaacaaagctcttggccttttcgcaacggtggagatgaggatgacgcttcgttcttgggccttggaattcttcttactgaacccaccttcaaagtccttgatgtcttccaagtcctcggaagctccctgtcaagtttggtgatgcagtaacggattttcgtccacctgtttccggtacggggagatgacgcccacacttcgagggatcaggcgagctttgcccttcttggaggagggggccaggagcagcttcaggtaggaagtcactgtggcagcctcttcagggttgaagaaggatgggctgttgccttcacgctcatctttgcccattacgccgtgaaagatgatgggaaagccctgtcgagaaagaaacgtccagcgacagaagcgttctcgatccacgacatcagcacaggcctgcagctccccttcgataatagagctggttaggaatgtccaggatggtgg

SEQ ID NO: 4723 - DNA, 392 bp, Homo sapiens
  SIMILAR (152)..(328): 621254mologous to Homo sapiens Human myelin oligodendrocyte glycoprotein gene,accession number AAZ29204,Smith-Waterman Score= 157.
tgagccaccgtgcccagcctgagactactttttgatggagcccactcaaggggatgaggaggtttgaaccacaagtggctggctaaataaaagcttagtcagagctgggcacggtggctcacacctgtaatctcatcctccctagtagtggggattacaggcgcccgtcaccacatctagctaatttttgtatttttagtagagatggggtttcaccatgttggccagtctggtgtcgaactcctgagctcaggtgattcacttgccttggcctcccaaagtcctgggattacaggcgtgagccaccgtgcccaggtgcccccaccttttttttttttttgaggcagagtctcactccagcctggacaacaagagcaaaactccatttcaaa

SEQ ID NO: 4724 - DNA, 2175 bp, Homo sapiens
  SIMILAR (1)..(747): 991254mologous to Homo sapiens transcobalamin I precursor,accession number J05068,Smith-Waterman Score=1250.
atgagacagtcacaccagctgcccctagtggggctcttactgttttcttttattccaagccaactatgcgagatttgtgaggtaagtgaagaaaactacatccgcctaaaacctctgttgaatacaatgatccagtcaaactataacaggggaaccagcgctgtcaatgttgtgttgtccctcaaacttgttggaatccagatccaaaccctgatgcaaaagatgatccaacaaatcaaatacaatgtgaaaagcagattgtcagatgtaagctcgggagagcttgccttgattatactggctttgggagtatgtcgtaacgctgaggaaaacttaatatatgattaccacctgatcgacaagctagaaaataaattccaagcagaaattgaaaatatggaagcacacaatggcactcccctgactaactactaccagctcagcctggacgttttggccttgtgtctgttcaatgggaactactcaaccgccgaagttgtcaaccacttcactcctgaaaataaaaactattattttggtagccagttctcagtagatactggtgcaatggctgtcctggctctgacctgtgtgaagaagagtctaataaatgggcagatcaaagcagatgaaggcagtttaaagaacatcagtatttatacaaagtcactggtagaaaagattctgtctgagaaaaaagaaaatggtctcattggaaacacatttagcacaggagaagccatgcagccatctggagtgttgcctcttaacggctgctccaccaccaccctagctgtagcatgtagcactggccacaggaaatgtgcttccagagcactagaaaacagatgccggagccctgccgccaaggtcacaaaaaacaagagactaagcaattgtcagacaggccagaggaagctaaggagatgtgacaaccgaatgcaatgtggtgtcctggatcgcatcctagaacagaaagaggacattagtggaacaactagtgaaatccaaataaagtggggggttgaacttcactcagtttccagatggagactggggaaagttgccatggaaatggtccaatgccaaaaagcaggctaccctgagagaggagatggggtgggggcagttgcagaggggcctaacataaaggtggctggagggttgagagaattagagacaagaaaaacagctcttccagagaatgaatcctcccaggaacatgcgtttatcaccattacactccagcatctagtacaaggactggcacacagtgggtactcagtactcagcaaatgtttgctgaatgaaaacagggccatgcaaaagcatggaactgtctggactcagcagattcaaagttcagctgctgagaagtcagagaaaaccatgtcctgggataggctgggtagaggcactgcacattcttggcaagcctgtcctgtgtcactgaaaaagcaggctgtcgagggagcccaccaggaagagcagtgcaagagaagagatgagatgagaccaggtgagtcagatcttgtgaccatggcctcaggaagggatgcccttctgtgtggacgctgttgccagcaggccaagacagaggaactaacaataacagtgcctcgacttggggagcaaagggaagcccctctcccatgcagcacccctcctggcagcaccccgcctgcggcgaaactcacggccttcagctgctccagacggtccttcatcctgaagcccaggcgcccggaggcaggtagcgcgtcccaggcggggacaagctcccgaaaacaaataagacaatgtgatgtgggctacattgggtggcagtcgagtgttctaaaaatatcccgccaggaggaaggcattccgagtagcgggatcccgcgcagcctcagggctgctggcagtgaaagtggggggatggaggaggtgtccagaggaaagacctggagatctggagatacaggacggtcagggtggtcagagaatttggatcttttgcttgttggaaatcgggaccgctccgagaaacgtaagcagctcgatgttgttagtgccagtggagacacttggcactcacaatttgcagacgtttgggaaagcatcgtttctcaagaggaccccgttcccgtgtctgtaaatcagagatggtacccacttcgtagttcgctgtga

SEQ ID NO: 4725 - DNA, 804 bp, Homo sapiens
gcggccgctagctaggaggagcgtccgaggccacgggagcctccgccgcgcagccccctccgcccccaccggcgcctcgcgctccaaatccggctcccgggccggcgccggcgcagcgctgatccgccctggacccgcccctacctggccgcgcccctcgctccttcttaaagggcccgcgtcccgccaccgcccggccgcccgggggcgtctccaaagcccccttccctaacccgagagccctccagacacgcgtggagtccggggagaggcccctgcaccggcggatcctgccgcagggccgaggaagagcaagagcgactgtctggctgcggtcattcgctgtctgtgccgggctcctcgctaggatccagttcttagccgactccttgctaggcggggacaagctcccgaaaacaaataagacaatgtgatgtgggctacattgggtggcagtcgagtgttctaaaaatatcccgccaggaggaaggcattccgagtagcgggatcccgcgcagcctcagggctgctggcagtgaaagtggggggatgggggaggtgtccagaggaaagacctggagatctggagatacaggacggtcagggtggtcagagaatttggatcttttgcttgttggaaatcgggaccgctccgagaaacgtaagcagctcgatgttgttagtgccagtggagacacttggcactcacaattttcagacgtttgggaaagcatcgtttctcaagaggaccccgttcccgtgtctgtaaatcagagatggtacccactttgtagttcgctgtga

SEQ ID NO: 4726 - DNA, 325 bp, Homo sapiens
tgtcctgcctagcgtccagcgtcttctaggagggtggggtctgcctgtcctggtgtggttggtttggccctgtttgctgtgaccacccttaaaaccagcaccctgtccctcgaggctgccgagtgggtgtgtggactcgggggccttcccacaaacactacgtccggctctgggcccgagacagccgcaggccccagccactgaatgatactggcagcggctggggttttatgaactcctttctggtattttttcccctctatgtacaaatgtatatgttacgtctcaatttttgtgcttaagtaaaaataaaaacattttcaga

SEQ ID NO: 4727 - DNA, 934 bp, Homo sapiens
attaatagccctttatccccctgcaccctcctgcaggggatggcactttgagccctctggagccctccccttgctgagccttactctcttcagactttctgaatgtacaatgccgttggttggaatttggggactggaagggaccaaggacactgaccccaagctgtcctgcctagcgtccagcgtcttctaggagggtggggtctgcctgtcctggtgtggttggtttggccctgtttgctgtgactacaccccccccctccccgaaccgagggacggctgcctttgtctctgcctaagatgccacctgccccgcccatgctccccatccagcagtcattccagccatttcaggaaaggccagggcccagcccagtcccagaaaccgcatcccctccagcagggaactgaataagccatctctcggagggcccccctaatacccagtggagtcctggttttaaaccctggggggtgtgtcacctgtgatgggacacgtaggagtcccacccttaaaaccagcaccctgtcccctcgaggctgcccgagtgggtgtgtggactcgggggccttcccacaaaaacatagcccgtccggctctgggcccgagacagccgcaggccccagccacttgaatgataattggcagcggctggggttttatgaactcctttctggtattttttgccgtgccccgaacaaatgtatatgttacgtctcaatttttgtgcttaagtaaaaataaaaacattttcggacaaaaaaaaaaaaaaaaaaaaaaaaaaaaaaaaaagggggggcggtattgaaaagaaaagtgtgggggtcgtggggagaaaacaacaatttttttttatggggacaccataatattgttttgggggggggaataaaaatagagggggggggacatcttggaaaacaccccgctgtg

SEQ ID NO: 4728 - DNA, 363 bp, Homo sapiens
  SIMILAR (118)..(363): 981254mologous to Homo sapiens Similar to block of proliferation 1,accession number BC001086,Smith-Waterman Score=440.
  misc_feature (1)...(363): n = a,t,c or g
cccacgcgtccgcgacccacgcgtccgcccacgcgtccgcaggcgcatctacaagcccctgcggacccgggatgagctggaccagttcctggacaagatggacgatcctgactactgccggctgtcgacttcttcagcggggacgtcatgatccacccggtgaccaaccgcccggccgacaagcgcagcttcatcccctccctggtggagaaggagaaggtctctcgcatggggcacgccatcaagatgggctggatccagcctcgccggccccgagaccccacccccagcttctatgacctgtgggcccaggaggaccccaacgccgtgctcgggcgccacaagatgcacgtacctgctccn

SEQ ID NO: 4729 - DNA, 2193 bp, Homo sapiens
  SIMILAR (1)..(852): 791254mologous to Mus musculus Bop1,accession number U77415,Smith-Waterman Score=1197.
gattccggcagtgacagcagtgaggatgatgacgaaggcgacgaggagggagaggacggagcccttgatgacgagggccacagtgggattaaaaagaccactgaggagcaggtgcaggccagcactccttgcccgaggacagagatggcgagcgcccggattggggatgagtatgcggaggacagctctgatgaggaggacatccggaacacggtgggcaacgtgcccttggagtggtacgatgacttcccccacgtgggctacgacctggatggcaggcgcatctacaagcccctgcggacccgggatgagctggaccagttcctggacaagatggacgatcctgactactggcgcaccgtgcaggacccgatgacagggcgggacctgagactgacggatgagcaggtggccctggtgcggcggctgcagagtggccagtttggggatgtgggcttcaacccctatgagccggctgtcgacttcttcagcggggacgtcatgatccacccggtgaccaaccgcccggccgacaagcgcagcttcatcccctccctggtggagaaggagaaggtctctcgcatggtgcacgccatcaagatgggctggatccagcctcgccggccccgagaccccacccccagcttctatgacctgtgggcccaggaggaccccaacgccgtgctcgggcgccacaagatgcacgtacctgctcccaagctggccctgccaggccacgccgagtcgtacaacccaccccctgaatacctgctcagcgaggaggagcgcttggcgtgggaacagcaggagcccaggcgagaggaagctgagctttttgccacgcaagttcccgagcctgcgggccgtgcctgcctacggacgcttcatccaggaacgcttcgagcgctgccttgacctgtacctgtgcccacggcagcgcaagatgagggtgaatgtagaccctgaggacctcatccccaagctgcctcggccgagggacctgcagcccttccccacgtgccaggccctggtctacaggggccacagtgaccttgtccggtgcctcagtgtctctcctgggggccagtggcatggtttcaggctctgacgacggctccctgcggctctgggaggtggccactgcccgctgtgtgaggactgttcccgtggggggcgtggtgaagagtgtggcctggaaccccagccccgctgtctgcctggtggctgcagccgtggaggactcggtgctgctgctgaacccagctctgggggaccggctggtggcgggcagcacagatcagctgttgagcgccttcgtcccgcctgaggagccccccttgcagccggcccgctgggctggaggcctcagaggaggagcgccaagtgggcctgcggctgcgcatctgccacgggaagccagtgacgcaggtgacctggcacgggcgtgggggactactggccgttggtgctggcacccaggggccacacaggggtgctgattcaccagctgagccgtcgccgccagccagagtccgttcccctgcacccatgtataggtgcaccgagtggcattctcccctgcccggcccttcctttttggtgggtccccagcgcagcgtccgccttttaccacctgcgtgcgccaggagctcaccaaggaagctgatgcccaaactgcaagtgggtgtgccagcctggcgggtgcaaccctgcaggtgacaacggtcatctgtgggagctacgcatagcaagctggtgtggtttgacctggatctttccacccaagccatacaggatgctgagaaaccatcaagaagggctctgctggctgtggccttcccacccgcggtacccactcttcgcgtcaggctcggacgaccggcagggtcatcgtctgccatggaatggtgtacaatgaccttctgcaaaaccccttgctggtgcccgtcaaggtgctgaaaggacacgtgctgacccgagatctgggagtgctggacgtcatcttccaccccacccagcccgtgggtcattctcctcgggggcagacgggacatgtccgcctcttcacctagctgttcttgcctgcctggggctggggtggtcgtgctgaagtcaacagagcctttaccctgtgctgcctggtgctcccaccttcttgaattggggttgccaacaaagccgcccccaccacaa

SEQ ID NO: 4730 - DNA, 594 bp, Homo sapiens
caggattcagcacttttgcaactactatagattatttacccggtctataatctctccccagcgggtcagggtaggttagatcttttctcttgcttgcttcgtcatagactcaagctgcctactagtgagggggtgaggaccccaatctgctctgcaggcgtttaaaggcccaaatgcccaaacacaatggatttatggacacgacccaaattaatgtagttaacccataaatgtccaagcacaaccccaaaatccttgaaggaggttttacagtgccttttgtggaacagtttatgtttggaagagtaaatttaaattgtcttttcaatatctgtcttatatcagtcaataacattggatggcaatttacacacatgaacttgtctgacaatgaatatattatacagcagttttggtttatgaatgacataaatactgacaccagtctagaagacattctactttttacaataaatttcatttgtaattttatatgttccgtggcaatgcttttgtgcattacatcctctagagggaacataaaaagataccaataaaattttgtagctgaacagttattaaaaaaaaaaaaaa

SEQ ID NO: 4731 - DNA, 459 bp, Homo sapiens
  SIMILAR (1)..(285): 981254mologous to Homo sapiens Human cell signalling protein- 5,accession number AAY44242,Smith-Waterman Score=478.
cagtacagccaacatatttctctttttggccaaaccctgaccacatgccacacgcagattcactgtgccatcagcaagattgacattgaaaaagatatccaggctgtaatggaagaaactgcaattttatctacagaaaacaaatctgagttcctgttaacggattactttgaagaagatcctaacagtgcaatggataaagagagacgaaagtctttactaaaaccaaaattattgagactgcagagagacattgaaaaagcctcaaaagacaaggaaggtgtgtaaccatctctttgaatggccagaaaagggaccatatgatgctcagaggtttcattcagagttaggattgatctgcttttgctatttggcaggggtcttctcatttaaagaaccatatatcaaacttcagttgtgtgaacaaaaaaaaaaaaagtagaagaaaaaagaaagcca

SEQ ID NO: 4732 - DNA, 747 bp, Homo sapiens
  SIMILAR (568)..(747): 801254mologous to Homo sapiens Human secreted protein encoded by gene 30 clone HEBDA39,accession number AAW75086,Smith-Waterman Score=250.
gtcagggtgtgtctgtgctcttcctccagggcagggttcaaagtccgagtgtccccctctcccattccccctccactccctccccatctctcccactgatcggtgtacagagaaattatttatatatatgtataaatgtctatttagtaacggtttccctctccccttgccccgcttccccctccacagccacagcccccgccccctccaccttgtacataatgtataggaaaagtctatgtatggctggggggggtggggtggcttcagaagagctgggggacccccctcttttccccccatccccctggcaggccaagatcgtttgctaaaggccattcccctccgcagggcattttgggcgtcgggttgggaggggaaaaccgcattcttgtaattatttttaatctaatttattgtacatacctggggcaggggcttggggaggtggaggggggagaagggtcccctctctctgcccctcccactccttttctacggcgatttgtctgtgtctggcccccacccactgcccatcccccattgttgtctggatgtggttctatttttttatcggtctcctttcccctcctccccgttctcgcccccgccccaccccctgctcccactaccctttgtctcttgctctttcttgggcttctgtacaactcaacttgtatacactgtgtacacacaaccagccaaacgaaaacccaacggcaaacactttaaaaaaaaaaaaaaaaa

SEQ ID NO: 4733 - DNA, 1644 bp, Homo sapiens
  SIMILAR (1185)..(1556): 491254mologous to Homo sapiens Human cell signalling protein- 5,accession number AAY44242,Smith-Waterman Score=220.
acatttcaacatgagggacccactgacagattgtccgtataataaagtatacaagaacctaaaggagttttctcaaaatggagagaatttctgcaaacaggtcacatctgttcttcagcaaagggcaaacctggaaattagctatgccaaaggacttcagaaactggcaagcaagctgagcaaagcattacagaacacgagaaaaagttgtgttagcagtgcctgggcctgggcctcagagggaatgaaatccacagcggacctgcatcaaaaacttggcaaagcaattgaattggaagcaataaaaccgacttatcaagtcctaaatgtacaagagaagaagagaaaatcacttgacaatgaagttgaaaagacagcaaatcttgtcattagcaactggaatcagcaaattaaggccaagaagaaattaatggttagtacccaggaaacatgaagcacttttcccagcttgtaggaaagctcccaaggcaatctatgactgagaaggagaagcggaagctcctcaataaactgacaaaatcaactgaaaagttggaaaaggaagatgaaaattactaccaaaaaaacatggcgggttattctaccagactgaaatgggaaaacacactagagaactgctaccagagcattctgggagctggagaaggaaagaattcaacttttatgcaataactttaaaccagtacagccaacatatttctctttttggccaaaccctgaccacatgccacacggcagattcactgtgccatcagcaagattgacattgaaaaagatatccaggctgtaatggaagaaactgcaattttatctacagaaaacaaatctgagttcctgttaacggattactttgaagaagatcctaacagtgcaatggataaagagagacgaaagtctttactaaaaccaaaattattgagactgcagagagacattgaaaaagcctcaaaagacaaggaaggcctggaacgaatgcttataacgtactccagcacctcctccttctctgatgcgaagagccagaaagacacagcagcgttaatggatgagaacaatttgaaactagaccttttggaagcgaactcctacaaactgtcatcaatgttagcagaacttgagcaaagaccctcaacccagccatccttgtagtaatcccatcttccaggtggagggaaaaggagccatactcatagctatgtgaaaatatcctcggccttttttaatgaagagattagagaatattgtggagcaaggcatcttctgggtggggcagagcaatcccaggttcttcaactccagccccctggtgcagcccagctcaggcggcagactttgcaaggccttgtatttctttcaagcccaggcaaagatgatgagtttgaatttggaaaaagggtgacattggtgattattacacgagaaaaaaagaagggaggatggtggttttggatcttttgaatgggaaaaaaggccattttcctgccgcttatgtggaggagttaccttcaaatgctggcaacacagctacaaaggcataaaacaagactctgaacatactaccttcacaactcggtaatcaacaatacagtatggatcaaataagaataaagtgctcataccttt

SEQ ID NO: 4734 - DNA, 694 bp, Homo sapiens
  SIMILAR (244)..(540): 961254mologous to Homo sapiens M83 protein,accession number AB045292,Smith-Waterman Score=547.
  misc_feature (1)...(694): n = a,t,c or g
gttagcacnctcatgtttctggcccccatcgcggtctcagtgcggcgatttttcntggtgaaggcctcggtctacgcctacaccatgttcttctccacgttctaccacgcctgcgaccagcccggggaggcggtgctgtgcatcctcagctacgacacgctgcagtactgcgacttcttgggctccggggcggccatctgggtcaccatcctgtgcatggcacggctcaagacagtcctgaaatacgcttaccgctgcgggcaccggcgccagtgctaccccaccttgtggcagcgctgggccttttacctcctgcccggggtctttatggcctctgtgggcatcgccatctacacctccatgatgactagcgacaactactactacacccacagcatttggcacatcctgctggccgggagcgcagccttgctgctgccgccacctgaccagcccgccgagccctgggcctgctcgcaaaaattcccctgccactatcagatttgcaagaacgatcgggaggaactgtacgcagtgacgtgacactggcctggggacagctgctgctttgatgacctcttcagccaggagctgtatcgagggggaggcgcctggtccagccctggacagattgatttccagctgaataaattggcctagataccctcnnnnnnnnnnnnnnnnnnnnnnnnnn

SEQ ID NO: 4735 - DNA, 3382 bp, Homo sapiens
  SIMILAR (1776)..(2120): 581254mologous to Homo sapiens M83 protein,accession number AB045292,Smith-Waterman Score=306.
atgctgtgcttctacgctggctcctgcaggcacttccgttccggcgcccctccggtcatcaacccgctgggcaccagcttcccggacgacaccgcggtacagccctccttccaggtcggggtgccgctgagcaccacaccgagaagcaatgcctccgtcaacgtttcccacccggcccccggggactggttcgtggccgcccacctgcccccctcatcccagaagatcgagttgaagggcttggctcccacctgtgcctacgtcttccagcctgaactgctggtcacgcgggtggtcgagatttccatcatggagccggacgtgccccttcctcagaccctcctctcccatcccagctacctcaaggtctttgtccccgattacacgcgggagcttctgctggagctgcgggactgcgtgtccaatgggagcctgggctgccccgtgcgtctcaccgtgggcccggtcaccctgcctagcaacttccagaaggtgctcacctgcaccggtgccccctggccctgccgcctgctgctgccctcaccgccctgggaccggtggctgcaagtgacagctgagagcctggtggggcccctcgggacagtggctttcagtgctgtagctgccctcacagcttgcaggccacggagcgtgaccgtccagccccttctgcagagcagccaaaaccagagcttcaatgcctcctctggtctgctgtccccgagccccgaccaccaggacctgggcaggagtggcagggtggaccgcagccccttctgcctcacaaactacccagtcacgcgggaggacatggacgtggtgtcggtgcacttccagcccctggacagggtctcggtgagggtgtgttcggacacgccctccgtgatgcggctgcgcctgaaacaccggcatggacagcgggggttccctcaccatctccctgcgggccaacaagacagagatgcggaacgagaccgtcgtagtggcctgcgtgaatgcttgcctcgcccttcctttggctttaatactttcgctcaactgcaccacagccttcttccagggctaccctttgtctctgagcgcctgggtctcgcagggccaacctcatcatcccctacccagagacagacaactgggtacctctccctgcagctcatgtgccctgagaatgctgaggactgtgagcaggctgtgggtccacggtgggaggaccacctttgtacctggggtgccctgttttgaacggattgtggaccctatggccagtgcctccttgctccgcagacacagctacctgtatgccagctgcagctgcaaggcaggctggcgtgggtggagctgcacggacaacagcacagcccagacggtggcccagcagagggcggccacactgctgctcacgctcagcaacctcatgttcctgggcccccatcgccgtcttcagtgcggcgattcttcctggtggaggcctccgtctacgcctacaccatgttcttctccacgggatgtggggtgggagggcaggaccgcgctcatggagcctccccacagttctaccacgcctgcgaccagcccggggaggcggtgctgtgcatcctcagctacgacacgctgcagtactgcgacttcttgggctccggggcggccatctgggtcaccatcctgtgcatggcacggctcaagacagtcctgaaatacgtgctgtttcttctgggtacactggtcatcgccatgtccttgcagctggaaccgcaggggcatgtggaacatcttgggggccctgcctctttgccttcgtgaatcatggcctccatgtgggcttaccgctgcgggcaccggcgccagtgcttacccccacctcgtggcagcgctgggccttcttacctcctgcccggcgtctctatggcctctgtgggcatcggcatttacacctccatggatgactaccgacaaattattcttaaacccacagcatttggcacatcctgctggccggggagcgcaagccttggctcgtgccgccacctgaccagcccgccgagccctgggcctgctcgcagaaattcccctgccactatcagatctgcaagaacgatcgggaggaactgtacgcagtgacgtgacactggcctggggacagctgctgctctgatgacctcttcagccaggagctgtatcgagggggaggcgcctggtccagccctggacagattgatttccagctgaataaattggcctagataccctcttacttcctcctactgaggagagggccactccctccctcacacgcacctctcctcgccagctgcctgctcgctgctgagatccctctgcagatcccagctgctgtctgcagtggcccctggggcttggggcttggttactgggagaccacaggtgcctgtgcgagggtggggctgtgtgctctgctgggcctgtgggtggctagagatggggagaaggactccctatggttcctgtttccctgggcgaggctgtggttgagacccatgggcgcccaggagccctgagcccaccacttgggggccgggagctgtggactccgagacccctgctcctggcccctgtgtggccctgatgccagcctgcctggggactggaggatccccctctgctgctgtggtcaccatagggacgggagacggaggtttcccccagagctgatgggcactggggatgcaggctcccgccccgcccctccctttttcctgggctctggagccttgggtccctgagaagagcttccttggactggggtgctctgctgctctgggggtttggccccaaaaaggaaacccttacccagccctgtccacccaccccagcgttccctggggcccccctctgggaaccttccctcttggtcccccaggaaactgcggtggtgtcctgccccccctgcaactgggcctcctgtggcccctgtgggtgtttcaaggaaaactggaactgtcctctgctccctcaatgcaaaaccttgtgggggaaagcaaatgacccaggagcagcaccctggcccctccctgaggccctgtgagtgtcctcggatccgcccctggagaagtgagtggctgagacccgggtggggccctcctacccttggctctgggggctttcccttctgggtcttgtccgggatatggccttcctgaaggtcttacctcccccagccgccctgcacttgaccaccaaagcaatctctaagcttataaaggagaaacatgtatatatggggtttttttggagtaaaggaaaattctaagatattaagacatatttttatgtagatctgatctatctgtgtttggtgaatttaatattctacattgatttttcaaactaaaaaaaaaaaaaaaaa

SEQ ID NO: 4736 - DNA, 662 bp, Homo sapiens
  SIMILAR (297)..(175): 651254mologous to Homo sapiens Human secreted protein encoded by gene 22 clone HMSJW18,accession number AAY02671,Smith-Waterman Score=137.
aaatttttaattactagcttgggttgctaacaagcagttttaggctggctattggtatgtatgttttatatttttttacactacacttccacttttgcaaaatctcagactgaaaagtgagctttttgtttccccaaatatgaactaacaataaattttaaaaattttcagctgggagtggtgactcatgcgtgtaatcccagcattttgggaggcagaggcgggaggatcacttgagcccaggaggccaacttggccaacatggcaaaagccatgtcttttaaataaataaataattttttttaaagggtctgccccctgccctcaaacataaggtttatgtaaggtaagagagactcttatctcattttgtatattcctgtttcattttgttttccctggcagatagcaaactaatggacaacatttcatgggcagctatttaaagttgccagcctaaatcacctacactggcttaaatgacgtactccagctgatgtgtctgtcacttagggaagaatgagacagttactgccaaaaaggagttcatacgggagggtagggggatagaacaatattcagaaatgagttctttagtctgctggttgaatacttcgtccagttcttttgactgctatgatggtctgaattccggcacactc

SEQ ID NO: 4737 - DNA, 878 bp, Homo sapiens
  SIMILAR (599)..(655): 781254mologous to Homo sapiens HSPC141,accession number AF161490,Smith-Waterman Score=75.
  misc_feature (1)...(878): n = a,t,c or g
tgtgatacatttgaaggcgtcggaaancccaggcccacctgagcctgctgccctgacccgtggccccagctgagcacgcaggctttttggggttttcccagggtcggcggcagagccctccctccagggcccattgtgttcctgcattcccccatggagcacacgccagacctgaggggtgggacggacacccccaggcatggccggctgtctcctctccctgccttgggaggccttgctgggctctagctgtcctccagcactttgggccctgggcccccagaggcagtcagtacctgggtggagctcagagtccccacctgtgctcttcacaaaaaccaccagcagatgagacccacgtgcgtccctctgggcgcctcaggccccaggatccaccatcaaggtttgcttgcctgtggaggtcgcctctccccaggggagcccccaagggcggtcgggatggtgggtttggcatccccaggcactgcctatccctttcccacactcgcatttggtgtggctggtggctggatgcccaaaaccgggtatcgggttgaagggtccaggtagtgccagcaggggttttcttttctccaggcctatggtcctgcccagcacgccatttcaattgagaaaattcaaagccaagtaccccgactacgaggtcacctgggctaacgacggctactgagcactcccagcccggggcctgctgcctccagcagccacttcagagcccccgcctttgcctgcactcctcttgcagggctggccctgcctgctcctgcggcagcctctggtgacgtgctgtccaccaggccttggagacaggctagcctggccacagaattaaacgtgttgccacaaaaaaaaaaaaa

SEQ ID NO: 4738 - DNA, 1564 bp, Homo sapiens
  SIMILAR (568)..(852): 971254mologous to Homo sapiens Human histidine protein phosphatase,accession number AX035705,Smith-Waterman Score=494.
acgccacgcgccctgccgtaccttcgcctccagccgctgctgtctgggccctgcaggagctgggaaaaaccgcagggaggtcttcaggccgatatgcaagtctcccagccgaaggggcaggggacctgaacaggggaagcagagcacctgggcctggccagagctgacacctggctaggagaggaaggaccaagggacggggcgttcccaggtgggagcctggagggcaaagcgtggtgcgagcagcctcgcgggccgcctaactgccccgttccaagggtgccaccggaccccgctggagaggaacttctccgttggctgatatcatcaccacccattgccgattccacgtttcctttaagcggggctggcggagccgcaaggcggcaaggaactggattgcgattggtcagcacgtgcctcggtccgcggtacaattggctgaggcgctgggccttgggaagcattccccgacgggattggtcgtcgctctcgcagagcccgcctcccgcagtacaagcggcccccggttggggttgggaaggaggggattccgggagaagaaacatggcggtggcggacctcgttctcattcctgatgtggacatcgactccgactgcgtcttcaagtatgtgctgatccgagtccactcggctccccgctccggggctccggctgcagagagcaaggagatcgtgcgcggctacaagtgggctgagtaccatgcggacatctacgacaaagtgtcgggcgacatgcagaagcaaggctgcgactgtgagtgtctgggcggcgggcgcatctcccaccagagtcaggacaagaagattcacgtgtacggctattccatggtgagccgcagccccgtcccgccctgccggaggccccagtaccagcttcgaggcccacctgagcctgctgccctgacccgtggccccagctgagcacgcaggcttcctggggttctcccagggtcggcggcagagccctccctccagggcccattgtgttcctgcattcccccatggagcacacgccagacctgaggggtgggacggacacccccaggcatggccggctgtctcctctccctgccttgggaggccttgctgggctctagctgtcctccagcactttgggccctgggcccccagaggcagtcagtacctgggtggagctcagagtccccacctgtgctcttcacaaaaaccaccagcagatgagacccacgtgcgtccctctgggcgcctcaggcccccaggatccaccatcaaggcctatggtcctgcccagcacgccatttcaactgagaaaatcaaagccaagttcccccgactacgaggtcacctgggctaacgacggctactgagcactcccagcccggggcctgctgcctccagcagccacttcagagcccccgcctttgcctgcactcctactatgagggctgaccctgcctgctcctgcggcagcctctggtgacgtgctgtccaccaggccttggagacaggctagcctggccacagaattaaacgtgttgccacaccaaaaaaaaaaaaaaaa

SEQ ID NO: 4739 - DNA, 704 bp, Homo sapiens
  SIMILAR (66)..(428): 581254mologous to Homo sapiens Human histidine protein phosphatase,accession number AX035705,Smith-Waterman Score=282.
  misc_feature (1)...(704): n = a,t,c or g
aatccgagnccccntngttttgagnanccctagtccagngnggnggaattcccgggaggaggaacatggcggtggcggacctcgctctcattcctgatgtggacatcgactcccacggcgtcttcaagtatgtgctgatcccgagtccactcggcctccccgctccgggcatccggcctgcagagagcaaggagatcgtgcgcggctacaagtgggctgagtcaccatgcggacatctacgacaaaagtgtcggggcgacatgcagaaagcaagggctgcggactgtgagtgtctgggcngccgggccgcatctccccaccaagagtccaggacaagaaagattcacgtagtacggctaattccatgggcctatggtcctgcccaagaacgccaatttcaacttgagaaaatcaaaagccaagtacccccgacttacggaggtcaccttggggctaaaccgaccggctacttgagcactccccaagcccgggggccttgcttgcctccaagcaagccactttcaagaagcccccggccttttgcctgcaactccctcttgcagggctggccctggcttgctcctgcggcagccttctggggacgtgttgtcccccaggccttggagacaggtctagcctggccacagaattaaacgtgttgccacacctgaaaaaaaaaaaaaaaaaaaagatgcggccgcaag

SEQ ID NO: 4740 - DNA, 348 bp, Homo sapiens
  misc_feature (1)...(348): n = a,t,c or g
ncacactcagactcacacacttacatacagacacacaccagactcacacagttacacacacaccgagattcacacaccacatacaccacacacagaaacacagactcactgatacacatacgcacttcaactctccgttcacatcttatcttcctccgtcaatcacgaccgcagaatggaaacgctcccctgtgtgaattcagcccacactctcctgatgttttgcaaacgttgctccacctaacttccgtggttgtcaaaattccctccacctctcttctgatgtgtcggagctcaggaggcgcccaatgcagagagagcctggaccagcacgaaggtgtgggcccc

SEQ ID NO: 4741 - DNA, 736 bp, Homo sapiens
  SIMILAR (160)..(216): 571254mologous to Homo sapiens PRO1847,accession number AF119855,Smith-Waterman Score=60.
ttttttttgagatggagtctccctctgttgccaggctggagtgtaggggcaccaatcttggctcactgcaacctccacctccccagttcaagcaattcttctgcctcagcctcccgagtagctgggactacaggcgcacaccaccatgcccagctaatttttggattttttagtaaagacggggtttcaccaagttggccatgatggtctcaatctcttgacctagggctttttaaatttatttattttttcaaagaaacattgattctgtgcacacagtcttcaacaacaacaacaacaacaaaaagaaccactcgttcgtcacacagataaagagatgaacaaaacgtcgtctgtcaacacagcagaatatgatttggccataaaaagagacgaggtactgacacaggctacgacatggatgaagcttgaaaacatcaggctaaggggaaggagccagacgcaaaaggccacatattgattatatgaaatgctcagaagaggcacatctgcagagacagaaagtagaccactgttgccaggggccgggggatgacagaagggtgcagggtttctttttgagatgacggaaatgttctaaaatcgactgtggtgaagcctgcacttatctgtgaatatagtgaaaactatgaattctgcacttcaaatgtgtgaacggtatggcatgtgaattgcatctcagtaagaccatttaaaaatatatggctgggtgcgg

SEQ ID NO: 4742 - DNA, 932 bp, Homo sapiens
  SIMILAR (128)..(259): 751254mologous to Homo sapiens Human secreted protein, SEQ ID NO: 7870,accession number AAG03789,Smith-Waterman Score=174.
agtctcactctgttgcccaggctggagtgcagtggcacaatctcggctcattgcaacctccgcctcccgcgttcaagtgattctcttgcctcagcctcccaagtaactgatattacaggcgcccagccaccacaccccgctgatttttgtatttttagtagagacggggttttcccacgttggccgggctggtctcaaactcttgacctcaagtgaaccacccgcctgtgcctcccaaagtgctggaattaccagcgtgagcccaccatgccgggctcacacgtttgagttgataccattgtgcccattcctcttttggcctcttttttgtccatagaggcttcaagatagataggtaagagcccagtagtgttcataagaagcccaatagagagcaggagccactttatcaggtggcaggtgtcctgggcctccctgctggctagtcccaagcggtggtgttgccaggatgtcttggaggtgataatgggacacacagaggcactggagtctccataggttaaaatgcccaccaaaactgggcctttgcctaatatccctcattgactatttggcatttaatttatttattttcctgacatttctgcaagctttgtatttatatttccactttatagatgaggaaatttgaggctcttagaggtaaaatgacttgcccaggtcaaaccaggaagtggcagagacaagctttttaaataagaaaaaattaataaaatataatatgagagtaacttaaaatattaataaaccacaattttaaattaattaaccgtgataaccaacattaataaaagttaagataccaaaacactggtgtctaattctttcaactaacaacttgaattattttcccattttaaattaattaaccgtgataaccaacattaataaaagttaagataccaaaaaaa

SEQ ID NO: 4743 - DNA, 361 bp, Homo sapiens
  misc_feature (1)...(361): n = a,t,c or g
ccccagttaattcacctgnnnnnnnnnnnnnnnnnnnnnnnnnnnnnnnnnnnnnnnnnnnnnnnnnnnnnnnnnnnnnnnnnnnnnnnnnnnnnnnnnnnnnnnnnnnnnnnnnnnnnnnnnnnnnnnnnnnnnnnnnnnnnnnnnnnnnnnnnnnnnnnnnnnnnnnnnnnnnnnnnnnnnnnnnnnnnnnnnnnnnnnnnnnnnnnnnnnnnnnnnnnnnnnnnnnnnaaaaggatgcaaataaatagccagatggaaagataacacaaggcaagatctggaggagcttccgttcctgtggagttggggtgcaccactcgcccagcgcgtggatgagttctccttcactgtcctgtca

SEQ ID NO: 4744 - DNA, 820 bp, Homo sapiens
  SIMILAR (2)..(265): 761254mologous to Homo sapiens Human secreted protein, SEQ ID NO: 7870,accession number AAG03789,Smith-Waterman Score=339.
gagatggagtcttgctctgtcaccgaggctggagtgcagtggtgcgatcttggctcactgcaatctctgcctcctgggctcaagcgactctcccgcctcagcctcctgagtagctgggattacaggcatgtgccactacacccggccaactttcttatttttagtagagatggggttttgccacgttggccaggctggtctcgaactcctgaccccaagtcatccgcccgcctcggcctcccaaagtgctgggattacaggcatgagccactgcgcccggctggaaaggttcttttaagagttccacaaagtggccaaaagtttattcttgcattttatcatgcgtatgccttgggagttatgtttttgggaatatgacttaagaaaacaaacttttccaggtaacacgtaggccggttcccatctttctagcatctctgcctttggctgatgtgacgccatacgttcctgacagttaatgttggctctgtagggatctgatgccaagtacagtcatagctcagccatgacacagggccttcccagataggcccagattcagtgccccttccccaacagatgccctctcccatccccccacacctccccgactcccaccaaaatgaaagtggaagcacgtcttgagttgcccatttcttctgtgtctggtcaggcacacatcaagaatgttggctggtgatgggctcaaggcaggcacagcccgcttcactgtgcatgtgtgcaggcttgattgacactggcaaaatctgcaaggatatttctagacattcctcagaggaaccaatcacttggaatgtct

SEQ ID NO: 4745 - DNA, 617 bp, Homo sapiens
  misc_feature (1)...(617): n = a,t,c or g
ttttttcttttttcttttttccggcgttcaagatgtcaaaccgaggacgtggtgggtcccttctggtgccgaaaattcccggattttcccttgggtccttccggtaggttgctgtaatccaattggtgcttgacaaacaccaggagcccaaaaaccttgtatatccatctcccgtgaagggggaatcaaggggaccggcttgaccagacttccccgctgcttggtgtgggtgacatggtgatggcccacagttcaagaaaggcaaaccagagctcagaaaaaagggtacatcccagcagtgggtcatttcgacaaccgaaagttcattacccttaggaaaagatgggcgtgtttcttttattttttgaaggttaattgcagggagtcatagttgaaccatttaaaggccgagatggaaaggtttcttgccatttaccagggacccagttaggcaaagggagttttgcagactttgtggcccccgggatttgcatcccaatgccttggcagccattgcattgattctcccagtatattttgtaaaaaataaaaaaaaaaactaaacccattaaaaaaaaaaaaaaaaaaaaanaaaaaaaaatttcattacctctttt

SEQ ID NO: 4746 - DNA, 407 bp, Homo sapiens
  SIMILAR (128)..(286): 601254mologous to Homo sapiens Human myelin oligodendrocyte glycoprotein gene,accession number AAZ29204,Smith-Waterman Score= 160.
ttgacaggtctcactctgtcacccaggctggagtgcatgtgtgatctcagctcactgccacctccacctcccgggttaaagtgattcttgtgtctcagcttcctgagtagctgggattacaggtgcaccacctcatcagactaatttttatatttttattagagacggggtttcaccgtattgcccaggctggccttgaactcctagccttgggtgatcctcctgcctcaaactccaaaagtgctgagattacaggcatgaggcactgtgcctggccttagatttttttcctatagtgatggctatgctaagtatttcacaagtgtaattccatgaattcttttatttttttttttttgagacggagtctctctctgtcgcccaggctggtctcgaactccttacct

SEQ ID NO: 4747 - DNA, 470 bp, Homo sapiens
  SIMILAR (1)..(456): 331254mologous to Rattus sp. reverse transcriptase homolog,accession number S80119,Smith-Waterman Score=151.
ataataaggtcaaaaaacatctgataccttgaaataaatccaacaaagcataccaagaccttcagtaaaacccttactaagagaaatgaaagaagacctaaattaatggcaagagataaccatgttcattggattggaagtgtcagtattgtaaagatgtccgttctctctaaattgatacatacagaaattcagtgcaatcgcaataaatatcctcaaatagggctgttgctgctgccactgctgcttttttttcttttggataggctagttctcaaatttacatggaaaggcacagggccaagaatggcaaaggcaatcttgagaaaaagttggaagacttaacactaacatatatcaacacttattataaagctacagtgattaaattagtgggcgcaaagccagattgaccagtggcacaggatagagtccaaaagttgacctacacatacaaggtcagttgattt

SEQ ID NO: 4748 - DNA, 2588 bp, Homo sapiens
  SIMILAR (1808)..(1957): 371254mologous to Zea mays extensin-like protein,accession number AF159297,Smith-Waterman Score=76.
agtggtagaatgattccattagaggcaaaaagcatggtttagcaatatgtagattattaaaattatttgttctagcacaaactaaccttggatagtgtttggtcctagaaaaagtagacaagtaaaatctgagtcatgtttgggagagggaaacgggtcactatttgagatttccatctttagatcattcctttggctgactataaatctcccatttggtcttagagattactaaaacgcttcagagatcatgagttataatattcaaggactgaaataagcatttctcttttcagactcccaagaagagtcaccagaaatctctgagcttttctaaaactacaccaagaaggatctctcatacaccacaaactccgttgtatactccagaaaggctgcagaagtcccctgcaaaaatgacccctacaaagcaggcagcttttaaggagtccttaaaagactcctcctcacccggccatgactcaccattggattcaaaaatcactcctcaaaaacgacatacccaggcaggagaaggtacctctcttgaaacgaagacaccaagaactcctaagaggcaaggtactcagccgcctgggtttttgccaaactgtacttggccacattcagtgaattccagtccagaaagcccctcctgtccagcccctccaacttcatcgactgcccagcccaggagagagtgtctcactcccatcagagaccctctcagaacacctccgagagcagcagccttcatgggcacgcctcagaatcaaacacaccaacagccccatgtcctcagagctgctcgggcagaggaaccagcccagaaactaaaggataaagctatcaaaactccaaaaagaccagggaattcaactgtgacttcttccccacctgttacgccaaagaaactgtttacctctcctttatgtgatgtctccaagaagagtccatttaggaaatctaaaatagagtgtccttccccaggagaactggatcagaaagagccccagatgtcacccagcgtagctgcatctctctcctgccctgttccctcaactccccctgaactctcacagagagctacattggacaccgtccctcctccacccccttctaaagttgggaaacggtgtagaaagacctctgatcccagaaggaagcttcgtggagtgtcagcttgatgcctccgctactcctggggttggcacagctgacagcccagctgcccccacagactctagagatgaccagaagggactgagcctctctcctcagtctcctcctgaaagacggggctacccaggccctggtctcaggagtgattggcatgcatcctctcctctgctcattacaagtgacacagagcatgtcactctcctcagtgaagccgaacaccatggcattggtgacttgaaaagtaacgtcttatcagtggaagagggtgaggggctaaggacagcagatgctgagaagtcttctctgtctcaccctgggattcccccatctcctccttcctgtgggcctggctctcctctgatgccttcccgtgacgtgcactgtaccacagatgggagacagtgccaggcttcggcacaactagacaacctgccagcatcagcttggcattccacagactctgccagcccacagacctatgaggttgagctggagatgcaagcttctggccttcccaaacttcgaattaagaagatagaccccagctcttcattagaggctgagcccctcagcaaggaggagagctctctgggagaagagagcttcctccctgctctcagcatgcccagggccagcaggtccttaagcaaacctgaacccacctatgtgtcacccccctgcccccgcctctcccacagcacacctggcaagagcagggggcaaacctacatctgccaggcctgtacccccacccacggcccttctagtaccccctctccatttcaaacagatggggttccttggacaccatcccccaagcacagtgggaagacaactccagacataattaaagactggcccaggaggaagagggcggtgggctgtggcgccggctcctcttccgggaggggcgaggtcggtgcagaccttcctgggagcctgtcactgcttgagtcagagggcaaggaccacggccttgaactcagcatccacaggacgcccatcttggaggattttgagctcgagggagtgtgccagctcccagaccagtcgcctcccaggaacagcatgcctaaggccgaggaagcctcttcctggggacagtttgggttgagttccaggaagagagtcctgttggccaaggaagaagctgaccgtggagccaaaaggatctgtgacctgagagaagattcagaagttagtaagagtaaagaggggtctccaagttggagtgcatggcagctaccctccacgggagacgaagaggtgtttgtttccggctccaccccacctcccagctgtgccgtgcggagctccctctcctgccagtgccctccaggctctgacccagtctccgctgctgttccaggggaaaacaccttcctctcagagcaaagaccccagag

SEQ ID NO: 4749 - DNA, 928 bp, Homo sapiens
  SIMILAR (54)..(314): 561254mologous to Homo sapiens Human secreted protein, SEQ ID NO: 7870,accession number AAG03789,Smith-Waterman Score=194.
gttacctgaacaaatatttcaatagtaaatattgataaaccatttttttttagagtcttgctctgttgcccaggctgcagtgcagtggcacaatctcagctcactgcaacctccacctcctgggttcaagtgattctcgtacctcagcttcctgagtagctgagactataagcatgcgcccaccacgcccggcaaatttttgtatttttagtagagacgcctgtttcacccatgttggccagctggtctcaaactcctgacctcaagtgatcccaaccgcctcagcctcccaaagtgctgggattataggtgtgagccactgtgcccagccgataagcattaattattaataatggcttacaaaactgtaccttttataaaggtgtgaaataaagaatcaattgagggtcccaaacatttaagtggaaacccagtttgctcacttagccacaaggcatacatgtgccttgtctcactggaacagctgccaccaattcaagttggaagatactaggttcccggcaatgacatatctccaaagttaggaacatggccctttctccagaacatacttttccttctgccctggttcctacctgtaatgacttacaaataaccgcctctccctatgctgtccttctctgactttgaaagtcagttcatcttaataactttggcccatgggtcacccaaaggatatatatggcttgaggtcccaggctagggaaaggttaacaaccagtagtcagcaaagaccggtctaggaacataactgagcattccaagagattgaaaagttttcaacattcatagacatcttcagaagctgttgaagttttcttggatttgctctaaacatatggtaataattttcaatgtaaataagagatctataaaaggcatttatatcttgccttttcctcgtgcc

SEQ ID NO: 4750 - DNA, 837 bp, Homo sapiens
  SIMILAR (220)..(834): 1001254mologous to Homo sapiens ribosomal protein S6 kinase 1,accession number L07597,Smith-Waterman Score=1075.
atggtctccatctcccgacctcgtgatccacccgcctcggcctcccaaagtgctgggattacaggccctgcactgggtgctgaaggtgaacgggcattccacagacatagggttatgatcgttaccgaaggagcccctggtggcctgagctcagggcacctgagggatgcaatggacagtgaggctggaacagatgatggctgtgcctcccatgttagggttgtgcacagggacctgaagcccagcaacatcctgtatgtggacgagtccgggaatcccgagtgcctgcgcatctgtgactttggttttgccaaacagctgcgggctgagaatgggctcctcatgacaccttgctacacagccaactttgtggcgcctgaggtgctgaagcgccagggctacgatgaaggctgcgacatctggagcctgggcattctgctgtacaccatgctggcaggatatactccatttgccaacggtcccagtgacacaccagaggaaatcctaacccggatcggcagtgggaagtttaccctcagtgggggaaattggaacacagtttcagagacagccaaggacctggtgtccaagatgctacacgtggatccccaccagcgcctcacagctaagcaggttctgcagcatccatgggtcacccagaaagacaagcttccccaaagccagctgtcccaccaggacctacagcttgtgaagggagccatggctgccacgtactccgcactcaacagctccaagcccaccccccagctgaagcccatcgagtcatccatcctggcccagcggcgagtgaggaagttgccatccaccaccctgtga

SEQ ID NO: 4751 - DNA, 697 bp, Homo sapiens
  SIMILAR (22)..(306): 541254mologous to Homo sapiens Human myelin oligodendrocyte glycoprotein gene,accession number AAZ29204,Smith-Waterman Score= 238.
  misc_feature (1)...(697): n = a,t,c or g
gagacggatctcgctctgtctgccaggctggagtgcagtgggcacgatcttggctcaccgcaagctccgcctcccaggttcacgccattctcctgcctcagcctcccaagtaggtgggactacaggcgcccgcaccacacctggctaattttttgtatttttagtagagacggggtttcaccgtgttagccaggatggtctcgatctcctgacctcgtgatccacccgccttggcctcccaaagtgctgggattacaggcgtgacgaccgcacccagccttcttttttttcttttgtaaaaacaaaacagaaaagatgcaagggtgacacagaaagttctcatgtacccatcactcagtaaagagataaattccccaggaatggaacagaatgtggcacccaagaatctgctgctcaggagagtccccagagctgtctccactgtgggaggatgggatggtgacggagatagaagagtccctgccttgtggcgggggaagagagattgcaaaacggtgagcaaagaaataaacacgttccacctccataggaaaacacagggggaaggggagaaattctgaccccccggggtcancgtggaagtgtcttggagacatttctggttgttgcaaccagtgtggggtgggagtgctactggtatctaagttggggggaagccagggattgcnagtaaacc

SEQ ID NO: 4752 - DNA, 483 bp, Homo sapiens
  SIMILAR (15)..(263): 851254mologous to Homo sapiens Secreted protein encoded by gene 94 clone HPMBQ32,accession number AAW88627,Smith-Waterman Score=384.
acatcgatacgactttttttttttttttttttttttttttttttgagacagagtctctctctgtcacccaggctggagtgcagtggcgcgatcttggctcactacaagctccgcctcccgggttcacgccattctcctgcctcagcctcccgagtagctgggactacaggcgcccgccaccacgcccggctgattttttgtattttttagtagagatgggatttcaccatgttagccaggatggtctcgatctcctgacctcgtgatcaggcccgcctcggcctcccaaaagtgctgggattacaggcgtgaactttccatcttttaaacatgtgtattaatggagctatctcctctctccaaaccccaccactggcccttcccttacccttctattttctcaaatttgtacccactccctgaccccctttgtttaggtgtgagccacaaatcctaagtaaagataaactttaccaactgggg

SEQ ID NO: 4753 - DNA, 792 bp, Homo sapiens
  SIMILAR (302)..(487): 381254mologous to Homo sapiens tRNA-guanine transglycosylase,accession number AF302784,Smith-Waterman Score=80.
atggcgccgcccacgtgtggtacggcccacgtggttccgacagtcaagatggcgggagcagctcccaggcttccctggagtcggccccacggatcatgcggctggtggccgatgcagccgctccagggcccgggcaggcgagctgtggctgccgcatgggaagtggccactcctgtgttcatgccagtgggcacgcaggccaccatgaaggcatcacgaccgaacagctggacgctctgggttgccgcatctgcctgggaatacctaccatctgggtctaaggccggtgggacagcggcgtttccagatggtgtcgctggtgtctctgtccgaggtgacggaggagggctccgcttccgctccccctacgacggcaatgagaccctgctgagcccggaaaatccgtgcagatccagaatgcgctgggcccctggggttgtgactggggccctgttgcaggtcaatccgctggctggaccggtgcatgcagcccatcagcggccggacaagcagaacctcttcgccattatccaggtgggctggacgcagatctccgggccacctgccttgaagcgctttggctctgcctggcacagccgcgccttcctcacgcactgctgcacagtgacaacacggccgcgctgcaccacctcacggccacaacatcgcctaccagctgagctcatgagcgccgtccgcaccagcatcgtggagaagcgcttcccggattcgtgcgggacttcatgggcgccatgtacggggatcccaccctctgtccacctgggccactga

SEQ ID NO: 4754 - DNA, 848 bp, Homo sapiens
  SIMILAR (610)..(813): 581254mologous to Homo sapiens Human secreted protein, SEQ ID NO: 4718,accession number AAG00637,Smith-Waterman Score=203.
acgaggcgcatggaggctgacaggacagtgaaggagaactcatccacgcgctgggcgagtggtgcaccccaactccacaggaacggaagctcctccagatcttgccttgtgttatctttccatctggctatttatttgcatcctttttaaatgtaagtaagtgcttccatgagttccgtgagctcctccagcaaattaatcaacccccgaagagggtggggtccatggtaaaccccccaacttgaaagcccagctggtccagaacattcctggaagcccccagactcgtgacctggtgggaaaggagggaagccagttcctgtggaacctgaattccctcaaccctgtgggttttctggaggctattttccagggtaggatgggtgtttcacagtttgaatttaacttgggtgggacacccggctgtgtcccacttgcagaactaattgcttaattgggtgttttggggaagaaacccttacatatttttttcacagaaagtcttctgtattattatggtgtaagagaacaggaaaaatgcatgttgactgttttttccacactcccagtccacaaaagttttctccacttatgaacaaataatgtgtgtgtgtgtttttttgtttttttgtttttttgtttttcctgagacagggtctcactctgtcatccaggctggggtgcagtggtgtgatcatggctcactgcagcttcaatctcccaggtccaagtgatccttctacctcagcctcccaagtagctgggaccacaggtgtgtgccaccatgcccagttaatttttaaattttttgtagagcctgggcaacataccgagatcccctctttagg

SEQ ID NO: 4755 - DNA, 1127 bp, Homo sapiens
  SIMILAR (473)..(811): 981254mologous to Homo sapiens tRNA-guanine transglycosylase,accession number AF302783,Smith-Waterman Score= 577.
cgacagtcaagatggcgggagcagctacccaggcttccctggagtcggccccacggatcatgcggctggtggccgaatgcagccgctccagggcccgggcaggcgagctgtggctgccgcatgggacagtggccactcctgtgttcatgccagtgggcacgcaggccaccatgaagggcatcacgtttcgaatttttggacgctctgggttgccgcatctgcctgggcaatacctaccatctgggtctaaggccgggacccgagctgatccagaaagccaacggtctccacggcttcatgaattggcctcataatctgctaacggacagcggcggtttccagatggtgtcgctggtgtctctgtccgaggtgacggaggagggcgtccgcttccgctccccctacgacggcaatgagaccctgctgagcccggagaaatccgtgcagatccagaatgcgctgggctcggacaatcatcatgcagctggacgacgtggttagcagtactgtgactgggccacgtgtggaggaggccatgtacaggtcaatccgctggctggaccggtgcattgcagcccatcagcggccggacaagcagaacctcttcgccattatccagggtgggctggacgcagatctccgggccacctgccttgaagagatgaccaagcgagacgtgcctggcttcgccatcgggggcctgagcgggggtgagagcaagtcgcagttctggcggatggtggcgctgagcacctctcggctgccgaaggacaagccccgatatctgatgggggttgggtatgttgtggatagggaagccagagccctacctgtgggaagtggattcctggggaccccctaccctgcttggggagggggcatttgggggaaacggacacaggtctgatctgaggagactaggaagacatggctgtcccttgggggccattctgagggaatatggcccagtctggggcagtgtgagggttgggaggggccctgggaagcccctgaggttctctgccccctcccgtcatggctgcaaccccagctatgccactgatctggtagtctgcgtggctcttggatgtgacatgttcgactgcgtcttccccacacggacagcg

SEQ ID NO: 4756 - DNA, 791 bp, Homo sapiens
  SIMILAR (8)..(496): 451254mologous to Homo sapiens tRNA-guanine transglycosylase,accession number AF302783,Smith-Waterman Score= 220.
  misc_feature (1)...(791): n = a,t,c or g
tcccgcttgtatagcggccggactgcagaacctcttcgccattatccagggtgggctggacgcagatctccgggccacctggccttgaagagatgaccaagcgagaaacgtgcctggcttcgccattcggggggccttgagcggggagtgagagcaaagtcgcgagttctggcaggatggttggcagctgagcacactctcggctagccgaaggacaagccccgatatctgatgggggttggctatgccactgatctggtagtctgcgtggctcttggatgtgacatgttcgactgcgtcttccccacacggacagcgcgctttggctctgccctggtgcccactggggaacctgcagttgaggaagaaggtgtttgagaaggacttcggccccataagacccggagtgcaccttcccccacgtcccaaaagcaccagccngggccttcctgcacgcaactgctgcacagtgacaacacgggccgcgctgcaccaccctcacggtccacaaccatcgcctaccagctgcagctcatgagcgccgtccgcaccagcatcgtggagaagcgcttcccggacttcgtgcgggacttcatgggccccatgtacggggatcccaccctctgtcccacctgggccactgacgctctggcctctgtgggaatcacactgggctgacctggcatttgggagagggagggagaaaaaaagggagggaggggctggaagatactgaaggattcctttttgaaaggtttttttttattgtaacttaaaaaaaaaaaaaaaaa

SEQ ID NO: 4757 - DNA, 691 bp, Homo sapiens
  SIMILAR (6)..(101): 651254mologous to Homo sapiens Human secreted protein, SEQ ID NO: 6953,accession number AAG02872,Smith-Waterman Score=97.
ggctggagtgcagtggcctgatctcagctcactgcaacctctgcctcctggtttcaagcgattcttccacctcggcctcccaagtagctgggattacaggtgcatgaggcaccacgcccagctaattttttaaatatttttagtagagatggcattttgccatgttggccaggctggtcttgaactcctgggctcaagtgatactcctgtcttggccttccaaagtgggattacaggggagagtcacctagcctggccagtcttcaacttttaaaatggtagttttaatgtattctcattaagagtaataaatgaacatctggcactgcatttgtaattttgttttatatgtttctttgctatctccttgattttctgtcttttgctatacggactgttttctttacttcaattatatattttatttattagtgatttctgttacatttttaataagcatacttcaacctattttactgtcaatgtcaaaatgaaataatatcaatgaatagagctcacaatggattagaaatttagtatgctttgaagtactaattaaaattatatttctcgtatgtagtgccaaatgcagagaattacgtatttcctagactggctgttgagatgtaaaatgataatgctggatggataaatacctggctgtaccatcacaggtgttcgaataattgcc

SEQ ID NO: 4758 - DNA, 620 bp, Homo sapiens
  SIMILAR (244)..(369): 341254mologous to Mus musculus Pro-Pol-dUTPase polyprotein,accession number Y12713,Smith-Waterman Score=64.
cttcatttatcaaatttatccaagacaagaaatcgaaatagcctatattcactaatattatcaaaatcctcccaaaaaaaaactcgcagccagctgtgggctctccccagttttacaggtccttaaatccctcaagggagaagtgcttcctttgggggagacacaacattatttcccactgaacagagagctgagactgttaactcagcacttcttgctcctcatgccacttagccaaagactagtaaggcaggtactataatagctaggctgattgatcccgattatcaaggaagaaccaagtttaaaatacgcaatgggaaaaaaatactcaatggaagaaggaaagaaattgcgtggaacgtaggattttctattacacttgtttattatggaaagttatcgggatattagagcaaagcaatatggccatttattggtacatacaccccagaatgaaggtttaggcctccccaccaggcaaagaacaaagaccatttgaggtgactcctgagggccaaaggaacatggaatggctagaggaagaaagaaatggcagatgcctgccatgatcacatgaaaggtacagaaaatgagatctgcaatagttaggcagatat

SEQ ID NO: 4759 - DNA, 1087 bp, Homo sapiens
  SIMILAR (2)..(1084): 981254mologous to Mus musculus mSin3A,accession number U22394,Smith-Waterman Score=1855.
agccgaacggcaaattgaagaagaaaaccgagagagagaatgggaacgggaagtgctgggcataaagcgagacaagagtgacagccctgccattcagctacgtctcaaagaacctatggatgttgatgtagaagattattacccagctttcctggacatggtgcggagcctgctggatggcaacatagactcatcacagtatgaagattcactgagagagatgttcaccattcatgcctacattgcctttaccatggacaaactgatccagagcattgtcagacagctgcagcatatcgtgagtgatgagatctgtgtgcaggtgactgacctttacctggcagaaaataataatggggccaccggaggccagctgaacacacagaactcaaggagcctcctggagtcaacgtatcagcggaaagctgagcagctaatgtcagatgagaattgctttaagcttatgtttattcagagccaaggccaggtccagctgactattgagcttctggacacagaagaggagaattcggatgaccctgtggaagcagagcgctggtcagactacgtggagcgatacatgaattcagatactacctcgcctgagcttcgtgaacatctagcacagaaaccagtatttctccccaggaatctacggcggatccggaagtgtcaacgtggtcgagagcagcaggaaaaggaagggaaggaaggaaacagcaagaagaccatggagaatgtggatagtctggataagctggagtgtagattcaagctgaattcctacaagatggtgtatgtgatcaaatcagaggactatatgtatcggaggaccgccctgctccgggctcatcagtcccatgagcgtgtaagcaagcgtctacatcagagattccaggcctgggtagataaatggaccaaggagcatgtgccccgtgaaatggcagcagagaccagcaagtggctcatgggtgaggggctggagggcctggtgccctgtaccaccacctgtgatacagagaccctgcattttgtgagcattaacaagtatcgtgtcaaatacggcacagtattcaaagccccttaa

SEQ ID NO: 4760 - DNA, 938 bp, Homo sapiens
tttttttttttttttttaagcgatgtcagaaatctagattgtaatgtgaaggaaactttcacacatttgccactataaattttgttctttaacaaaatgctctgtagggaaatgaaacttgtcagtgagccagcttctacctgtttatgacttctcataaccttagcacctcagaaacttagcagtattgctggctaacagaatttttaatccgtgttccaatacctactaacaatcatgtctttataggaaagggacttttttgatcttgaaatttatgaattcggggggcattgtaatcataggaatttactaggaggtgcccaatgcattaggagctgtttttgtgatttccttccacctgtattttgtgtttgccatcttagcgctggtcagactacgtggagcgatacatgaattcagatactacctcgcctgagcttcgtgaacatctagcaccagaaaccagtatttctcccccaaggtgagtgagccatgtcaatctgtcagcaagtccatactgtgcatgattgaggaatggagagttaaatgactttcacggttcttggccttcacatattttattcatttgttctatcttgctggggatgcttaattcaaggttttatatggctgtcacaacatgagcttaccttggagcatgtgtcaaagcatctgggaggtgagagttgtagagaatcaacaataacctccgtactttggatgggaatgtgtgtcagagtctccatggttcgatggaagaggactcacaggactctgcatatagtcagactgatttagtacagcgagaagatgcaaagcagaatcagcaaagcgaaaaggtgcctgtggcaaagctggaggaagccaggctcaagcttcctagaatcctctcccagtggagtcacacaggacactcttaattcttccctcgtgcc

SEQ ID NO: 4761 - DNA, 408 bp, Homo sapiens
  SIMILAR (126)..(64): 711254mologous to Homo sapiens Human secreted protein, SEQ ID NO: 6613,accession number AAG02532,Smith-Waterman Score=86.
gtatttttagtagaaacggggtttcgccatcttggccaggctggctctgaactcctaaccttgtgatccacctgcctcagcctcccagagtgttgggattacaggcgagagccactgtgcccggccaggaacgatattaatgaaacatcgtgggcaactctgtacataaactattgataggagagtgaggaacttagttggatagagtttagccaagtaatgaaaaagagggttttaaaattggaatacgctctattgtgtgtagggcttgaaagtaaaacagggggcttgatgggcatagcagattacaaaaccattgtgggatttcctcaacggaggatgttgacaaatgtgggcattaatgagctctgaagtgggataacaacaaattctttttatttatttatt

SEQ ID NO: 4762 - DNA, 514 bp, Homo sapiens
  SIMILAR (2)..(160): 711254mologous to Homo sapiens Human myelin oligodendrocyte glycoprotein gene,accession number AAZ29204,Smith-Waterman Score= 207.
ttttttgagatggagtttcactcttgttgcccaggctggaatccaatggtgcggtgtcagttcactgcaacctctgcctcccgggttcaagcaattcttctgcctcagcctcccaagcagctgggactataggtgcccaccaccatgcccgactaacttttgtacttttagtagagatggggtttcaccatgttggtcaggctggtcttgaactcctgacctcaggtgatctgcctgcctcggcctcccaaagtgctgggattacaggcataagtcatcgcgccaggccaggcactttatttttttaggcagttaatgggggaggcaaccaggttttcctgtttctgcgggttctcaatggcctttagttaaccttaatcttaatgcctgtcaaaccacaaaattaaaccagttttagagatctttgaagatatttttggtttttttcatgagtgagagtcgctctgtggcccaggctggagcacagtgatgcaatcatagctcactgcagcct

SEQ ID NO: 4763 - DNA, 340 bp, Homo sapiens
  SIMILAR (244)..(288): 931254mologous to Homo sapiens Human 5' EST secreted protein SEQ ID NO:536,accession number AAY12505,Smith-Waterman Score=71.
tttcgtcctcagtcctgctgatgtcctccagctgattccaggctgttcccggccacccctgaggccgtcctttcgcttcttgtaaaagcctccccgcctcctgagctccctcggtcgcctcccgagaagccaacgggcctctctggtggagcgctaggttgacagcgttttagcagggccgcgagaaaccggggagatcctcttacgaggaaaaactccaagattacatccctgttatctttcctccaagagctgactaaggctttggaacagaaaccagatgatgcacatatattatcgtcaaagagcttattgtcacattcttcttgggaattactgt

SEQ ID NO: 4764 - DNA, 683 bp, Homo sapiens
gcggccgccgcctgcccccgcccccggcccccagggaccatggccccaaggaccctatccttaggccgagtccccgccagcgcgctcgcggacgccgcacgcctcccaactccctcggtgcggcccccgccccacggcagacccttcctccgcgccgtcgcgacgcctccggcccacgtcacgctcgcgccattgtttcccagccgccggctcgctgggaccccgcctcagcctcccagcgcggacgttcgccgcgttccgcccttttccccactttcctcacgctggtggtagccctttcctcagtcctgctgacgtcctccagctgattccaggctgttcccggccacccctgaggccgtcttttcgcttcttgtaaaagcctgcccgcccccagagctcctcggtcgcctcccgagaagccaaggggcctctggtggagcgccaggttgacagcgttttagcaggaccgcgagaaacggccagctcgtttgccacacgcccgtgtgcaacacttcctggaaaggtcacagcgaattgcaagccgccacaaaaaacatccggacagctcctggtcagggggctgagccgttcagtggcggcctattcttctccttttttcggggctcctgaaatcggagagggcgagatgccgatctgaggcctgaacccttagtttaaga

SEQ ID NO: 4765 - DNA, 375 bp, Homo sapiens
  SIMILAR (214)..(375): 1001254mologous to Escherichia coli helicase IV,accession number J04726,Smith-Waterman Score=289.
cgagtatgcggattttttccgccaggtcgagtcttcaccgctgaatccggcgcaggcccgggcagtcgttaatggcgagcattctctgttagtgctggcaggtgcaggaagcggaaaaacgtcggtgctggtggcccgtgcaggctggttgctggcgcgtggtgaagcgtcccctgagcaaattttattgctggcgtttggtcgcaaagccggtttcatgcgctggcgctgcatattattcagcagggcagcaaaaaagttccgatagtcagcaaactggaaaatgataccgctgcccgtcatgaactctttattgctgagtggcgcaagcaatgcagcgaaaagaaagcgcaggcgaagggctggcggcaatgg

SEQ ID NO: 4766 - DNA, 377 bp, Homo sapiens
  misc_feature (1)...(377): n = a,t,c or g
gctttaatcatcacctccatgaaaatgacttctaatttccttctttttagttcaggaatattctcttccacattccagatccatttagatgtaccattggaacttcaaactcaaaatacagtcatgggttgcttaatgaggatacatccttagacatgcgtctttggatgactttatagttgtgggaatatcgnnnnnnnnnnnnnnnnnnnnnnnnnnnnnnnnnnnnnnnnnnnnnnnnnnnnnnnnnnnnnnnnnnnnnnnnnnnnnnnnnnnnnnnnnnnnnnnnnnnnnnnnnnnnnnnnnnnnnnnnnnnntctaaaatannnnnnnnnnnnnnnnnnnnnnnnnnnnnnnnnnnnnnnnnnnnnnnnnnn

SEQ ID NO: 4767 - DNA, 760 bp, Homo sapiens
  SIMILAR (151)..(195): 661254mologous to Homo sapiens Human secreted protein, SEQ ID NO: 7871,accession number AAG03790,Smith-Waterman Score=55.
tgagacaaagtcttgctctgttgcctaggctggagtgcagcggcgcaatcatggctcaatgtagcgtcaaccccctgggctcaagcaatcctcccatttcagcatcacgagtatttgggacacaggcatatgccaccgtacccatctaatttttctattttttgtagagacaggatctcattatgttgcccagggcagttcttgaactcctgaggctcaagtaatccggctgcatcagcctcctaaattgggttttcttttacatctttcaactatttctctgtttcctccttgtttgttattgaagggtttctttacaactctattgattcgtctagactttttttttgcaatctcacctattgaacaaaggcttttaattcatcacctcccatgaaaatgacttcctaatttccttctttttagttccaggaatattctcttcccacattccagatccatttagatgtaccattggaacttcaaactcaaaatacagtcatgggttgcttaatgaggatacatcctttagacatgcgtctttggatgactttatagttgtgggaatatcggtgtactcacacaaacctaaatggtatggcttgctacacacctatgctatgtgatacagcctattgctcctgggctacaaacctgtacagcatgttactgtactaaatactgtaggcaaactgtatctaaaatatacagcaaaaatacagtataaaacattaaaaatggcacacctgtataaggcaaa

SEQ ID NO: 4768 - DNA, 1342 bp, Homo sapiens
tttttttttttttttttggtctgagaatgatggacatttagacactggcgccaggtttgcgcctgaccggcgccacacaggggttgggcggacgaaagacacacaggtgggctacaggtgtcacacggcaccagccagggcccggggtggctggggtgaggatgggtgtttggccagttgaccaggagtcagggtcaagtccaggtggtcagtgccaggggctccaggcaggggagggcagtgccataacccttctgggtttccaacgtaaccaggcggtcgtcacagaaagcaacctcggcccggggcccgggtcctgcaagcaggtgggcagggtcaagcttttcttccattggcgggttggcatttgtctgggcccggatactggctctcgaccccttgggcatgcaaaggcttaggggtggtgctgtcagtcacaccgttgccaccaaggtccccttgggtcggctgaggcttgggatccaggcagcggtggaaggtcgggctgctcaaggccggtatctaagcttctgccctgggacccagtggtgatggccgccatctgccccgattcccacagggacctagtcagaggtcgcacacacaaaaggggtacctggccctggagaaccaccagctgcccggggtctgagaacactcaccctggccgttgggccaggcctgccaggctcccggctggtccaacaccctaaacggtacagagcgctgcaggccctcacctcatgcttttgcagcgcttgagggtgaaggtgtctccaaggggacgctggccagatgcatggagaggccggccaatcttagggccacagaccccccctggacagcagagggtgttggctcctgcagtgggcccgagatactaaggcacgaagctaacctaagcccagtggggtggggcggggcaggacaggcttggagagctgcgccccaggcctgcaaagcacagtgaccgagcaatggcgacggtctgtctgggacaattcggcacaggatggaggtgcggggtgagccggagtgcccatggctcttgctggaaggggctccatgccctggccgcctctataaaggcctgcggagagcggggagagccctggatgcggctggcacagcagcgcaagcccaggggccaatccggggccagagtctgggagtctgacgcccggctggaaagggcgtgtgatgatgccaaagtgccggagccgtcgccggcaggtcctcctccgcggggatcttaaggaggcagcaggaatgaggagaggagagcgggcggaggacctgggagctcaggcgccctcaggcaggtggcgcgggccctcgtgcc

SEQ ID NO: 4769 - DNA, 837 bp, Homo sapiens; identical to SEQ ID NO: 4750
  SIMILAR (220)..(834): 1001254mologous to Homo sapiens ribosomal protein S6 kinase 1,accession number L07597,Smith-Waterman Score=1075.

SEQ ID NO: 4770 - DNA, 1268 bp, Homo sapiens; identical to SEQ ID NO: 1661
  SIMILAR (558)..(334): 901254mologous to Homo sapiens glucose transporter-like protein,accession number M20681,Smith-Waterman Score=359.

SEQ ID NO: 4771 - DNA, 963 bp, Homo sapiens
  SIMILAR (96)..(629): 431254mologous to Homo sapiens neuronal thread protein AD7c- NTP,accession number AF010144,Smith-Waterman Score=308.
tcgatacgacttttttttttttttttttttttttttttttgtgacggagtctcgctctggctgactgcagagtcaagctggagtgcagttgcgtgatctcggctcactgcaagctccgcctcccaggttcacgccattctcctgcctcagcctctccgagtagctgggactacaggcgcccgccaccacgcccggctaatttttttttgtatttttatagtagagacggggtttcaccgtgttagccaggatggtctcgatctcctgacctcgtcatctgcccgccttggcctcccaaagggctggggattacaggcttgagccactgcacccggcttttttttttttaatggatggaatctccttctgtcacccaggctggaatacagtggcacgatcttggctcattgcaaccgatgcctccccagttcaggtgattttcctggctcagcctcccgagtagctgggactacaggcgcccgccaccacgcccggctgattttttgtacttttagtagagacggggtttcaccgtgttagccaggatggtctcgatctcctgacctcgtgatccacccgccttggcctcccaaagtgctgggattacaggcgtgagccactgcacccggccaagaacattatttttaaagaagtgttaactttgaggacatatctgttccctggagatatttgggcttgaatcaggagtttgtcctacaggtgtcgcccttgatctcaggatgctaccagggctttgttctcgggatcctcgcacctggagagtgaagacgggcatgacggcaggtgaaggggtttgctgtgaaggaagaggagataaggcatttccaggaaatgggaaactgcctcctcctacacatggggcctgtgctcagaatgggcttagttcttataggatggatgctcagtattccttaataaagtagagttccattcttaaaaaaa

SEQ ID NO: 4772 - DNA, 520 bp, Homo sapiens
  SIMILAR (162)..(109): 771254mologous to Homo sapiens Human myelin oligodendrocyte glycoprotein gene,accession number AAZ29204,Smith-Waterman Score= 67.
tattcagaaattgtcatatgtctggctgatgttttttatttttagcggaaatgaggtcttgctatgttgccaaggctggtcttgaactcctgagctcaagcgagccttctgccttggccttccaaagggctgggattagagggctgagccaccacacttggccaaccatattttattttttatatttttattttatttgatccttgttctgaaaccataaagtgagtttaacatttctggctgggcacagtggctcatgcctgtagttctagcactttgggagaccaaggcaggaggatgccttgagcccaggagtttgagaccatcctggacaacataatgagaaaagaaaatacaaaaattaaggggtgtggtgacacatggcctgtagtctcaactatttggggaggctgaaggcgggaggactgcttgggcccgggaggttgaggctacagtgagcccatgtttacgccattgcagtccagcctgggcgacagagtgaaaccctgtctcaaaaaaa

SEQ ID NO: 4773 - DNA, 582 bp, Homo sapiens
  SIMILAR (200)..(334): 751254mologous to Homo sapiens PRO1722,accession number AF119851,Smith-Waterman Score=165.
gagagagactcgagtttttttttttttttttttttttttttttttttttttttgaggagtttcgctcttgttggctaggctggagtaaaatggggcgatctcggctcactgcacctccgcctcccaggttcaagcgattttcctgcctcagcctcccgagtagctggggttacaggcatgcaccaccatgcctggctaattttctgtatttttagtaaagacggggtttctccatgttggtcaggctggtcttgaactcctgacctcaggtgatctgcccgtctcggcctcccaaagtgctgggattaccggcatgagccactgcgcctggccgacaaaggctttgatatcaaaatgaactgtcaagggaggtgctggagagggattaacctgtgctgcctgggaccctcagggtcttaggttggggagtgtgaataggagtttgcagatggagaataggaagggcattccaggcagagggaaaacctgtgcagagaccaagaggtgtggaaggaaaagtggggttggggctgggtggtctggattatggcctggatgcaataaagtactgtgacagtagcc

SEQ ID NO: 4774 - DNA, 564 bp, Homo sapiens; identical to SEQ ID NO: 951
  SIMILAR (2)..(250): 911254mologous to Homo sapiens clathrin light-chain a,accession number M20471,Smith-Waterman Score=385.

SEQ ID NO: 4775 - DNA, 3451 bp, Homo sapiens
  SIMILAR (572)..(616): 931254mologous to Homo sapiens clathrin light-chain a,accession number M20471,Smith-Waterman Score=76.
gccaccgctgtggtgtcggtgggtcggttggtttttgtctcaccgttggtgtccgtgccgttcagttgcccgccatggctgagctggatccgttcggcgcccctgccggcgcccctggcggtcccgcgctggggaacggagtggccggcgccggcgaagaagacccggctgcggccttcttggcgcagcaagagagcgagattgcgggcatcgagaacgacgaggccttcgccatcctggacggcggcgcccccgggccccagccgcacggcgagccgccggggggtccggatgctgttgatggagtaatgaatggtgaatactacccaggaaagtaatggtccaacagacagttatgcagctatttcacaagtggatcgattgcagtcagagcctgaaagtatccgtaaatggagagaagaacaaatggaacgcttggaagcccttgatgccaattctcggaagcaagaagcagagtggaaagaaaaggcaataaatgagctagaagaatggtatgcaagacaggacgagcagctacagaatacaaaagcaaacaacagggtggcagatgaaagctttctacaaacaacccttcgctgacgtgattggttatgtgtatgttgcaaaactaattcctttttctacatctgattctttctacttttgtttagagttaatgctccttttatgtcacaagttgctttgctttttaaattatttcaaattggcactttgggggctgcctaagaattgataagcggggtatgatctgttgatgaatcttccagatttgtgactccctgcatcctctgatggccatttttcatatttggggttttggagggaagaaagctaactcgctttcaaaatgtgtcatttgcgatcttatctgggaacggtttgaggctcgggggaactctgctctcttgctcttggctgccatcactgctgccatgccctgttgcctgcctgcctcaggtgggaaggaggtttccccacctgggagcaggtggcagtcccaggtggttaggagccagtgagcagcagcaccttgcattgccaaaatcagagctgtggggcagcatttttccatacttggttcattcaaacaatgtggggtcgtttgcctctccctcaggcagaagagtccagagcagagggggttgtctccagtgggtgtctataattgttcctctgtggtcttgcatgtcagaaattgctatttagtggtcagcttctgatgtcctgtctcctagcacagggaagcccccagctttgagatcaggatagtcaaagtgtcttgatacgggccacttgggcttctccccctgacccccccaaaagaaacctgcatcttctctggagaaggtgtttttcttattcttttttttttctttttttcttttttcttttttttaaggatttcttttatcaaagcagtattgctgaagagttggaaacagttctcattgtctcctccttaaaaaaagggctggctttacatgagaagtaagggtggaatggaagaggagaggaacctgtggaaggtgggcgatgagctcaggtctgtagagcctctcagggcctatgaccttgagatgttcatccccttagaagatagaactgggtttcctgggcccccagatgcatttgcagtgagacttgtgaaatgctggacttacaggtggtgtttgatttgatttctgcacattctctctggagtagaaatggagactggaaaggtcgagtctggttttgctgggcagctgggtggccagcaaagccagctgcacgtccccaagcacagatagagtggcaagggcatgtccagcttactgaccatctgcattgagctcattctcattttctatatctgacttaaagtttctctcgtttcttttcttctcttcacctttaagcacaaacataaaccatccttgctacagcctagaacagttaagtaaacctttctcactgcccctaactgtgtgtgccatgaagtcgcagtgttgtagtggctctgggcttcagcggtgtttgccacggccatccctgtgatagtgccacctcagtccccacagaccagtcatctccattgcttttctttgcccgtgatgcttgttggagtagatgaatatagtgtgtcttagcgctgtcctttccggctgtagctcccaccagttaattccgaactgggggtgggctgaccttgatgtgaaagaatgttggagcagcatcctgccaaaaagcaactcacgttggctctcctgccagtgtgccctgagtggccccaaggcacctggctggagggaaaatggcaaacttttggctgaactggagaatgtcctaacaaacccccttccagaatggctttagtctctagtgcttgctagcatgggagctttgtcttgaattccttttgatctgccccgtttctctccagccttaggaataaatctagaggctattgtgcaatgatctgtgggctttttagaagtctctaaatttccttgaaattcagtacagcccagcataaactactcaagttcttgatcagcctgctgctttgttcttattaataaaagcagtgtgtagctggctaaggacttgttttattaatgctccacaggagcagagacagacagagagacatagtgagccttgaaccaaacacctgtattccaacattttacacagcggtctgggcaccctgtgcctaggagagccagctacgtgtctacctgagtctgacctgggccaggggctgttatcttgggaaagccagaatgtcattaagaaagggacaaataggcagttgcttgtgtagcaaggcagccaccaggttgctcaaagggggttctgcataaaccaacatattttgttgttgcttccagggcaagcagaagcaagccctttgtaaaatgacattgaccgagtcgtcccccaggccactgaaatggggaaacgggtggccccgggctgtgtgaactttaaacccccccaagtcctaagcaaagcaggccccaaagatgtcctccccccccagcgcctcaagtccctcatcctccccctcaaagcaggcccccgctggtgccactgaaagaagcccacccctgtggaaaacacttacatcttgcattattctttaattcctacttcagttgaagttctttcacagttctttgggtttaatttatgtttgagttcttttttgggaccaaacctttttgtcctttagagttgttcattgtttgtgattgcatgtttccttccttcaactgtgttctccctggcattctgatgttggagggagaggaggaagaggaaggggagggaagcttcccaagagtagcctcaacccgtgcttctgtgcattattctgagaatacactttctgtttcaaactgtaaaaaaagtcgaccggccgcgaatttagtagtagtaggtagta

SEQ ID NO: 4776 - DNA, 2400 bp, Homo sapiens
  SIMILAR (943)..(1902): 971254mologous to Escherichia coli 4-alpha-l- fucosyltransferase,accession number M87049,Smith-Waterman Score= 1637.
atgccgacaggaatgccaatgattgaaatacattgtgcgatgcccgttgcaatgtgcatcagggcatacccacagcctaagaaattcagccacctgggctttaaacatcatcatgcaagcggcctctgcggctacctggatgcagcttgcatcatggtcagacgcgtcacggccaatgccttcagcggtaacttcgattgcctggatgataccctgcgggtcaacaacgaaggtcgcacggtcagccagaccttcatcttcacgcatgttgtcgaagttacgggtcagggcgccagtcgggtcgccgatcatcgcatatttgattttagcgatggtttcagagctgctgtgccatgctttgtgggtgaagtgagtatcggtagatactgcgtatacgtctacgcccagtttctgcagttcttcgtagtggtcagcaacgtcacccagttcggtcgggcatacgaaaaggaacttcctgctccagtaaaagcgattgaaaaacagggcattacaatcatcaaaacattcgatgcccccggaggaatgaaaggttatctcggaaagtatcaggatatgggcgtcaccatctacctgactccagatggtaagcacgctatctctggttacatgtacaacgagaaaggtgaaaacctgagtaacacacttatcgaaaaagaaatttacgcaccagccggacgcgaaatgtggcaacggatggaacaatcccactggctcctcgacggtaaaaaagatgcgccggtcattgtctacgtcttcgccgatccgttctgcccatattgtaaacagttctggcagcaggcgcgcccgtgggattctggcaaagtgcattcttatgtctttggttatctggtgatcgccaaagcgtcactgcggttttatattctggcggaagtcagccagttcactttattgatggcgggcatgactgtactgattcacgtactgggatcggatatccctcaccataaccgaaccgttttgcggtttttcaatgacgcgctggccgcgacgagcgagcacgcgcgcgagtttatggttgttggcaaggacgacggcttaagtgatagctgtccggcgctttctgtgcaatttttccctgggaaaaaatcgctggcggaagcggtcatcgcgaaagcaaaagctaaccgtcagcagcgttttttcttccacggtcagttcaatcccacactgtggctggctctgctgagtggtggcattaagcccagccagtttttctggcatatctggggggcagacctgtatgagctttccagtggcttgagatataagcttttttacccactacgtcgcctggcgcaaaagcgagtcggctgtgtatttgccacccgcggcgatttgagcttttttgccaaaacgcacccaaaggtgcggggcgaactgctgttcttcccgacgcggatggacccttcgctcaatacgatggcgaacgatcggcaacgtgaagggaaaatgaccattctggtggggaactccggcgaccgcagcaatgagcatattgctgccttgcgcgccgttcatcagcaatttggcgatacggtaaaagtggtggtgccgatgggatatccgcctaataacgaagcgtacattgaggaagttcgtcaggcggtgctggagttattcagcgaagaaaatctacaaattctgagcgaaaaactggaatttgacgcctatctggcgctacttcgtcagtgcgatcttggttactttatttttgcccgccagcagggcattggtacgctgtgcttactgattcaggcgggcattccttgtgtgcttaaccgggaaaatccgttctggcaggatatgacggaacaacatttgccggtgctgtttactaccgacgatctcaacgaggatattggaggtcgcatgagtctgctgcaattcagtggcctgtttgttgtctggctgctctgcacgctgtttattgccacgctgacctggtttgagtttcgccgtgtgcgctttaacttcaatgtcttcttttcattgctgtttttgctcacctttttcttcggcttcccgctgaccagcgtgctggtatttcgctttgatgttggtgtcgcgccgccagaaatcttgttgcaggcgttgctttctgcgggctgcttctacgcggtttactatgtcacctacaaaacccgcctacgcaaacgcgttgctgatgtaccgcgccgtccgctgtttaccatgaaccgcgtggagaccaatcttacgtgggtgatcctgatgggtatcgcgctggtaagcgtcggcatcttcttcatgcacaacggctttttgctgttccggcttaactcctacagtcagatcttttccagtgaagtctccggcgtggcgttaaaacgcttcttttaa

SEQ ID NO: 4777 - DNA, 1677 bp, Homo sapiens
  SIMILAR (7)..(276): 601254mologous to Mus musculus putative,accession number AK012650,Smith-Waterman Score=230.
  misc_feature (1)...(1677): n = a,t,c or g
aacagcttgggggagtcggcgaacgctttgggaaaccaaagcccatcacccaaaatgtctgtcccagatttctcaatgcaagcccctggcatggccccatccccttcattcattatgaacactttggaaacgaaaggcctttttgaagaggtttcccatggatgagtgcacccaattcaagttgggttagttggcttctgtttggtgtttgctacaccccctgtgttgtgccctgtttcctcagaaaagttccatgtctgtgacaagcttggaggccgagttgcaagcctaagatcccaagagagcccatccctgaattgcgacgcgtgtaccttcaataagggattgtaaagcagggaggaaaccctctgcagctcattcctgcccactgcaaagctggtgtagccatgctggtgagaaaaatcctgttcaaccctgggttctcccagttacggaaaccttttaaagatccacattagccttttagaataaagctgctactttaacagaggcacctggcgtgggccaagtgcctgatactcccttacactgaatcatgttatgatttatagaaatacctttcctgtagcttttatagtcattgtttttcaaagacgatataccagcccctcacccaggttttaaaaaaagcactggtaggcatagaataggtgctcagtatatggtcagtaaatgttctattgattatcaatcagtgaaaaaagaaatctgtttaaaatactgaattttcatctcactcccattgcaaatcaaggagatctcagcagtgaactgggaaaatacaaaagctctgggctaatctattaaaaccttaccctgaaatattaagggcagtttgcttctagtttggggattgcgctagcccaatgaaggtgatgaagcttttggatttggagggtaaaagctccttcacaccccttccaaaagtcagtcacagaccactgcaacatgccttccctgctggatcattatatacattcagattgtgagtggattgccttggttgacttttaatttattgttttttgttcttataaagatgataatcttaccttgcagttattgactttatattcaattatttacatcaaataatgaaataactgaaaatgtacaaatgtcaaattttggaagtatattcaataccaatgctgtatgagtgggctgaatccagttcattgtttttttttttggtaagaagtgagactacagttccagctacctacatgtcttttcttgtcatccttatagatctctttggctttcagaaagatacagtgataatgtgtgtatgaatcagtcacaatgaattttacttgaatattgtatgttgcattccacttcatttgaaaataatgaaaccatgtaccactgtttacatcatctgtagtgatttcatagataatatatttaatatgacagattatgtttcaactctgtagatgtttaacgtcatagacagttggccctctgtatccgtgagctctatatctgtgaattcaaccaagtttggatggaaaannnnnnnnnnnnnnnnnnnnnngaaacggagtttccctttgtaacccaaggctgaagggcaggggctaagtctgggttaattaaacctccgcctccgtggtaacgcagttttcctgcttaacctttttgaaaggg

SEQ ID NO: 4778 - DNA, 631 bp, Homo sapiens
  SIMILAR (144)..(260): 581254mologous to Homo sapiens Human secreted protein, SEQ ID NO: 7878,accession number AAG03797,Smith-Waterman Score=129.
ttttgagacagagtctcgctctgtcgcccaggctggagtgcactggcgcgatctcggctcacggtaagctccgcctcccgggttcacgccatcctcctgcctcagcctcccaagtagctgggactactggcacccaccacgacgcccggctgtttttttgtatttttaggagagacggggtttcaccgtgttggccaggatggtctcgatctcctgacgtcgtgatccacccgcctcggccccccaaagtgctgggattataggcatgagcaccgcgccagaccccaaattttattttttattcatatattctccactgtctcagctggcattaatgaatcttaagtttgcttttactgtatcataattttggaagtgcctagtaaggaggggatattagagtcctgatgtatttcagaagcagcacactagtcatctttgaatagtggcagatatcttttcaggtagaaaaatttcatgagtaatgccagataagtacaaatataggctctaatgatttcttttaatatttctggaaagtaattagattatatatctgtgatacaatataatactaagtattagactgtagaaggctttgtttcaaggcggtttattcattcatgaaact

SEQ ID NO: 4779 - DNA, 759 bp, Homo sapiens
  SIMILAR (568)..(756): 1001254mologous to Homo sapiens NAALADase II protein,accession number AJ012370,Smith-Waterman Score=322.
atggcgcgatctcagctcaccgcaacctccgcttcctgggttcaagtgattctcctgcctcagcctcccaagaacactggggcacagaaacactggcccactgaaggggaagcaaaggaacactgtgtaagtgatgactctgagagcactttgaaagctggagggcagcacagaataaaacagggtggaaatagttcttcaggagcaagagagcctgcaccaaatattctgaatagtagaaggtcttggtggactttggttgctaaggcagcagctgtcacagtgattataagggtcattctcatggcagcaattcttaggggcactttggcaaaggaagtgaattggtgggttcttgatctcactgacttcaagaatgaagccgcggaccctcgcgctagacataaagattctccaagtccccaccagactcaggagcccagctggcttcactcagtggatcccacaccggggccacaggtggagctgcctgccagtcccacgatgtgcgccggcacttctcagcccttggtcagtcgatgggactggtcgccgtggagcaggaagcggcacatcatatttgctccaagtagccacaacaaatatgctggagaatcatttcctggaatctatgatgctatctttgatattgaaaataaagccaactctcgtttggcctggaaagaagtaaagaaacatatttctattgcagcttttacaattcaagcagcagcaggaactctgaaagaagtattatag

SEQ ID NO: 4780 - DNA, 773 bp, Homo sapiens
  SIMILAR (329)..(508): 811254mologous to Homo sapiens Human myelin oligodendrocyte glycoprotein gene,accession number AAZ29204,Smith-Waterman Score= 236.
cctggctaatttttgtatttttagtagagacggggtttcaccatagtggtcaggctggtctcgaactcctgacctcaggtgatccacccgcgtcggcctcccaaagtgctgagattacagacgtgagccaccgcacccacccggcctcctgcctgtattctcttcccacttcgcttttgggttatttcaaagacgccggcgcctttttgtttgtttctttgcttgttttgagacagagtcttgctctagttacccaggctggagtgcagtaggcatgatcttggctcactgcaacctccacctcctgggttcaagtgattctcctgcctcagcctcctgagtggctggaattacaggtgtgtgccaccacgtcaggctaatttttgtatttttagtagagacgggatttcaccatgttggccaggctggtctcgaactcctgacctcaagtgatccacccacttcggcctcccaaagtgctgggattacaggcgtgagccacccggcgcctggcctttgtgtcagttacacacacacacacacacacacacacacacttgcctgaattccctttccttctgtcttccccccaaattctctctcccctccactccagcagggcttctgtccccaccactgcactgaactgacatcttatcttatcaagatcaccaaccctgtccatgtcatcagacctaatggtcactctgctctctgcatccttgtccaagtctcagcacccttgcacagctggctgtctcctctccttgaaa

SEQ ID NO: 4781 - DNA, 415 bp, Homo sapiens
  SIMILAR (115)..(258): 741254mologous to Mus musculus putative,accession number AK013881,Smith-Waterman Score=191.
acttgacccaggaagtctagctggcttcacctcttacatacagttcatgtacgatgagtttgtggaggaatatgagcctaccaaagcagacagctatcggaagaaggagctcaggatggggaggaagtacagatctatatcataaatacagctgggcaggaggactacactgcaattaaagacaactacttccactgtgtcttctctattacagaaatggaatcctttgcagctacagttgacttcaaggagcagatttaagagtaaaaaaagatgagaatattccatttctactggttggtaacaaatcagatttagaagataaaaggcaggtttctatagaagaggcaaaaaacagagctgactagtggaatgttatctatgtggaaacatctcctaaaacatgagctaatgt

SEQ ID NO: 4782 - DNA, 1671 bp, Homo sapiens
  SIMILAR (925)..(1269): 911254mologous to Saguinus oedipus ral product (AA 1- 206),accession number X04328,Smith-Waterman Score=532.
gtccctgtccgctgtggggatggagagacactaacagaactgggatgggcgatgttggctgaacggatccacctattattagtgcgcggggattggctccttggcgcagcgtacccgaggtggagccaatcaggatgctggggctcggagatgatgggcggccgcctcctcactggagggattcctggagaagctgcagtgtggggatgctctagaccgagtactgcccccagtgtctttccacctcctcctgcagcagcggcagcggcagcagcagttagcagcggcaacttgaggctgcaccccgggcaagtccccagggtggtgctcagccgagaggggggcttggcgccccgaaggggctgcccctccaagagcggaggcagcgagagtacgcgtgtgcctcgcgccggtccacgcggggagagcactggggaccgagacccggcaccacctcccggtccgccctccagcagccatcatttcagtcccttgagaatagaaaggaaagcagacaaaccacctgaaaactctggtgaaagttctcatgatgtggcctccagggaacagcctcttgttttacttgaggctcatttccgctgggccatcctccttgcatgtcactccatgcctactgtgggtaggaaacaggtaaataatgaaattaagacagaaatcaagaagttctttgaaaccagtgagaacaaagatacaacataccagaatctctgggacacagctaagatctccttctttcctgatttctcatacaacttttttatgcccatctctgtccttgatgctggagggggaagtgaaactgccaaacatcatcaccaggatgtgcatgaaatccaaccacacattgaaccccagatttccttgggctcttttgaacacccaatctttggttcatgtacgatcaaagaaggcacctatcggaagagagtagtactggatggcgaggaagtacagatcggtatcttagaaacagctgggcaggaggactatgctgcaattagggacaactatttccgaagcagagaggggtttctctgtgtcttctctattacagaaatggaatcctttgcagctacagctgacttcagggagcagattttaagagtaaaagaagatgagaatgttccatttctactggttggtaacaaatcagatttagaagataaaaggccggtttctgtaaaagaggcaaaaaacagagctgaccagtggaatgttaactatgtggaaacatctgctaaaacacagctaatgttgacaagacacaagcctggcacatcctcccagtcaagtaagaaagcttctatgagcatattcagaaagattgacaagaatccaagggctggaaaggaactaccactgatgtctgtgtcaagcccgaaaatacctgaaggccagaggctggctggaagggcctggcctgacagaggtgagaaagtgtatgtgaaagcttgcgtacaaaaagaaggggcaacaactatacaggaaggagaacaggtatccatgcactgcatgtccgggttacccatagatatccgtgcactgcatgtccagcatatccgggttacccatagcacgtccgggttacccatagatatccacgcaccgcacgttcaggcgacccatagatatccacgcaccgatgttcag

SEQ ID NO: 4783 - DNA, 1020 bp, Homo sapiens
  SIMILAR (806)..(952): 881254mologous to Homo sapiens RAL A polypeptide (AA 1- 206),accession number X15014,Smith-Waterman Score=208.
tcctcctcctccttctcctcctcctcctcctcctcctccagccgcccaggctcccccgccacccgtcagactcctccttcgaccgctcccggcgcggggccttccaggcgacaaggaccgagtaccctccgggcggagccacgcagccgcggcttccggagccctcggggcggcggactggctcgcggtgcaaattcttcttaatcctttggagaaaactgagacacaaaatggctgcaaataagcccaagggtcagaattctttggctttacacaaagtcatcatggggggcagtggtggcgtgggcaagtcagctctgactctacagttcatgtacgatgagtttgtggaggactatgagcctaccaaagcagacagctatcggaagaaggtagtgctagatggggaggaagtccagatcgatatcttagatacagctgggcaggaggactacgctgcaattagagacaactacttccgaagtggggaggggttcctctgtgttttctctattacagaaatggaatcctttgcagctacagctgacttcagggagcagattttaagagtaaaagaagatgagaatgttccatttctactggttggtaacaaatcagatttagaagataaaagacaggtttctgtagaagaggcaaaaaacagagctgagcagtggaatgttaactacgtggaaacatctgctaaaacacgagctaatgttgacaagagtggcccttcctgaagaccagatggtggaacacctgcaagtacatttcatcccactgccctagaccagctccagtatctagaaagactgctcactgggctgaggtattttttgatttaatgagagaaattcgagcgagaaagatggaagacagcaaagaaaagaatggaaaaaagaagaggaaaagtttagccaagagaatcagagaaagatgctgcattttataatcaaagcccaaactcctttcttatcttgaccatactaataaatataatttataagcattgccaaa

SEQ ID NO: 4784 - DNA, 2107 bp, Homo sapiens
  SIMILAR (1)..(561): 511254mologous to Homo sapiens RAL A polypeptide (AA 1- 206),accession number X15014,Smith-Waterman Score=355.
atggctgcaaataagcccaagggtcagaattctttggctttacacaaagtcatcatggtgggcagtggtggcgtgggcaagtcagctctgactctaccagttcatgtacgatgagtttgtggaggactaagaagcctacaaaagcagacagctctcggaagagggtaggtcctagatggggaggaagtcccagatcggatatcctttagatacagctgggccaggaggacttacgctgcaattagagacaaactacttccgaagtggggaggggttcctctgtgttttctctattacagaaatggaatcctttgcagctacagctgagattcagggagcagattttaagagtaaaagaagatgagaatgttccatttctactggttggtaacaaatcagatttagaagataaaagaccaggttttctctaggaagaggcaaaaaaacagagctgagcagtggaatgttaactacgtggaaacatctgctaaaacacgagctaatgttgacaaggtattttttgatttaatgagagaaattcgagcgagaaagatggaagacattttattatttgaatggaacaaagaacacgaaaaggttagccgagagaatcagagagggaggctgcattttataatcaaagcccaaactcctttcttatcttgaccatactaataaatataatttataagcattgccattgaaggcttaattgactgaaattactttaacattttggaaattgttgtatatcactaaaagcatgaattggaactgcaatgaaagtcaaatttactttaaaaagaaactaatatggcttcaccaagaagcaaagctcaacttatttcataactgcctacatttatcatggtcctgaatgtagcgtgtaagcttgcgtttcttgggcagcctttcttgaaattgaagaagtgaaatgggggtggggagtgggaggaaaggtgacttcctctggtgtttattataaagcttaaattttatatcattttaaaatgtcttggtcttctactgccttgcaaaaatgacaattgtgaacatgatagttaaactaccacttttttttaaccattattatgcaaaatttacaagaaaagttattggcatggttgttgcatatagttaaactgaggagtaattcatctgtgaatctgctttaattacctgggtgagtaacttaggaaaagtgggtgtaaacttgtacatgggaattttttgaatatgccttaatttaggaaactgaaaaatatccggttatatcattctggggtgtgttcttactgacaccaggggtccgctgccccatgtgtcctgggtgagaaaatatatgcctgggcacagcttttgtataggaaaattcttgaggaagtaactgtccgctaggaagtctgtcccaaatttaaaatgtgtgccatattctgggttcttggaaaataaggttccagagctctttggatccgctttttaattaaactgcagttcatgtaaatgaagggccagcatatatacttgcaagataattttcagctgcaaggattcagcaccagttatgtttgaatgaaccctccttttctctgagattctgggtccctgggaaatcccttttctggctagtggttgagcatgttaagtgttaagtttttaatctgggagcagggcataggaagaaaatgtcagtagtgctaatgcattttgcactagaacgcttcgggaaaatattcatgcttgccatctgttcatttctaaatttatattcataaagttacagtttgatacaggaattattaggagtaattcttttctgtttctgtttataatgaagaacactgtagctacattttcagaagttaacatcaagccatcaaacctgggtatagtgcagaaaacgtggcacacactgaccacacattaggctgtgttaccattgtgtggtgtacctgctggaagaattctagcatgctacttggggacataatttcagtgggaaatatgccactgaccgatttttttttttttcctctttgcagtggggctaggacagttgattcaacaaagtatttttttcttttttctcagtcctaatttgaacagg

SEQ ID NO: 4785 - DNA, 1101 bp, Homo sapiens; identical to SEQ ID NO: 74
  SIMILAR (94)..(1098): 1001254mologous to Homo sapiens dJ146H21.2 (similar to CYTOCHROME B-245 HEAVY CHAIN),accession number Z83819,Smith- Waterman Score=1798.

SEQ ID NO: 4786 - DNA, 339 bp, Homo sapiens; identical to SEQ ID NO: 2943

SEQ ID NO: 4787 - DNA, 1526 bp, Homo sapiens
  SIMILAR (3)..(761): 561254mologous to Homo sapiens vitelliform macular dystrophy protein,accession number AF073501,Smith-Waterman Score=754.
gttttatgacaacagatgaaaggaaattattcaaccacctcaagtctcctcatctgaaatattgggttccattcatctggtttggaaatcttgcaactaaagcccggaatgaaggtagaatcagagacagtgttgatctgcaatcattgatgactgaaatgaatcgataccgctcttggtgcagcctcttattcggttatgactgggttgggattccgctggtttacacccaggttgtcactcttgctgtctataccttcttctttgcgtgcctgattggacgccagtttttggatcccaccaaaggctacgcagggcatgacttggatctttacattcccatcttcaccctcctacaattcttcttctatgcaggatggcttaaggtagcagagcagcttatcaacccttttggagaagatgatgatgattttgaaactaactggtgcattgacagaaatttgcaggtctctcttttagctgtggacgaaatgcacatgagcttacccaagatgaagaaggacatttactgggacgattctgctgctcgcccaccatacacattggcagctgctgactactgcataccctcatttctggggtcaacagtccagatggggctgtctgggtccgactttcctgacgaggagtggctgtgggattatgagaagcatggccatcggcattccatgataagaagagtcaagcggttcctgagtgcccacgaacacccctccagccccagaagaagaagctacaggaggcagacaagtgacagctccatgttcttaccccgagatgacctcagcccagccagggacctactggatgtgccctcaagaaacccccccagggcctcacccacctggaagaaatcctgcttcccagaaggaagccccacgctgcacttcagcatgggagagctgtccaccatcagggagaccagccagacaagcactttacagagcctgaccccacagtccagtgtgagaacttcccccatcaaaatgccactggtacctgaggtattgatcacagcagccgaagcaccagtgcccacatcagggggctaccaccatgattccgctacctccatcttgagctctgagtttacaggggttcagccaagcaagactgagcagcagcagggccccatgggatccatcctgtctccctcagagaaggagacacctcctggaggccccagtccccagacagtttcagccagcgctgaggaaaatatattcaactgtgaagaagaccctggtgatacctttctaaaaaggtggagtcttccgggattcctggggtccagccacacttccctgggaaacctaagtccagaccccatgagctctcagccagctcttttaattgacacagaaacatcctcagagatcagtgggatcaacattgtggctggctctcgagtctcttctgatatgctgtatttaatggaaaacctggacaccaaggaaacagatatcatagagctgaacaaggaaactgaggaatcacccaaatga

SEQ ID NO: 4788 - DNA, 424 bp, Homo sapiens
  SIMILAR (182)..(421): 701254mologous to Homo sapiens Human myelin oligodendrocyte glycoprotein gene,accession number AAZ29204,Smith-Waterman Score= 261.
ctttctcttgacatacatatttgaattttgtaaagcaggaaaaacagaattaatgactactcaaatacttaagataaaatttttttttttttttttggccaggaaaaaaaaatggtaggaaagaatgggaaagtgggccgggtgtgttggctcatgcctgtaatcccagcactttgggaggccgaggcaggtggatcacctgaggtcaggagttcaagaccagcctgaccaacatggtgaaaccctgtctctactaaaaatacaaaaattagctgggcgtggtggcacatgcctgtaatcccagctacttgggcggctaaggcaggagaattgcttgaactgggaggcggaggttgcagtgagccgggatcgtgccactgaactccagcctgggcgacagagtgagactcggtctcaaaaaaaa

SEQ ID NO: 4789 - DNA, 1778 bp, Homo sapiens
  SIMILAR (1)..(477): 661254mologous to Homo sapiens zinc finger protein,accession number X78933,Smith-Waterman Score=579.
aagaagccttatgaatgcaaagaatgcgggaaggcctttagtagtggctcaaactttactcaacatcagagaattcatactggggaaaaaccctatgaatgtaaggaatgtggcaatgcctttagtcagagctcacaacttattaaacatcaaagaatccatacaggtgagaaaccttacgaatgtaaggaatgtgaaaaggcttttcgttctggctcagaccttactagacatcagagaattcatactggggagaaaccctatgaatgtaagatatgtgggaaggcttattctcagagttcacagcttattagtcatcatagaattcatactagtgagaaaccctatgaatatagggaatgtggaaagaactttaattatgacccacaacttattcagcatcaaaatttgtactggtgatgaaacagaatatatgaaatgtgtagggaggcttttaattatggctcaaaacagaatttatcttgttaataattcctctagatagaataatgtagaaacattttatttgtggactacagcttattcagcctgggaaaaataatgttggagaaatactctatgaatagaatatactttggaagcccttaactaaacgcttacttctcttgacatcagataattcagtctagcaatatgatagataattcagtctgtcatactgaaaatgacagcacttttaacacctttctaaccttcttaacgtcagagaatttttgtagaaatgtagtcctgtgattgtcattttttcccctaatttctctaattggtacattcttacgtattttaatccatattaaatttatatggctataaatttcatctgtttacatcctgatttggatactattttaaaaatacctttagtacctgggagaagtgacctctttatttttgaagatggcttattctttttgttctttataacattaaggctttcttattgtaaaaatgttcatgaacgacattttactcaatagagattcttcattatcttcatggtgttttgttgtgttactgtaatatcacttatgaaatcctattggtggatatcgtagtctcctctagatattttgccataatacatgaccaaaatacaagtccctgctggacattctccctaagtcacatgctttgtatcatatcttttaattgcagaagtaatgtgtgaatatattttccttataaaagatgcaaacattacaaaaaggcaaatgtaccctttgaccatatcccaaaggatagtctttatcagttcattatttattgctgatcatttttctgttcatatatacatgcgtgtctcagtaaaaattataaaatgggggataattataatacctacctcataatgctttgtgaggattaaatgaattaagatcgataaagtgcttagaattgtgcctgacatgataaatacatactcactgaatgttagtcatcgttattatattcatcatcatcagtattattatttgtagaaaggctttttaacttctgcagaacttagtcaccattaggcagggtgtttgactgaagaaagaccctttgaaggtaacaagttaaggaaaatttcccatcgatcgatgtacttactattggaacatggaaataatcctagggtgttgggggggggaaaggtactgtggaataatgtgtgtggagggactttattcccgactaatactctttttgtcgcattttatacccagtaaaaaagaaaagagaacataagcaaaatattggtgcactaatgagga

SEQ ID NO: 4790 - DNA, 392 bp, Homo sapiens
  SIMILAR (42)..(308): 601254mologous to Homo sapiens Human secreted protein, SEQ ID NO: 7870,accession number AAG03789,Smith-Waterman Score=243.
cctttttctttcttttcttttcttttcttttttttttttttttgagacagggcctcactctgttgcccaggctgtagtgcagtggctcaatcatggctcgctgcagcctcaactttctgggttcaagcaatccttccgcctcagactcctgagtggctgagactacaggtgcacccccctacgcctggctagtttttgtattttttgtagagatggggtgtcactatgttgcccaggctggtctccaactcctggactcaggagatttgcctgcctcagcctctcaaagggctgggataacagatgtaagcccctgcatctggcctccaatgagttgttatgtgaaaagaacgtgattgtaggtgcttaataaatgcttgctgttataaacc

SEQ ID NO: 4791 - DNA, 2022 bp, Homo sapiens
  SIMILAR (770)..(627): 811254mologous to Homo sapiens Human secreted protein sequence encoded by gene 38 SEQ ID NO:97,accession number AAB51864,Smith-Waterman Score=203.
ttttttttttggcttttcaaataaatatataggtgtctttattgtcttgtattcaaatatagtttaaaaaatgcattgtagtgtggaataccagctggtggaagcgtgcttcttgacagcagagcaatcagaggggtgttctcaagggtaccgtggacctggagggggccttctggcaaatccagactcttctctggtttgttcttcagaccacgaggtgggaaccatctcttcaaaggagccctgccaccatcaccaaagctcacaccagaaaaaaaaccgccatttacacaacaaactgaacctgaaaaaggaacggaacatggtgcttccgccgtgaacaaaatcagcaagttgaatccgtttttcctttcccgggctgttcgaaaaagattcggctagaggaaaaggggggcactttggggcagcccgtaggggatgggcctggagctgtggggcccgggctgagccctccctgccttttaactgcaggatgtaaactctatggaaatgtatagaacttcagttttctcccaaccctccacaacctcaactcttgagaccaccaaattaactgttaggaaaccccagaagagagtccttcaaatgagctacacccaggttcagagcgcagaaccaacagtgtgactggggcatggaggtaaattctgacacgattggaggggaatttcacaaaacaaaattccatgaagtcaaacacgcaacacgcgcgcgtgcacacacacacacacacacgcatacacacaaagtcaacattcaacgtgaagagttcccttttctttctcgaaggttggtttttgcaagccctgacaagcaaagaggtccgttgcggtggccaggggggccaagacctcagaatgaaaagcccacagctgctctgtcctcacccgctctggtagacccagccctggtacaggcatgggggtgggggtcctaaaacccttcgtcagcgttcctggagcccttgccaagcttaccatgtgccccatgcatgtccttcacatcacaaaaacctgtccagccgcccaaggccatggtgtccaccgaatgccacaaacatgctgctgagcctcaaagctcttcaacctcccaccttgctgtcccctctcccctgacaagtgtgcagacaaggtaaaaatcccccaaagcagagatgtcgagggcccggagccacacaccacatccccgtgcatctttggcactctggctggccactgctgcacacgctgcctgcccggatcagtgctgtccagccctcctttcccttccccaaggaaacgctgggccaagctgagctccaaaacaggtgggttcctctgggtccggggaagcaggtgttgagggaaaggccactttcccaccagagggaaaagagagaggctcaactcacacccaggctgcttgctaggaggcctcaggcgggcgaggcagcggccaggcgtcaagggaaagggacagctgagggcgaacgggggtgatgagacgggccctccaagccttccctcgtcagagccagggtaaggaaaagagctggaccaaagcaaggtccatctgccagtgcataaccaggcccacagcaccccaaatcccccaacaacacaggggtcccactggccccgggaacaggccccagctcccacacccatgagttctgaagagcctaacgtactgtcccagcagacagcgagacctcaccatcttgaaaacctgaacctgcccacctcaggttcacccgggggccagctagggccttggaggaaggggcctcgccagttctcagctgcagctcccctctatgagagagacccttacctgcaccccagctgccggcagggccagtcatggctgtgcacggagatgaggtgggtgtgtaagccccccaacgtcagcaacagacagaggtgctgcatgccactgtgctactttatctgggcagggactgggggtgccatgccctctaagaatccaaatttcatcctatagccagaaattcaccgcaag

SEQ ID NO: 4792 - DNA, 2046 bp, Homo sapiens; identical to SEQ ID NO: 4708
  SIMILAR (733)..(1380): 1001254mologous to Homo sapiens Human NIP2b protein,accession number AAY70847,Smith-Waterman Score=1147.

SEQ ID NO: 4793 - DNA, 837 bp, Homo sapiens; identical to SEQ ID NO: 4750
  SIMILAR (220)..(834): 1001254mologous to Homo sapiens ribosomal protein S6 kinase 1,accession number L07597,Smith-Waterman Score=1075.

SEQ ID NO: 4794 - DNA, 1350 bp, Homo sapiens
  SIMILAR (457)..(756): 601254mologous to Homo sapiens Human secreted protein, SEQ ID NO: 7878,accession number AAG03797,Smith-Waterman Score=288.
gtatacaaattactgatgattaagtcttgttaaatacaaatagccatacacatgaagcaaagcaacagccatacatatgaagctagcatttgtttcttgagaactaataaggaactaaagataaataattaaggcaggtaaacagtttatttttctagttgttgagctgtatagttatctgtcgctatgtaacaaattatactcaaaattaatggtgttaaacaataagcacttattatctaatagtgttagaagttcagaaatttagtaaaaggcttagctgggtagttctggctctcttgaggtcttggtcaaaagatcaactgaagttgcaattatctgaagacttgactggaggctggaggatctgcttccaagatggctcccttacatggctggcaagttggtgcttgttagcaaaataccttagttccttgacaggtagatttctttctttctttctttctttctttcttttttttttttttttgaggcggagtctcggtctttcacccagattggagtgtgcagtggcacaatctcggctcactgcaagctctgcctcccgggttcccacccttctcctgcctcagcctcctgagtagctgggactacaggtgcccgacaccacacccggctaatttttttatatttttagtagaagacggggtttcaccgttttagccgggatggtctcgatctcctgacctcgtgatccgcccgcctcggcctcccaaagtgctgggattacaggcgtgagccaccgcgcctggcctgatcttatctctcttttttgcttaaaactcttcaatgccttcccattgtctttaggataaaagtcaaaatctgggacattgcttgtaagacttgatgtgatcgagtgtttgcttgcctttgcagctactgtccccttgcttacactgcttcagccttatggaccttctttttgttctaattggctatcttctttcctacctcaggctttcatgcctttctcttgcctgtagagttctttgcttgtctcttcacacagttaacctatcttctaggtcttctttaaacatttttattgtgagataaactttctctgatctcctagactaggttagtgttccctttcataggtgtttttctgactctgtacatgttcacagctctcaccacacctttgattatttgtgttctgataggcttcaaataactttcatgagggttgggacagtcttgtcatgtttatcattttatctccacacctaccttaatacattgccatgtataattcatagcttcaccctgaaccttcctgtctttcttcttacagcagcccataacggtacgtgaaggccaaac

SEQ ID NO: 4795 - DNA, 726 bp, Homo sapiens
  SIMILAR (2)..(199): 801254mologous to Homo sapiens PRO2550,accession number AF130089,Smith-Waterman Score=274.
  misc_feature (1)...(726): n = a,t,c or g
tttgagatggagtttctctcttgttgtccaggctggagtgcaatggtgcgatctcggctcactgcaacctccgccttccgggttcaagtgactctcctgcctcagcctccccagtagctgggattacagatctgcaccaccatgcccagctaattttgtatttttagtagagacggggtttctccatgttggtcaggcctggtctcgaactcctgacctcaagtgatctgtccacctcggcctccccagagtgctgggattaccaggcgtgagcaacntgtttcccagcaggaatttcttttttatagtattggataaagtttggtgtttttacagaggagaagcaaatgggtcttagctctttctctattatgttatcaatcctcccttttttgtacaatatgttgtttacctgaaagaaagggtttctattcgttggttgtggacctgggacaaagtccaagtctgtggaacttaaaacccttgaaggtctgtcataggactctggacaatctcacaaccttagctattcccagggaaccccagggggcaactgacattgctccaagatgttctcctgatgtagcttgagatataaaggaaaggccctgcccaggtggctgtttcttgtctgttatgtcagaggaacagtcctgttcagaaaggggctcttttgagcagaaatggctaataaactttgtgctgatctggaaaaaaaaaaaaaaa

SEQ ID NO: 4796 - DNA, 236 bp, Homo sapiens
  SIMILAR (1)..(234): 841254mologous to Homo sapiens KIAA1324 protein,accession number AB037745,Smith-Waterman Score=363.
ggtaggaaaatgtctgtgtgcaccgacaatgtcactgacctccggattcctgagggtgagtcagggttctccaaatctatcacagcctacgtctgccaggcagtcatcatccccccagaggtgacaggctacaaggccggggtttcctcacagcctgtcagccttgctgatcgacttattgctgaacttttccacctggagtccttgggaataccggacgtgatcttcttttatag

SEQ ID NO: 4797 - DNA, 2352 bp, Homo sapiens
  SIMILAR (359)..(736): 501254mologous to Homo sapiens Human SEC10 protein sequence (clone ID 1795045.0.77),accession number AAB48377,Smith-Waterman Score=337.
  misc_feature (1)...(2352): n = a,t,c or g
atgtcctctcaggaggtgacatttgagcagagacctgaaggagatgagggaggagccgtggagctttccaggcagcagacacagcaggagaggaggcggcagctgggccagacacaactcatgtacaaatgggccaagccgaaaatctgtagcgaggaccttgagggggcagtgaagctgcctgcctctggtgtgaagacccactgcccaccctgcaacccaggcttcttcaaaaccaacaacagcacctgccagccctgcccatatggttcctactccaatggctcagactgtacccgctgccctgcagggactgaacctgctgtgggatttgaatacaaatggtggaacacgctgcccacaaacatgggaaacgaccgttctcagtgggatcaacttcgagtacaagggcatgacaggctgggaggtggctggtgatcacatttacacagctgctggagcctcagacaatgacttcatgattctcactctggttgtgccaggatttagacctccgcagtcggtgatggcagacacagagaataaagaggtggccagaatcacatttgtctttgagaccctctgttctgtgaactgtgagctctacttcatggtgggtgtgaattctaggaccaacactcctgtggagacgtggaaaggttccaaaggcagacaggcctatacctacatcattgaggagaacactaccacgagctacacctgtgccttccagaggaccacttttcatgaggcaagcaggaagtacaccaatgacgctgccgagatctactccatcatatgtcacccatgttattaaatgccgtgggcttcttatgccggtccttgtgcccaaaaagcctctgaggaggggtcttcctgcacctcttgtcctgctggttactatattgaccgagattcaggaacctgccactcctgcccccctaacacaattctgaaagcccaccagccttatggtgtccaggcctgtgtgccctgtggtccagggaccaagaacaacaagatccactctctgtgctacaatgattgcaccttctcacgcaacactccaaccaggactttcaactacaacttctccgctttggcaaacaccgtcactcttgctggagggccaagcttcacttccaaagggttgaaatacttccatcactttaccctcagtctctgtggaaaccagggtaggaaaatgtctgtgtgcaccgacaatgtcactgacctccggattcctgagggtgagtcagggttctccaaatctatcacagcctacgtctgccaggcagtcatcatccccccagaggtgacaggctacaaggccggggtttcctcacagcctgtcagccttgctgatcgacttattggggtgacaacagatatgactctggatggaatcacctccccagctgaacttttccacctggagtccttgggaataccggacgtgatcttcttttataggtccaatgatgtgacccagtcctgcagttctgggagatcaaccaccatccgcgtcaggtgcagtccacagaaaactgtccctggaagtttgctgctgccaggaacgtgctcggatgggacctgtgatggctgcaacttccacttcctgtgggagagcgcggctgcttgcccgctctgctcagtggctgactaccatgctatcgtcagcagctgtgtggctgggatccagaagactacttacgtgtggcgagaacccaagctatgctctggtggcatttctctgcctgagcagagagtcaccatctgcaaaaccatagatttctggctgaaagtgggcatctctgcaggcacctgtactgccatcctgctcaccgtcttgacctgctacttttggaaaaagaatcaaaaactagagtacaagtactccaagctggtgatgaatgctactctcaaggactgtgacctgccagcagctgacacgtgcgccatcatggaaggcgaggatgtagaggacgacctcatcttgaccagcaagaagtcacttcttggggaagatcaaatcatttacctccaagaggactcctgatggatttggggnaaaanncccttncccaaggtngcccggctgaagacatcctcaggaggcccagacatggacctgtgagaggcactgcctgcctcacctgcctcctcaccttgcatagcacctttgcaagcctgcggcgatttgggtgccagcatcctgcaacacccactgctggaaatctcttcattgtggccttatcagatgtttgaatttcagatctttttttatagagtacccaaaccctcctttctgcttgcctcaaacctgccaaatatacccacactttgtttgta

SEQ ID NO: 4798 - DNA, 1005 bp, Homo sapiens
  SIMILAR (1)..(369): 911254mologous to Escherichia coli Glycerol metabolism operon regulatory protein,accession number D90754,Smith-Waterman Score= 576.
atgctggtggaacaaaatcgttttagtcgccagctgtattacgcgctgcatgcatttgaaattaccatcccgcctctgcgtatgcggcgtggcagcattccggcgctggtgaataacaaattacgcagtcttgaaaaacgcttctctacgcggctgaaaattgatgacggcaacgattttgaactttacagcgtcatcgagaatcttgctctgagtagtgataacgggcgcattcgcgtcagtgatttgccggaacatctgtttaccgagcaggcgacagatgatgtcagcgccacccgcctttccaccagtctgtcatttgcggaagttgaaaaagaggcaattattaacgcagcccaggtcacaggcgcgtttccgtggtggctgggtgatgtaaaactgacgattccgctaacgctggggatggtggcagcggcgctgaccgatctcgatgaccgactggcgggacgtttgcgtaacctcatcattacgctgttctgcttttttatcgcctcggcctcagtagaattgctgtttccctggccctggctatttgcgattggcttaacgctctctaccagcggcttcattttgctcggcggtctgggtcaacgctatgcaacaattgccttcggtgcattgctgatcgccatttacactatgttgggaacatcactgtatgagcactggtatcagcagccgatgtatctgctggccggtgccgtctggtacaacgtcctgacacttattggtcatctgctgttcccggtccgcccgctgcaggacaacctggcgcgttgctatgaacaactggcgcgttatcttgagctcaagtcgcgcatgtttgatcctgatattgaagatcaaagccaggcaccgctgtacgatttggctctcgccaacggtctgctgatggcgacattgaatcagacgaaactctcgctgctgacccgcttacgtggcgatcgtggtcaacggggaacgcgtcgcacggggatcctctag

SEQ ID NO: 4799 - DNA, 1101 bp, Homo sapiens; identical to SEQ ID NO: 74
  SIMILAR (94)..(1098): 1001254mologous to Homo sapiens dJ146H21.2 (similar to CYTOCHROME B-245 HEAVY CHAIN),accession number Z83819,Smith- Waterman Score=1798.

SEQ ID NO: 4800 - DNA, 2004 bp, Homo sapiens
  SIMILAR (1651)..(2001): 1001254mologous to Bos taurus general protein transport factor p16,accession number AF020262,Smith-Waterman Score=607.
atggagtttggtgttacatccctgaagggtgttgacttgattcttagttatccctgcagattgagggagaaggatcttcttccagccatgaggtgtcagaatgtgtctgctttaccaaaaggcttcggagttcaagaattaaaaatactgcagtcagatttactatttgaacagagccgcagtgcggtgcaggcaaaaagggctgatagcccaggtcgacttgttccttgtggggcagtgttcaagtcaacttttatgggcatcttattttacacaaatgttaacacagacaacagccacgactctggtccacggaaacgttctatcgccgcccagcctttacgcaaacaccgaggcgatggcaaccaggagaagccaaacttggtcccccggctcgcggagtgcctgcgagcggtgctcatggcgctctatgagctcttctctcacccggtcgagcgcagttaccgcgcggggctctgctccaaagccgcgctgttcctgctgctggccgctgcgctcacgtacatcccgccgctgctggtggccttccggagccacgggttttggctgaagcggagcagctacgaggagcagccgaccgtgcgcttccaacaccaggtgctgctcgtggccctgctcggacccgaaagcgacgggttcctcgcctggagcacgttccccgccttcaaccggctgcaaggggatcgcctgcgcgtcccgctcgtttcggtagtaggaaaagatggccaccggcagtcccatgattatgtgacccttacagctccagatcaaaacagaaagcctttcctgatacctctgagaacaagtccagggcagtccagggctggctcacaggctattcctagagccagggatgagctgaagaggcgcctgaaagctgagaagaaagtagcagagaaggaggccaaacagaaagagctcagtgagaaacagctaagccaagccactgctgctgccaccaaccacaccactgataatggtgtgggtcctgaggaagagagcgtggacccaaatcaatactacaaaatccgcagtcaagcaattcatcagctgaaggtcaatggggaagacccatacccacacaagttccatgtagacatctcactcactgacttcatccaaaaatatagtcacctgcagcctggggatcacctgactgacatcaccttaaaggtggcagctttcccagctgaagaggatcatcataatgaagaaagacaaacaaagaaaaaaagaaaaacaaaacaccgacataaattttctgaagaattattgcaggaacttaaggaaatatttggagagaacggttatcctgatttcaccactaggaaaacactggccaacaaatttgattgtccggttaacgtgataaaccccaggagcccccaaaggggtcctccgcggccccgcccctttacgtgcggccccgccccttggcgtggcgccctgacaaatggcgccggaagccccgcccccggccggttgctaggctccgacagccggaagtcccgcctgccgtgtagtcgccgccgtcgctgccgctgccgctgccgccgtcgttgttgttgtgctcggtgcgctgagctccgcggctccgcgagccggttccgtccccttcccgccgccgccatgaagtggatgttcaaggaggaccactcgctggaacacagatgcgtggagtccgcgaagattcgagcgaaatatcccgacagggttccggtgattgtggaaaaggtctcaggctctcagattgttgacattgacaaacggaagtacttggttccatctgatatcactgtggctcagttcatgtggatcatcaggaaaaggatccagcttccttctgaaaaggcgatcttcctgtttgtggataagacagtcccacagtccagcctaactatgggacagctttacgagaaggaaaaagatgaagatggattcttatatgtggcctacagcggagagaacacttttggcttctga

SEQ ID NO: 4801 - DNA, 631 bp, Homo sapiens
  SIMILAR (181)..(285): 911254mologous to Homo sapiens PRO2852,accession number AF130079,Smith-Waterman Score=165.
tttttgagatagggtcttgctctatcacccaggctggagtgcagcggcacgattctttgctcaccactacctccgcctcctgggttcaagcaatccccccgccccagcctcccgagtagctaggaccacaggtgtgcgccaccatgcccggccagtttttgcattttctagtagagacaggggtttcaccatgttggccaggctggtctcgaactcctgacctcaggtgatccgcccgccttggcctcccaaagtgctgggattacaggcgtgagccaccaagcctggccaccttttggctttttggacagaactctttcaattgtaagtcagaaaaccaacacaaaccggccttaatcaaattaacaacaggaatctgtctcacataattggagacatctaaacagtgttactagatctttgattcttcttggctgtttcctttgttgccttcattctttgctgggctttctctaggtagtaggaaaagatggccacgggagttcccatgattatgtgacccttacagctccagatcaaaacagaaagcctttcctgatacctctgagaacaagtccagggcagtccagggctggctcacaggctattcctagagccaggctgaaggtaa

SEQ ID NO: 4802 - DNA, 3403 bp, Homo sapiens
  SIMILAR (129)..(212): 501254mologous to Homo sapiens Human secreted protein, SEQ ID NO: 6953,accession number AAG02872,Smith-Waterman Score=72.
aggtacgatcttgctctgtggcccaggctggagtgcagtggtgctatcacagctcgctgtaacctcaaactcctgggttcaagcaattctcccacctccacctcctgcatagctagggctacaggctaattttttttaaattttttgtagacacagggtcttgctatgttgcccaggctggtttcaaactcccagcctcaagtgatcctccacctcccaaaatgctgagattataggcctgagccaccatgccagacctgcttgtgcttttgatatcatatttaagaaaccactgcatatcccattgtcacgtttactaagtttccaagaattttatagttttaactcttacatttaggcctttgatccattttgagttaattttcttatatggtgtatgaggtagtggatggtataactttatttactcatttttctcagggcagggtatagccccagtggatcgaggtcagagctgtgggaaggccccaaaggcatttgctgaggtctgattatgccagacacctaggtgggactctagtcatgcacagccttgtgctttatgttaagggtttcaccctatctaagagcaacaggagagaagagatcaggtctgtatattgaaaactctggctgcaatgtaaggaatggggtgagactagagacctgttaggaggttactgcaccaatttggaggagttaatagctaaataggatatagtgcctagttagggaagtggaaagatgagagagaaatattctaggaggtagaatggatgagagtcaagactggatgatgtaaagaatgcagcctttggtcaaaaacaaggtatgagtaaagtcactggttttattgagcagctcaaactagttctgaaggcaactgttcagaaggcgttcccaacagcttttgagcaatgcacagcctcccataaaaccttaaaaagtacatctgttaatgtgcacattagtctttgttagtcacgttcactaaatgcattaaccttacatatacttccaattaaaaaaacacataggcttttcagtattttggcctagatttttgttcaaatgagtccaaatgtgtgagtgaggtttacctgttttctgattctgatctataaaaatgggtggtctcaaaagaccagaaagtttattcatagccaaaaatggacaaaaagagttcttattctcccaaaatagggaaattttgtattcctatagtcaaaacaataaacaatttttgaaattaaaaaagttgagaatcttgaaattcatttttttcagtagaataaaacaataagcagcatgaaaacgtaaagtgctacataaaagccccacattacataaattttcgaaaagttttattggccttaaacagttacaggtgaaacaagattaccgtattttttttttcaagcatgctattttaattaccttgatatctcatcatgtgctatgttggtcaaataaaatgtcatgagttatctagatctgaggattaaagaggagtcctcagcctttacttcgccagaatatacatccagttttagctgtatgctgggaattaagggagttaaaagtaggggctttaaaggataatagttttctgaagagggcctttcagtgggggcttgggacaaaaaggggccccaaaggaccaattttggctcatttaaccctcacactggggggatccagattgacaacttaagggtttttagggagcatatgttgagatcaaagggaagaagaaaatggtgcccctttcagaatggtgctttcaggtgctaaaaaatatcccaacacaaacaagcaggtggctagctgacaggtgggggaagagatgcaagtcagatagcaaaggatctgcacagtgccaaaatcttcttggctttttatttaacttagcagtgaatgcagcaggattggcttaaagtataggtacaccccatggaaacatgcaataagatcacatcgatccagaggctggctcaagtttgactcgagggcgaaacgcgagggaaggctcgttcctagcacacaatctcagcagagcgttgaggtggtggggatttctttcttctcatatgacgctaccgtcgcgtgacttcttactaggagaccactgagcactgaatcaaggtttctaatatgtttcaaatcaagattttagagtgtattttcttatggcaatagagttataaaatggtaacctatgattttcctcatataatgagatcttcataaagtccttgagctttttagactttaacaaattcagctacagatataaaaaaataatctgtaaacacctttaaaaatgcgaatttattaaagtttaagacaattctgtattatataatagtgtacaatatgttcttattttagatgtagaaataaaggaaaactggctctcagatgaaaacagaaaattgtgtctgacagttaatagaacgaatgtcccataaacaggagtaaaaattaaatttgcctttaagacgcattggcacaattagttctctagtccataattgcacggagttaaaacctcataatgtctttatgaatccctccccctatacctattccaagataatacatatgggctaacttttcgtggacccgatctaggaacctaaatacccacttcccaacattgtttggacttggtaaaaaaatttaactttacaaataacacttttgggagccataaccctatttgaaagccttggaacccacctgtatttaaaaattaaatcttcattaacaacaccctcaagagtgccctcagtgctgcgaactgaacatgctgaaggcaatgtttttctgtgattatatggtttcaccagccattatgatgataatattatcctactagagtctgtggcgctagctagcactaagttatatattgatttttccactgaaaattctttcttgggctctgactaggtggacaattctaagtaaaggtttttctaacttctatcactggttacttggggccctgaggttttctattaaaataggacatgaaatattttccaatattatgcatattcctggaataattaaaatttatactgattataaagctaggcatataatacatcccaaaagacatacatttcaaagcagaccaaacattcaaatcttcagatccccccatttaacttctggaagaaaaccaagcgatctcctggcttgggccctttcttccttaaaaatctatggaagactgttttctttctttttaaatttgtgtgattatggcagcagagggcagggggtggtgataacagcatatcaaagtggttacaaagtactccctcttcaagtagcatccagtgacaaagatgtgatctcatttcctcataaatgtttgactgaaataaaatta

SEQ ID NO: 4803 - DNA, 628 bp, Homo sapiens
  SIMILAR (58)..(285): 611254mologous to Homo sapiens PRO1722,accession number AF119851,Smith-Waterman Score=207.
ctagacagggtctcgctctgttgcacaggctggagtgcagtgacatgatatcagggctcactgcagcctccacctcccaggcccatgtgatcctcccacctcagcctcccaaggaactgggactacagccacacagcaccacacccagctaagttatttttttttttagacacggggtctcactatgttgcccaggctggtctcaaactcctgggttcaagtgatccttccacctcagcatcccaaagtgctgggattacaggcatgagccaccgcatccagccacacatctctttttgaacatggtcattctgaaacctattcagaagtggttaggttatgaccatgcccattttccaacctagggaactgctggcagcttgacagggaagtcacggtgactccagaggttactgcatgtttcatttacgttacatcctgtagtgcttggctttttaaagcaaaagttgtgagctcctctgcattgtgcctccttccccaaaaaggctgccacactaccgtattaagaaaccgtataagttgctactgcagggggtgaccttgagagaaagagttgttacagaaaaggaaaataaatgaaaatttttaattcagaaaaagaaagtct

SEQ ID NO: 4804 - DNA, 614 bp, Homo sapiens
  SIMILAR (206)..(328): 681254mologous to Homo sapiens Human myelin oligodendrocyte glycoprotein gene,accession number AAZ29204,Smith-Waterman Score= 150.
  misc_feature (1)...(614): n = a,t,c or g
gttanngatttatttatttatttgagatggagtcttgctctgttgcccaggccagagcgcagtagcgntncttcggctcactgtaacctccacctcctgtgatctcctgacggtgaactcctgactttgtgatccacccgcctcggcctcctaaagtggtgggattacaagggagagccaccgcgcccggtctttttattttgttttttaaatgtttagtagagatgcagtctcgctatgttgtctaggctggtcctgaactcctgagctcaagctatcttcctccctcagccttccaaagtgttgggattacaggggtgagccaccgtgctcagctgctaaagacttttaaatcataaggaaaaggataactgcaggaacatcatcaggaactcagacgcctgggcaaaggtaaaccacactggtttcttatgacagaaaccctccttgattcccttcaccaccaccaaattctcccctttgcccagcagcctaggctgcagaatagggcactgcctttctcactacccatgaagagaggcactctgatccctgatattgaggggttcattgcaagtcacttcaggaacaggcaatcaagcttacaatgtttc

SEQ ID NO: 4805 - DNA, 1104 bp, Homo sapiens
  SIMILAR (383)..(66): 421254mologous to Homo sapiens collagen I alpha-2 prepropeptide,accession number AC002074,Smith-Waterman Score=118.
tttttttttttttttttcccggctggaaaattttgagttttataacaaaccgttttgtacaaacccggggcccaggggcccaccccgggtgggtcccccgtttgcccctcgccggggtgccttttccctcccccaagggggcccattttaaagccttttgttttccccaaggcccaacccctcgggcctttggtccggccaggcctcccccccaccggcgcacttccttgttccgtaaggtaggtggatagatctcccctcccctacatggtaagccccggcccccccggaggcctgcgcggaggggcgggacctggcccggttcatccccggggtcccgaagccccaccccgcgctcgaggaaggggcagggaaggagggccagcagagtctgttactaggttcccatggcaactaagagggggccatttccagccttagcactggcatcgggaggtgtccgttggctgctatttccatggcaaccaggagtggcagttccctgggcaaatgggatacaagtttccatgacgatgaaagagtgggaagagccaggctggaggagtcccatggtccccattcttgggctggcgcccccagccataatgcgggtccggcgggtgccgccgctcaatacagtaaaacaagaacaagcctgggggtggcgcagtcccaaatgggcgcccaccggcccggtctcaggtctcagtacaagctggtccagtcccctcacaccccggctcccccaggtccgagattcccccggttcaagtaacacttcagtacagatgaatgttcaagtattgtgcgaagaggcggccagggggttggggcgcccctcgccactcccttgggccgcgagctgaagagcggctgcccgcggcccccactccttgcaatagctgccgttttcagtgacgttcaaggagtcagggtcagggggaaggaactgaagcctggggaggggggaagcagagaggtgacccacaagggggtattgctgtccccacacctgctctcatcctcacctccagctcagccccagcttgcccctggttcccctacctcatgacacctggatccccaattgctcctccggttttc

SEQ ID NO: 4806 - DNA, 377 bp, Homo sapiens
ttgtatgtcttgtaatttgtatgtcatcttgcaattgtgtactatgtaccttggatgtaccttttaaagatcgttggtggtgggacacgtgttttttgaggaagatggtactgaggtcagcaccctggctgccctgagagtgcagtgccacgttccccaccctctcgccaaccacaggattatgctgcaaatgtaaatctttaccaatttgataggcaaaaaatgggatctcagcattttagcctgcatctctgagtactaacgaggctgaacacgaaatgagcttattttcttttcagaagcccctgaatgtgacagtgatccgcagggggggaaaacaccagcttagacttgttccaacacgctgggcaggaaaa

SEQ ID NO: 4807 - DNA, 867 bp, Homo sapiens
  SIMILAR (289)..(507): 951254mologous to Homo sapiens proteasome subunit p27,accession number AB003177,Smith-Waterman Score=346.
gaatatgtggactataacgggggcgctggggtccagcacatcgctctcaagaccgaagacatcatcacagcggttagaacccccttccctgtccgaattcctctctcattcagagccagggacgatctctgcaaaattgagagggcgggtggcggcagtcctgggcccgtttctctgggctgggagactgacaggactccctcactgcttcttgcaactcatgggcaggcacagccacacccacccccagagagttcagtctccacagaacccctgggctttggaggcctgcagaatgatcacaaggcagtgatgaagcaggtggaggaggccctgcaccagctgcacgctcgcgacaaggagaagcaggcccgggacatggctgaggcccacaaagaggccatgagccgcaaactgggtcagagtgagagccagggccctccatgggccttcgccaaagtgaacagcatcagccccggctccccagccagcatcgcgaaaacccaaagaggtagcaagtcaaagctttccttacaattggaggatgcagaaacagatgagcttttaagagacctgagcacacaaattgaatttcttgatttggatcaaatcagtcctgaggaacaacagattagttcccctgaaaggcagccctcaggagagcttgaggagaaaaccgaccggatgccccaagatgaactgggacaagaaagaagggacttggagccagaaaacagagaggagggacaagaaaggagagtatccgacatccagtccaaagcagggatctcccgggagtcactggtgtccagcaccacagaggacattctgtttcaaaaggataaaagcaccccggtgtatcccttg

SEQ ID NO: 4808 - DNA, 1206 bp, Homo sapiens
  SIMILAR (758)..(871): 1001254mologous to Homo sapiens proteasome (prosome, macropain) 26S subunit, non-ATPase, 9,accession number BC002383,Smith-Waterman Score=202.
  misc_feature (1)...(1206): n = a,t,c or g
actgttctcgcgttcgcggacggctgtggtgttttggcgcatgggcggagccgtagttacggtcgactggggcgtcgtccctattctcgggagccgggtctctggagtcgcggcccggggttcacgatgtccgacgaggaagcgaggcagagcggaggctcctcgcaggccggcgccgtgactgtcagcgacgtccaggagctgatgcggcgcaaggagcgagatagaagcccaagatcaaggccaactatgacgtgctggaaagccaaaaaggcattgggatgaacgagccgctggtggactgtgagggctacccccggtcagacgtggacctgtaccaagtccgcaccgccaggcacatacatcatatgcctgcagaatgatcacaaggcagtgatgaagcaggtggaggagagccctgcaccagctgcacgctcgcgacatggagaagcaggccccgggacatggcttgaggcccacaaagaggccatgagccgcaaactgggtcagagtgagagccagggccctccacgggccttcgccaaagtgaacagcatcagccccgggntccccagccagcatcgcgggtctgcaagtggatgattgagattgtgggagtttcgggctctgtgaacacccagaacttccagtcactgcataacattggcagtgtggtgcagcacagtgagggggccctggcacccaccatcctactttctgtctctatgaatttgactactccagggacctcatctagaagcccctgaatgtgacagtgatccgcaggggggaaaaacaccagcttagacttgttccaacacgctgggcaggaaaaggactgctgggctgcaacattattcctctgcaaagatgattgtccctggggaacagtaacaggaaagcatcttcccttgccctggacttgggtctagggatttccaacttgtcttctctccctgaagcataaggatctggaagaggcttgtaacctgaacttctgtgtggtggcagtactgtggcccaccagtgtaatctccctggattaaggcattcttaaaaacttaggcttggcctctttcacaaattaggccacggccctaaataggaattccctggattgtgggcaagtgggcggaagttattctggcaggtactggtgtgattattattattatttttaataaagagttttacagtgctgatatg

SEQ ID NO: 4809 - DNA, 2559 bp, Homo sapiens
  SIMILAR (812)..(717): 341254mologous to synthetic construct Fusion protein encoded by pURLP1.9,accession number A11178,Smith-Waterman Score=44.
tcaataacctgactcaccacatcccccttgtgtgctacccgcaccctcgccatacgactcgccgcagaccagaccgttctggcacaccgccctgaacatgcccggcagcatctggtacgaactggtgccatcgtgagagttaagcaggataatttccggaacctgtttaccggtaatttgcccctcccgacgtaggcgcagcatatgcttagtatgctcacgacgacgggggtcacgtacccgtgtctgacaggcaaagaatggctggaagccttcccgctgcaggctgtccagcagggaaattgtgggtatatacgtgtagcgttcactgcgggattcgtgtttatcctcactgaatacgctgggcaccacgcgaaataactcttcacgggttaacggacggtcacggcgaataagatttgcagcgccaaagcgcgaagccagacgggtcataagcagactcctcagtatgggtaaaacaaataaagaaagccctgccgcacttgcgacagggctcggagaataatagggcagaattaaacactcagaagaagaaatcccagacagcgcgggccacgtatcgagtatggcacctacggtttcaccgaaatcgtcacgtgcctgctcccgggctaccgggtaccgagcacgattgcgtaaccctcccttgtccttttgtgcattccgaacatcagggttaaacgatccaactttctggtcattgacgtagacgtcgaactgccgggccttacggatatccatgatgaagctgaaccaggcattatctccgttacgccagccaagggttgagggaatggcatattgcttatggtccatcaccactgtgatgccggtactgtcatcatgcgagctgaccgttttatccccggcgaggatcagaaaaaccgagtgctggtaaataccgttctggtccggatttcccgtgcagttgatggtaaacatctttccgctggcatccgtcacactgtattccgcatttgccataatgcctgcacccagcaccgcggcctgtttcggggtttcaacgtctttggtgagtttcttcgctttgccttttacatattgatcgttaaggaaaatgccgaccagtgcgcgggcttcgttggtattatcgaactgggcgaaatcgatcgcgtgatgcaggcgctgccggatgtcgaacaagccgttacccacgcctgtgtgattaaccaggcggctgccaccggtggtgatgcgcgtcaattggtgggctatctggtgtcgcaatcgggcttcaacatcaacggtaatcgccatttgaccactaccatcaatccggtaggttttccggctgataaataaggttttcccctgatgctgccacgcgtgagcggtcgtaatcagcaccgcatcagcaagtgtatctgccgtgcactgcaacaacgctgcttcggcctggtaatggcccgccgccttccagcgttcgacccaggcgttagggtcaatgcgggtcgcttcacttacgccaatgtcgttatccagcggtgcacgggtgaactgatcgcgcagcggcgtcagcagttgttttttatcgccaatccacatctgtgaaagaaagcctgactggcggttaaattgccaacgcttattacccagctcgatgcaaaaatccatttcgctggtggtcagatgcgggatggcgtgggacgcggccgggagcgtcacactgaggtaatccgccagacgccactgctgccaggcgctgatgtgcccggcttctgaccatgcggtcgcgttcggttgcactacgcgtactgtgagccagagttgcccggcgctctccggctgcggtagttcaggcagttcaatacaactgtataccttgtggagcgacatccagaggcacttcacccgcttgacagcggcatccagagccaccatccagtgcaggagctcgctatcgctatgacggaacaggtatcgctggtcattccgatggttgcccggataccggacctggcacaatgctccggagtcaggctccgccacccgctggtcaccattgatggcgaagacgcccgtgactttgacgatgcagtttaccatcgcatcagttgtgatgatttttcctttaatatccagcatgttaagaagttcagggatagctgtgatctcattggatttcttatccgtcttgatctgcccgatgaccagactgtgcattgttgagaacgcactaatgacatgaatcgctcccctgcggcgactcttgtcataagagtgccggagcgtttttccatcaattgcaatgacgtctttatcatttgatgaatggcaatcacgcatccagttaataaagcactcgtgaaattttgcaggactgatacaggatacaactctggcaatagtatcgtgaacaggaataccattttcaaaatcaccatattgcttcaagaaatcgagatgtgtttccccgaaatcctctatatcttcccaactttcttttggaggaggttgacggtttctaaggatgattctttctgagtgaaatattgtcagtgtcattgaccttttcat

SEQ ID NO: 4810 - DNA, 1083 bp, Homo sapiens
  SIMILAR (61)..(399): 441254mologous to Homo sapiens proteasome (prosome, macropain) 26S subunit, non-ATPase, 9,accession number BC002383,Smith-Waterman Score=157.
  misc_feature (1)...(1083): n = a,t,c or g
gctcgagacccctgtccangtggtgttagacgcccgtccgggacatggctgaggcccacaaagaggcccatgagccgcaaactgggtcagagtgagagccagggccctccacgggccttcgccaaaatgaacaggcatcgagccccggctcccccagcccagcatcgcgggtctgcaagtggatgatgagattgtggagttcggctctgtgaacacccccaagacttccaatcactgcaataacaatggcaatgtggtgcagccacagtgaggggaagccccctgaatgtgaccagtgatccgcaaggggggaaaaacacccagcttaaacttgttcccaaaaacgctgggccaggaaaaggaactgctgggctgccaacattattccctctgccaaagatgaattgtccccccggggaaacagtaaacaggaaaagcatccttccccttgcccccggacttgggtcctaggggatttcccaacttgtccttcctctcccctgaaagcataaaggatctgggaaggagggtttgttaacctggaacttctgtgtggtggccagtactgtggccccacccagtgtaatctcccctggattaaggcgattcttaaaaacttaggctttggcctttttcacaaattaggccacggccctaaataggaattccctggattgtgggcaagtgggcggaagttattctggcaggtactggtgtgatacattattattatttttaataaagagttataacagtgctgatatgaccctgttgtcaccccagctgaatttcttatgacccttccaaaccaccgctcagatggtgtaagaagagcttcatagaaagttgggcaaaacaggctagcaattgcaaagtcaggctttgaccaacatatttctttgcactgaagccttgctgctgtggatacggaaatggataagtactgagcttgctcaacagctggactgtcagggccatactacctgactttgaataacaggcatgcatggacgcttttcaagtggcccagcgtggtgtcctgtcagcttcctctttatgaactcaccagagggcagcaagctc

SEQ ID NO: 4811 - DNA, 1488 bp, Homo sapiens
ctctcgggtcgacgatttcgtgtctgctggagatcatgaccaaggacggcggcgacatgccggcgcccctggaggtgtccaccgtgccggcagtgggggacgtgatctccggggagtacaacggcggcatgaaggaactgatggagcacctgaaagcccagctgcaagccctgtttgaggacgtgagggccatgaggggggccctggacgagcaggcctcgcacatccaggtgctctcggacgacgtgtgcgccaaccagcgagccatcgtctccatgtgccagattatgaccactgcgccccgccagggcggcttgggcgtggtcggcggcaaggggagcttccagagcgacccccaagagccggagactcctttcgcctggggattcggggacagcggcttgcttggttcgcgattcccgaggacgaggaggaacgaggaagaagagaaggagatgcccagccccgccacaccctccagtcactgtgagcgccccgaaagcccctgtgctggtctccttgggggggacgggccacttgtggagcccctcgacatgcccgacattaccctgctgcaactggagggcgaggcctccctgtgaggggactccgtggggcactaccttcccgggctgtctttgggtttccgagtgcatgacgcgagggggactgaacggcgcggtgcggcatgcttcacttggacagctgctcttgtgggtcaggcagagagagactccctcgaggaaggatttgtagggtgaaggactttgggagcatcgagaattctttctgcccaactaagcgaattatagcgaactgcggaaaggtgaggctccgggagaggaagcgcccatctctggactcccatccatccctatcctgtcctttcccccttcccagacaacaggagaacccgtgaactgtgtaaataaaattctgctttttctattctgaaaaaggacttacctaggaccatggcaaataatctctaacaatttacctggaaattaaggaattgggggtattttgttctggcaacaggaaatttacccttctgctgaaatccaagatattcagtgctctgcagaagcctctccccctcacagatctctgcggctgctgattggtaaaggaagcttgaggagggaactgcagccctaggaatctgggtgaatggggttccaagggcccctgggctgggaggagctggctatgaatgtgcatgaagacataatagctcaacctctaggattttgcatgcagagcggatcctgccttgtcactgacttcatctgggattgcttttccactccctggggcttaaagaacaaagagcccggttcacaggcagagactcgggggtgctcagcagcagcccagatttaggggacatttgagggactcttggggccgcagccaaaaactgtctctcctggctacacctgcttaacttcagttcctttttctgtcaatatgtcccttgccact

SEQ ID NO: 4812 - DNA, 1031 bp, Homo sapiens
  SIMILAR (14)..(238): 781254mologous to Homo sapiens PRO2822,accession number AF119900,Smith-Waterman Score=302.
tttttttttttttttttttgagacagagtctcgctccgttgcccaggctggagcgcaggggcacaatcccggcccactgcaagctccgcctcccaggttcacgccattctcccgcctcagcctcccgagtagctgggaccacaggcgcccgccaccatgcccgactaatttttctgcattcccagtagagacggggtttcactgtgttagccaggatggtctcgatctcctgaccctgtgatctgctcacctcggcctcccaaagtgctgggaccacaggcacgagccaccgcgcccggcccattatttttaaatagttagaacatagtgaataagctataattgtagacactgaaaaacaagacaaagtgatcaaactaattatagcactgacaggatgcaaaatggaagacagaggtaggtctgcaaacagccacacaggtggaaattccaattgtaaatggttctctttgaaatactcagttttacataaatgcttatccagcagcacgtcataaaccacagggccaaaacaatttcttgtcacgtaaacatggcgttggtagctaaaactcaaatttagcaacaaataattgttttcatagggactcataaggataaccttaaattgttaggatgcttttaggggcattgggctaattcaggaattgggctggtatttataacaggaactttaatttttgcagggcatttaaaggttttcatgcattatgtacctgaaggttttgtctcttaattttctttgaaccacacctcttctccttattataagaaaaaccctcttagggtaagggaagcccaaattaactgtcctgaaattttgcattatatttaaaccataatatttgatttacttctgtcaaacaaaacactaccatttgggttctcatttgtagattatttaaaaacatgtttttcctgttaattatcaatgcatttactatcacaaggattaaaaagatcacttcaggtggtggggatgtttcataaaacaccatggtggggagtag

SEQ ID NO: 4813 - DNA, 996 bp, Homo sapiens
  SIMILAR (11)..(766): 511254mologous to Homo sapiens similar to a C.elegans protein encoded in cosmid K12D12(Z49069),accession number D86978,Smith- Waterman Score=429.
actggcaatatacaagcatgctgggggggtcttttcttttatccttttacaaacacttaatacatatggtccggggcaagataccaaaggttcagtgcttgcatactggcgcctgcctggtttatgcattatcatctacctggtgaaacagagtgctaaagacttcttcagctattatgacatcaatcgacagagtgtcagcaagctacataaatgtagagcagcttccccccagatgagataaaagagttgcgtcaaactagcgatgcctgctggggtggataaaagctccactgatcaaaaatatgttcaagcaggccggcggctgggtaaggtgatccaacaatcgaggctaaactgcttccccttggtttcttatatcatagagaccctgcctatttattctttggcgccatctggagtactaccttgttacattgcatgcccacggatttctcaaaaatccttatttgcctcgaggaaccttgttttaaaagcagaaggactgccaaggattcccttcgcctcaggaaacccaatcctaggatttttagaaagtggggctggcctatagtgaggccaaccatggattttagacccagctttcaggcctgatgccaatcaacggctttttggagaatcactacccaaaaagaaacttcttggacattgaagggttattatatcaaaagttcgattcttcggatatagtttcatacaggctcttgtcagacgtatccgtggcctcttgaggatatcaaggaactgagaagcccgtgcttatgctcttctatgagaggggatgaaattggggagaattgtctccatgtttatagattagtttctttctaaatttatgaccaaaaaatattttgcctatttctttcttttgtatatggacatctttttctgtaaacttcttccccctaggttccatcctctctagtaaaatataaaatactttttaaaaaaacaaaaaaaaaaaaaaaaaagcat

SEQ ID NO: 4814 - DNA, 424 bp, Homo sapiens
  SIMILAR (347)..(303): 1001254mologous to Homo sapiens Human secreted protein, SEQ ID NO: 5643,accession number AAG01562,Smith-Waterman Score=72.
  misc_feature (1)...(424): n = a,t,c or g
actggcttccactttgtcctggggtttagatgggactggtgtccggctcagctcaccncagtgcccaggtccaggctctatgcannnnnnnnnnnnnnnnnnnnnnnnnnnnnnnnnnnnnnnnnnnnnnnnnnnnnnnnnnnnnnnnnnnnnnnnnnnnnnnnnnnnnnnnnnnnnnnnnnnnnngcaccctgccaatctccatataccaatcatctccatctggcttccacaattaccaattcttggccagtggtgttggagccacgcttccaatcacacctcacccgacgtcggattaccttatcgggttccttcgccgccgtcgccgtcgccacggcctccatcctgattctctcggacttttcaaccgcccggcgggccccgcacactaacctccggacgaaatcgtcgaaccgggaat

SEQ ID NO: 4815 - DNA, 3402 bp, Homo sapiens
  SIMILAR (163)..(411): 551254mologous to Mus musculus putative,accession number AK004762,Smith-Waterman Score=215.
atgcgcaatgcaacgtctgccttaggcccggaacttcggtgcctgggcgcagcggtgcacccggacccggaacattctcaggcgaaagtgtctcttgcgtgcgtgggccggaggttagtgtgcggggcccgccgggcggttgaaaagtccgagagaatcaggatggaggccgtggcgacggcgacggcggcgaaggaacccgataagggctgcatagagcctggacctgggcactggggtgagctgagccggacaccagtcccatctaaaccccaggacaaagtggaagcagctgaggcaacaccagtggccctggacagtgacacctccggggctgaaaatgcagcagagagtgctatgctgcacgctgtagccgccagccgcctgcctgtttgcaggccagcagcagggtgaacccgacttgacagagcatgagaaagtggccatcctggcccagctgtaccacgagaagccactggtgttcctggagcgcttcccgcacaggcctccgtgaggagcatctggcctgctttggccacgtgcgtggcgaccaccgtgcagacttctactgtgctgaggtggcccggcagggcactgcccggccccgcaccctgcgtacccgcctgcgtaaccggcgctatgctgccctgcgagagctgatccaagggggcgagtacttcagtgatgagcagatgcggttccgggcccccctgctatatgagcagtacatcgggcagtatctcacccaggaggagctcagtgcccgcaccccaacccaccagccccccaagcccgggtcccccgggagacctgcttgcccgctctccaacttgctgctccagtcctacgaggagcgggagctacagcagcgtctgctccaacagcaggaggaggaggaggcctgcttggaggaagaggaagaggaggaggacagtgacgaggaagaccagaggtcaggcaaggactcggaggcctgggttcccgactcggaggagaggctgatcctgcgagaggagttcaccagccgcatgcaccagcgcttcctagatggcaaggacggggactttgactacagcacagtagacgacaaccccgacttcgacaacctcgacatcgtggcacgggatgaggaggagaggtactttgatgaggaagaacctgaggatgcgcccagcccagagctggatggggactgatggccgccacccttcccaccgcctgccccatccccatccccaacaaggcagctgattccaggcctgctcagtgaccctttctctagggggacatcagggcagtgccccacaacccacacacaccaccatctcactgggtctagtctcatctcagacaacccccacccccactgtttctggggttccctttctcatctctcccaccctgtctcctgcctctgtctttcttggtgtctgtctgggcttctttctgtctctttctgtctttctgtctctctccctacccccgctccctctttccagtgctctggctggctgtctctccctttctccccctctctctctgccttaggctctgtctccaccgcagggcccaaggtgaaagtcctccccttgccggaggccagctggcggggcctttcgtggctggaagtggccagtttggttccggtgctgacccctaggccccagcgcagctgcctaaccgtgctgtctgtcttcccctctctgtttatgtctgcgctgtgtctcacactcagagcctccttgctttctgttaggttcccatctctccttctgcctcactctggggcctcttctttctacttgtacatttccacctctctaggcctctgctctcactgtccctctctgtctgtctctcagcctttatctctgggttttgatcccccactccaggctctgggccccttcttcccccttccctcaaacctggctgctataggcagaagaaaccctgaaccaatgagtaaataacagccccaggggagggaggagaccccaggcagggaggatgggggcagctctcttctctccccaggacccaggctgtggatcacggggcctgccagcttgagtgtagagggaggggggactctacccttctcagccccaccagcccccctctgcccaaccacaattttcccttcctccgccttcctctccctctcctgtttacactccccaaatgcgcacaggctgttatcatgggtcctgagtcatcccacacacagcctgccccagcgtccctgcccccagctggccgcagggcccgccccatggagccccctgccgccctgggctaatgggagccagatggccgcctggtgactcagccaccgggcctgtgggaacccaggcgtcccgctgtgcccatgcccccacacccgggtcctgctcctacagcagacacacacaggagggccttggccactgttgagggggcacacagggcaagggtcaccaaagtcggggcctagggactccttcatgcctctgagatggaatggtggtatcctgccgtggccaagcctgaaggaccctcaaaactgcctcctggagtccacggttcctgacctccgagcctcagctatgccctctgggtcaaccagaattagagccagacagggaaagtgagagctggatggaggcagacaagatgctcagagcgactattaaagaaaaaaaagcctctgctacggagcgcttctgtcctctgtcaggcccgagcgaagtgcctgacaccgggttggatcctcagatggccccatgaactagtgaagtgggtcaaaggaggcctggaaagaaggtgcttcctgcaaggccactcggccatcagaggcagaaatgaaacgggaacccactgctctaaaatcacaaaggtcctagaaaccacttggctgtctggcctctcaggtgtcagggccatccagagtgagacagcattggagggacaagtgtgcatgcagatgtccctcagacgggaaggtttgaaaaagggtcaagatggtaggcgggccctaacaagggctcccgtgcctagccactgtcccgcacacagacaggatcaggtcatcttgaatatggagatcagttccccaaatcactgaattgtcccagcagtgctatgccctaggtactaccaatatcactcctctatttcccagaggaggaagcagccagctagactcccaggaccttggggtcatatctctcagaaagccaagagtgcaggatgagagctgtctgtctcttacctgcctgtatttgtgccccatttttaaagagcagagggcctgggccacaggaaaggtatcagcccttggtgataggcacattttttaccagtctatcatttggtaaattaaatttgtttacaataaaaaaataaaaaaaaaaagaaaag

SEQ ID NO: 4816 - DNA, 1192 bp, Homo sapiens
  SIMILAR (84)..(335): 371254mologous to Leishmania major extremely cysteine/valine rich protein,accession number AL390114,Smith-Waterman Score=141.
ccttgaggatggcttgacctgggattgacaaagtgtgtctgctgaaatgctgaggtccccacgtgtgaatgggtgaggctgatgtgtatgtctgtgtgtgccagcaagtgggcgggggatgtgggtgtctgtgtatgccagtgggcactgtgaatgcctaggcatgtgctggtctctgtgagcttgtgtgttcctcagcaagaatgagtgtctttgtgtatcacctggggacttgtcagtgtctgtgtctgtgtgtgcctgtgagccatcatctctgtatcagggttgctcatgctgcgtctttgtgcgccatggtgtgtcagtgtctgtgtgttgatgggtggcccatgagtgacccccgccaggggagaccaggctggctggatccagcacatctccccagtggcagcctcgccctctgggtcagggtgactgaggcattttgtggccttaaaacggggtgttcagggtcagccctcagggtggctgggggccttccatcccttctccccttcaggttggtgaaaaggactccggggggccagggtgctgtatagcagctttatggaagttttcaagcttgggctatccttcccttgggaagcacaagacaagggttcctagggttgctgagtgaagcctgaagaccaagccccctcctcctggaatgctccttccacccctacctctcagagatgggcctgacacctctttctcattcattctccttttccctgtgctctgggaaagcccctggctcaggctgtcagagtgaggatggacctcaaaagtttgatcccctcgtgcagatgaagaagctgaagcccagagtgcggaaggggagttggcccaaggttcacacagctaagttttgagttagagccagtctttgggagagccaagtactacaagccctgggggtgtcacaccgcttgtcactgcccctgaggtctcctgccaaacaactgcagggagtttggctaacagtcctgtgtccagggtgccggtggggatgttatagatgttgctgggatcctgccctcggctccaaattctggcctctcatcccaggctgcagacccttctgccccatgacaggcctgggtgccacacagaggtggccacccctcccaccacagtgtctggcagctgctgcccttctcccaggcccccaaacagaagaagaccttgt

SEQ ID NO: 4817 - DNA, 1887 bp, Homo sapiens
  SIMILAR (341)..(1168): 521254mologous to Homo sapiens calpain-like protease CAPN10a,accession number AF089088,Smith-Waterman Score=615.
  misc_feature (1)...(1887): n = a,t,c or g
cccacgcgtccgctcagaaccgagtgaggtgtacattgccgtcctgcagagatccaggctgcacgcggcggactgggcaggccgggcccgggcactggtgggtgacagtcatacttcgtggagcccagcgagcatcccgggcaagcactaccaggctgtgggtctgcacctctggaagggtgtgacacttggcaccacactgttccctgtcccttcatggatgtggcccacatgatgttcctttcctcgttgacananannanggcanangggttttttggggctggaaggcccactgtccagcagcccccaggttgcctgggccacggtgcctttgtgggcccagctacaaggaggacttgcaggctcgtgtctgggacagatactggcgccagggccaagtgaagcccgggattggtgggcatctctagctggtccctgagagagggtggagggtgctgacaggccttggcgctttcatctgtcaactccagaggcccttgtgcttgcagcagggaggtcaaggccagggcgtctgaccccggccgctcctccacactgagcctcctgcacgtgctcacaggtagagaagcggcgggtcaatctgcctagggtcctgtccatgccccccgtggctggcaccgcgtgccatgcatacgaccgggaggtccacctgcgttgtgagctctcaccgggctactacctggctgtccccagcaccttcctgaaggacgcgccaggggagttcctgctccgagtcttctctaccgggcgagtctcccttagcgccatcagggcagtggccaagaacaccacccccggggcagccctgcctgcgggggagtgggggaccggtccaattccggggtttcttggaaattcggcccaaacggcggggggccacaagaacttttgcctcataccccaccaacccctggttcccctttttgggtccccgaagggccctggcccccgctgcgtccgcatcactctgcatcagcactgccgggcccagtgacaccgagttccaccccatcggcttccatatcttccaggtcccagagggtggaaggagccaggacgcacccccactgctgctgcaggacccgctgctgagctgcgtgccacatcgttacgcccaggaggtgagccggctctgcctcctgcctgcaggcacctacaaggttgtgccctccacctacctgccggacacagagggggccttcacagtgaccatcgcaaccaggattgacaggccatccattcacagccaggagatgctgggccagttcctccaagaggtctccgtcatggcagtgatgaaaacctaacaggggtggccccctgtgccagctcaggtgactggacgccgagggcctgacaggttcccagcagctgggacggccagccttgcactgtgggggctggtcctgagtcttggcctgcctcccagccctgccaggaggctgcggcctaggggtccacgggaagcctccgtcaggagagacgcagccctgggggcccagctggtgcctgcaaggaagggtgggaagcttgcctggcttctgttgcgcccactgagacggcagagaccccaggatcccagagcttcccaggatccctcccagatcctctgctgactccatatggaggcctcaacacccagagggtagggcagcagatcttctttataactatttattgttcgaatcacttttaggatgtaactttataaataaacatgagcgctgatgatttgcnnnnnnnnnnnnnnnnnngggggggccctttaaagggaaccaattttacgtcccgggggttgcaaagttataatttttttttggggcccccaaaataaaatcccggggccggggtttaaaaaggggc

SEQ ID NO: 4818 - DNA, 579 bp, Homo sapiens
  SIMILAR (311)..(565): 751254mologous to Mus musculus putative,accession number AK011272,Smith-Waterman Score=332.
  misc_feature (1)...(579): n = a,t,c or g
ctttggtttaaaagcctgctattacaaaataatagtgatgtctcaaagcttgcaaactgttagtctcaaatgccctaaaatgattgatagtttcctccttgattttatgtacgtttggcttggggatgaaaattctaattctagagtgtaggtaataccctattacagagtagataacgcatatcgcattcttaaggagcgaaaataattttgataatggtcttggtatatagattgcataaatattgttaaattgttaatgtttactaaactaagataggacagctctaagtatagattgttttacatagatgcgtttagcccagcccctgctggtaaccaaggtcctcctccaatgatgggtatgaatatgaacaacagagcaactatacctggcccaccaatgggtcctggtcctgccatgggaccagaaggagccgcaaatatgggaactccaatgatgccagataatgggagcagttgcacaatgacagatttcctcaagggaccaccatctcagatggggttcacctaatggggaagtagaacanggttctgnaaacccctcaagcaccaatg

SEQ ID NO: 4819 - DNA, 1017 bp, Homo sapiens
  SIMILAR (559)..(1014): 1001254mologous to Mus musculus putative,accession number AK006344,Smith-Waterman Score=815.
atggagccagaaatggagctgatttcaataacaacaggaaaaacagcttgtgaagatttgactactgaatccaagatgaattcggttttctggaagattcggtttacttattcttcatctcggatatcatcagatgagtacaccacttcttgggctagtgtcttcgtgaatagaaacctcaaaagacgttatgatgttcacattgctcacatcataaggcatagactccatgccagctatgacacttcaaacatttgtttgtctgaaaaagactacatcttcccttcatttatgaagctgcaaggcgagagccatctgatccaacttagacacggcaaggtaatagccatctggtccaccttagacatgggaagggaaagagaacaaccaccacgttttgctcaacctgggacgtatgcatctcgatggaaggctcttgaagaaatggaaaagcagcagcgtgagcaggttgatagaaacatcagagaagccaaagagaaactggaggcagaaatggaagcagctaggcatgaacaccaattaatgctaatgaggcaagccaatcagatggtcaagtgtgaccctcgccacggcaagtacatggcctgctgcatgttgtacaggggggatgtggtcccgaaagatgtcaacgcggccatcgccaccatcaagaccaagcgcaccatccagtttgtagattggtgcccaactggatttaaggtgggcattaactaccagccccccacggtggtccctgggggagacctggccaaggtgcagcgggctgtgtgcatgctgagcaacaccacggccatcgcggaggcctgggctcgcctggaccataagttcgatctcatgtatgccaagcgggcctttgtgcactggtacgtgggagaaggcatggaggagggggagttctctgaggcccgcgaggacctggcagctctggagaaggattatgaagaggtgggcgtggattccgtggaagccgaggctgaagaaggtgaagaatactga

SEQ ID NO: 4820 - DNA, 1513 bp, Homo sapiens
  SIMILAR (1)..(708): 1001254mologous to Homo sapiens pregnancy-specific beta-1 glycoprotein,accession number M93061,Smith-Waterman Score=1253.
atggggcccctctcagcccctccctgcacacagcgcatcacctggaaggggctcctgctcacagcattacttttaaacttctggaacttgcctaccactgcccaagtcacgattgaagccgagccaaccaaagtttccaaggggaaggacgttcttctacttgtccacaatttgccccagaatcttgctggctacatctggtacaaagggcaaatgaaggacctctaccattacattacatcatacgtagtagatggtcaaataattatatatgggcctgcatacagtggacgagaaacagtatattccaatgcatccctgctgatccagaatgtcacccgggaggacgcaggatcctacaccttacacatcgtaaagcgaggtgatgggactagaggagaaactggacatttcaccttcaccttatacctggagactcccaagccctccatctccagcagcaacttataccccagggaggacatggaggctgtgagcttaacctgtgatcctgagactccggacgcaagctacctgtggtggatgaatggtcagagcctccctatgactcacagcttgcagttgtccaaaaacaaaaggaccctctttctatttggtgtcacaaagtacactgcaggaccctatgaatgtgaaatacggaacccagtgagtgccagccgcagtgacccagtcaccctgaatctcctccagcattcttggctgattgatgggaagttccagcaatcagcacaagtgttctttatcccccaaatcactaaaacatatagaggggtctatgtctgtttcatccataactcagccactgctggaacaaatctcataatcaagaggatcatagtccctgatacactgagaaaaagaggcaaccatgaaaaggtggaaagttctgatgacatagaaaatagcaatcagcctttctcacatcccaaggccttcaaaaatatacaagtgcagcatggccagtatggaattcaccgaaaactaatcaccaagctagaaaagtggcttgattctggtctcccctgtgttatttctgctgaaacatccagtcccaggccaggctgctcagtatcttcagggtttcagggccatgggaagtcccattattactcatctctagaatgtccttggaaatggaagttgcagagaaatcacatctatgggggcaaagtaggatggaatttggaaggggcccaccagttgcacattccagcgaagctgcccaagccctacatcaccatcaacaacttaaaccccagggagaataaggatgtcttagccttcacctgtgaacctaagagtgagaactacacctacatttggtggctaaatggtcagagcctcccggtcagtcccagggtaaagcgacccattgaaaacaggatcctcattctacccagtgtcacgagaaatgaaacaggaccctatcaatgtgaaatacaggaccgatatggtggcatccgcagttacccagtcaccctgaatgtcctct

SEQ ID NO: 4821 - DNA, 1632 bp, Homo sapiens
  SIMILAR (660)..(10): 981254mologous to Escherichia coli yejH,accession number U00008,Smith-Waterman Score=1105.
ttattggtactcacgcgttgcatcaaactccataacctggctgatgatgtgcggggtaatacgttgttgttttttcagctcacggttgagatcggcttcgctgaacagcccgttactctgtgcctgcaagcggctgaaatcgtattgcactactggcatatccagtcgttctggcggcgtcagatagccgtgtttaatcatataacgcagcggcagctcataaatgcagtcacggaaaagggctttctcatcgccgcgtaccatgccgtgataatgaaactggtagatccagcctttgcccaatcgaaaaggcgtggcagtcagccccagcaggcgtaagtggggattcacttttgtcaggtgagtgaggatttgctgatactggctctcttcatcgtcaccaatacggtgacattcatcgacaatcaacagcgaaaattcaccctgaaaggcatcaagattacgggcgacagactgcacgctgccaaataccactttaccgtggctctctttgcgctttagcccggcggcaaaaatatcggcttccagccccagcgcctgatactttgcatggttttgcgccaccagttctttaacgtgtgccagcaccagcacgcgaccacgagccagccgtgccagttccgctatcaccaggcttttacggtgaaaaggtaaactctcattacgatcaatcatcgggctgtcggtaatctcttccggcagctcgctgtatcctgcgctcgccatcaatacgacgtgctctcctatcgggtattttgccgtcaggctgacatagggcacccaggcatcctgcgcggaataacttgccagaccgctacgacgggactcactctctgaaatgccatagtaattttcactgaaattctcgtcataatagagaacgcccagcgcaggtgtcagcgacagacgacctatctgcattttgtggaataccgatagctcccccacccagccgttgctgttatccagaacgtccgcagctgcagaggctttcacggttccccaacgctcgtggtgataccaggcaacccccgccatagccgtactatcacgcttatcaagctgttgcatggcataatcgtcattatcggtagggtcaaattccagcggcatccaggatgcggtcaggctaagttcatttttttcactttgcgacagaataaacctaacgtggtctctggctccaccggcaggccgaaaggggtaatggtcgggcagacggctatcgtcaaccgcctgctttggatgcaaaatcattatccgcttacaggcgaagatgtcgttgcccaaaaaacgccgtgcagttttgatgtctcggtgtgggagtttttctggccgtttatcgcaggggcaaaactggtgatggctgaaccggaagcgcaccgcgacccgctcgctatgcagcaattctttgccgaatatggcgtaacgaccacgcactttgtgccgtcgatgctggcggcatttgttgcctcgctgacgccgcaaaccgctcgccagagttgcgcgacgttgaaacaggttttcggctgatttatgccgcgaatggcaacagttaactggcgcgccgttgcataatgggctctgcgtattcttgatgcgatgatgcat

SEQ ID NO: 4822 - DNA, 2919 bp, Homo sapiens
  SIMILAR (799)..(1857): 991254mologous to Mus musculus alpha-tubulin isotype M-alpha- 6,accession number M13442,Smith-Waterman Score=1871.
atggatgtgtattgtgcacatgaaagccttagacatacaaagagccctgaggccacaggccaaacatctggccaaaggcctgaagctctgcaagctttctggccggcctttgggtcctctcctgtaactgggtcctctcctgtaactgaagtgacaacaaaaggccgctggagttcttcccggcaagttctatgggaccgtattcccctggcaaagagcaggccagcaatttcaaacagacaaagccaaaggactaacattccttggtgggaaagctgtccacctatcctgaacctggaaagagaacaaccaccacgttttgctcaacctgggacgtatgcatctcgatggaaggctcttgaagaaatggaaaagcagcagcgtgagcaggttgatagaaacatcagagaagccaaagagaaactggaggcagaaatggaagcagctaggcatgaacaccaattaatgctaatgaggcaagatccaggcttggccctggtgtcctgcatgcagcagggacagtccatgagtaggagtcccaagaaggtctttaaacatctgtatgaactcaaccttacaaaactgcaaagtctcggcagccggagccgactaagatggaaggattcacccttctggggagaagaggcaggaggcaagaggcctcctctggtttccctggctctccacagatctccctccctgctcctcctctttgtgccaaaacatccttctaagggcagacctgattgcactgttcagaggtccccaaagcccacagaaaagtctcaactcctggacctccgtgagtgtatctctatccacgtggggcaggcaggagtccagatcggcaatgcctgctgggaactgtactgcctggaacatggaattcagcccgatggtcagatgccaagtgataaaaccattggtggtggggacgactccttcaacacgttcttcagtgagactggagctggcaagcacgtgcccagagcagtgtttgtggacctggagcccactgtggtcgatgaagtgcgcacaggaacctataggcagctcttccacccagagcagctgatcaccgggaaggaagatgcggccaataattacgccagaggccattacaccatcggcaaggagatcgtcgacctggtcctggaccggatccgcaaactggcggatctgtgcacgggactgcagggcttcctcatcttccacagttttgggggtggcactggctctgggttcgcatctctgctcatggagcggctctcagtggattacggcaagaagtccaagctagaatttgccatttacccagccccccaggtctccacggccgtggtggagccctacaactccatcctgaccacccacacgaccctggaacattctgactgtgccttcatggtcgacaatgaagccatctatgacatatgtcggcgcaacctggacatcgagcgtcccacgtacaccaacctcaatcgcctgattgggcagatcgtgtcctccatcacggcctccctgcgatttgacggggccctgaatgtggacttgacggaattccagaccaacctagtgccgtacccccgcatccacttccccctggccacctacgccccggtcatctcagccgagaaggcctaccacgagcagctgtccgtggctgagatcaccaatgcctgcttcgagccagccaatcagatggtcaagtgtgaccctcgccacggcaagtacatggcctgctgcatgttgtacaggggggatgtggtcccgaaagatgtcaacgcggccatcgccaccatcaagaccaagcgcaccatccagtttgtagattggtgcccaactggatttaaggtaaaacagggatttcttcttggtttggatccattgctgctacccagcagtgctaccagcctccatggtggtactggggatgtctgcagagtcctgtggtgtgatttgtcttcgagtctcccacccgtggataacagcacctgcttcagtggaggtggcaggggagtgaagcagactctgtgggagtccttggttgtagttttgtttagtgccctggctttattgaatgctggttatgctaggagtgaagctgattggggacacagctctgatgcgtttagcccagcccctgctggtaaccaaggtcctcctccaatgacgggtatgaatatgaacaacagagcaactatacctggcccaccaatgggtcctggtcctgccatgggaccagaaggagccgcaaatatgggaactccaatgatgccagataatggagcagtgataatggcatctatgtctttccagtgctgtctagaggcttttggcgtcactttggactctgccttctccccctacccctgcctgctgaattccatatttagtcagcaaatgctgtctgctctatcttccaaatgtatcccatgtcccattacttctgtaaaggtgctgaatgattgggtccccactgcacctacaccctctgtgcctacaccctctgcacctacaccctttgtacctgcaccctctgcactacttacatccactgcacctacaccctctgcactacttacatccactgcacctacaccctctgcacctacaccctttacacctgcaccctctgcactacttacatccactgcacctacaccctctgcacctgcaccctctgcactacttacatccactgcacctacaccctctgcacctacaccctctgtacctgcaccctctgcactacttacatccactgcatctacaccccctgcacctatactttctgcatctacatccgctgcacctacaccgtctgcacctacactatctgcgcctactatctgctgcacctacatcatctgcacctacaccctctgcacctacatcctccgcatctacaccctctga

SEQ ID NO: 4823 - DNA, 1858 bp, Homo sapiens
  SIMILAR (308)..(1519): 611254mologous to Mus musculus putative,accession number AK011272,Smith-Waterman Score=1034.
  misc_feature (1)...(1858): n = a,t,c or g
gcggccgcggcagccagtgagcgctacgcatcttaaccgcgggagccgacaccgcccgcgcaccgcgcctccagaggaccacccggacgaggagatgcgggttcactatcgacatcaagagtttcctcaagccgggcgaggaagacgtacacgcagcgctgccgcctcttcgtgggaaatctgcccaccgacatcacggaggaggacttcaagaggctcttcgaacgctatggcgagcccagcgaagtcttcatcaaccgggaccgtggcttcggcttcatccgcttgggaatccnagaacccctgggctgaaattgcaaaagcagagcttggacgggcaccatttctcaagagcagacctcctacggatttgctttcggttacacatgggagcagcctttgactgttcaagaaaccttttctccagtttgtttttccaattgagctgcttagagcaaagcattttctcagtttggttccagtagagaaagctggtgtggttgtggatgatcgcggtagagcctacaggaaaaaggttttgtagagtttgccagcaaaaacctccctgccacgaaaaggctctggaaaagatgttgtgatggggcattctttgctaacaacgacccctcgtcccagtccattgtggaaacccatggagcagtttgatgatgaagatgggcttgcccagagattgctgatgcacaaaactcaacaagtatcataaggaaaggagaacaaccaccacggttttgctcaacctggggacatttgaaatttgagtatcaatctcgatggaaggctccttgatgaaatggaaaagcagcagcgtgagcaggttgatagaaacatcagagaagccaaagagaaactggaggcagaaatggaagcagctaggcatgaacaccaattaatgctaatgaggcaagatctaatgaggcgtcaagaagaactcagacgcttggaagaactcaggaaaccaaaagttgcaaaaacggaagcaaatacaactaagacatgaagaggagcatcggcggcgtgaggatagatatgatccgacaccaaagaacaggagggactgaggcgacagcaagagggctttaagccaaactacatggaaaatagagaacaggaaatgagaatgggtgatatgggtccccgcggagcaataaacatgggagatgcgtttagcccagcccctgctggtaaccaaggtcctcctccaatgatgggtatgaatatgaacaacagagcaactatacctggcccaccaatgggtcctggtcctgcccatgggaccagaaggagccgcaaatatgggaactcccaatgatgccagataatggagcagtgcaccaatgacagatttcctcaaggaccaccatctcagatgggttcacctatggggagtagaaccaggttctgaaaccccctcaagcacccaatgagtggtgtaggtcctgtgagtggtggtcctggtggctttggtagaggaagtccaagggggcaactttgaaggccctaataaccgccgtagatattaaacattccgttcattccctggctatctagaaaaaaaaaaagtcagtggtatgccctttatacttttacctgttatctggaagaaatggttttattgttaatgtatgtagacttaaaagtttttttttttttgtaaaacttgaggtttttgtatttttctttattcatgagctttgtagattagaatggtaatgatgctcatcattttgaatgttgaaatgtgtttgtgactttagctaaatataagtattccatagtactgtgaaatctatgtagttacttaatctcaataaagaaatcattttgggataatttaaaa

SEQ ID NO: 4824 - DNA, 383 bp, Homo sapiens
gtgggctcctgggggtttacaatccagattgacttttaagcaaggtcactgattagatacccattctctctcttgtttaacacaatgtccactgttaggtaccatgtggtgaagtaggcagtgtcatacactgctggtggaaatggggataatttaatatgaccttcctagaaagtaagttggaaatatgaatcaagggccttcaaaacttccagaccccttgacccaacacctctacttctaggaatccagtctaagtaaataataaagggcacaaagatttggacataaggatattaataacagcattatttgtagtaacaaaaaaactgtaataatcttaatgttcaaccatagaagaatatttaaacaaatcccggtgg

SEQ ID NO: 4825 - DNA, 448 bp, Homo sapiens
  misc_feature (1)...(448): n = a,t,c or g
gatggggacctgaaccatgangacgagacccacgctggacgaggggccgggctgccctgggtgtggctgcagcccttccctccccatgggacccccgaggggacgtgggccacccacgagcatgagtcttctctgcaggtggccgggggtgcctctcgggtctcctcctggctgcccgccccgggccagagtcaagttgttcccacacccagggcccgatgttagcacatcacctccgtgggctggccatggtgcacaccaggacccttgaggtcctgtttctgggagtgagagcccgcgcctgcaggacactgggcccctccagcctcaacttcttcacccaagatacaggctggcttatgaccagagaggcatgcggacagcacagcctccctctgtggctgtggggtcaccccagggctccttcaggcacaaggagggttggggg

SEQ ID NO: 4826 - DNA, 472 bp, Homo sapiens
  SIMILAR (1)..(108): 751254mologous to Homo sapiens Human secreted protein encoded by gene 44 clone HTDAD22,accession number AAY02693,Smith-Waterman Score=157.
ggctcactgtaatccccttctcccaggttcaagcgattctcatgcctcagcctcctgagtagctgggattataagcatgtgccaccacacctggctaatttttgtattttttagtagagactgggtttcaccatgttggctgggctggtctcgaacgcctgacctccacctttcttggcctcccaaagtgctgggattaccgtcatgagccactgcacctagcctttcatagagaggtttttgccatcaggccacactggcccgattccctctgtttcccagcttctcatgtttttccatatgggcacttttagcttttcttttcttgttgaggccagcgggggtaagcacggacctgctctgtaagctcccccaaaaccttagagtgaggggagagcagtcatggctttcagctctttactcttaatttagagaggatcaaagggaggaggggccggaaaaaggccaaatt

SEQ ID NO: 4827 - DNA, 408 bp, Homo sapiens
  SIMILAR (407)..(198): 871254mologous to Homo sapiens hypothetical protein,accession number AL137478,Smith-Waterman Score=311.
gttggttgaaatgacacgtgattccaggtaagcttttccagataaattgccctggaacttcagactttgtcaggtgaatcgatgtggaatttcagaatgggctggaatgtctgagatgggcatgtccgatattcagctcagtgtggggaaactggtggccagggctggttgcaagctgagttgtaggggtgacagttcaccaagcaggagcgggcccctccctcacgcggagccgctggcacggacagccccgggaaggtcaggctgagcgtcctttcctctgtgcacccccggagggtgctcccattggctttctcagatagcaccatctcagggtccagctggccatggcctggattaagtttaaaatgctgggccagtccccacttccctatatatgacttttta

SEQ ID NO: 4828 - DNA, 415 bp, Homo sapiens
  SIMILAR (415)..(2): 1001254mologous to Homo sapiens hypothetical protein,accession number AL137478,Smith-Waterman Score=696.
ccagatcctcccggtcacactgctggaggaactccttgagcctggctttgcttggcgacgccctctgctcccctgccgcagcagggccaccaggtagctgagcagctcttctctgctggaggacagctgtgcgggactctgcaagggtctctgagcatgcgcgtcttctaggtccttggtatctctctgatcgcaaaagagctccattttctggttcagatggcaatgtctcttcaacgtctacagactgaccattctgcaggccaccgcgtgctgactctgtcaccaagcaggagcgggcccctccctcacatggatccgctggcatggacagccccagggaggtcaggctgagcgtcctttcctccgtgcacccccggagggtgcttccactggctttctcagacagcaccat

SEQ ID NO: 4829 - DNA, 446 bp, Homo sapiens
  SIMILAR (395)..(231): 741254mologous to Homo sapiens hypothetical protein,accession number AL137478,Smith-Waterman Score=193.
tttttttttgtatttgtttttgtttttgtttttgagatggagtcttgctcagtcatccaggctggagtgcagtggcacgataatctgttccctgcaacctctgcctcctgggttcaagtgattctcagactgctccactgtactccagcctgggcgacagagtgagactggtctcaagtatttctttataacagtgtgagaatggccgaaaacgacacccagatgcaaacattacccaggccaccgcgtgctgactctctcaccaagcaggagcgggcccctccctcacgcggacgcgctggcacggacagccccgggaaggtcaggctgagcgtcctttcctctgtgcacccacggagggtgctgcccattgggctttctcagatagcacattctcagggtccagctggccatggcctggattaagtttaaaatgctgggccttc

SEQ ID NO: 4830 - DNA, 1706 bp, Homo sapiens
  SIMILAR (1404)..(1348): 421254mologous to Glycine max hydroxyproline-rich glycoprotein,accession number L22031,Smith-Waterman Score=45.
atgagggagaaggagatgaaggaggaggaggaaaaggaggaggaggaggagaaaaagaaaaaattggagggagaaggaggagaaagagaaggaacaataggaggagaaggaggaggaggaatagaaagaggaggagaaaaagaaagaaaagttggagggaggaggagaaagaggagagaggaagaaggagctggaggaggaggggaggaggaggaaggaagggctaaaatcacactcgatgtttttatgggatcatttgatctggacattgtcaaagaaaaaattgcaccagacaagttaaaccttcaaggaaggactcagtcaggactactgcaatacggaagagagaaggagcttaactttgttgaaacaaaaggctggagagtttttaagtgccgggactcagggctacatgtgcaggtttctgacctgggtatattgcatgatgctgaggtttgggctcctaatggacctgtcacccaggtagtgagcctagtacctggaaagcaactagaagccatttgtgtcaaggtaacgtctggagaaacaaaaggtcaggaacggccaacgtccctactggccacagtccagccccaatctgcaagacagagccagccgccccgggggaattcccgcctggtgggactccacgtcaccagcccccagctgctcaggtatacagctaaagctgagttcataaaaagggatgatttggccgacggtcatctgccagattctgatgatgattcagaactcagtgtggaagaacatcagagggagaggcaggcgctctttgacttatcaagctgctccctgaggcccaaaagcttcaagtgtcagacttgtaaaaagtcatatatagggaagtggggactggcccagcattttaaacttaatccagggccatggccagctggaccctgagatggtgctatctgagaaagccaatgggagcaccctccgtgggtcaacaggaggaaaggacgctcagcctggaccttcccggggctgtccgtggccagcgcttccgcgtgaggggaggggcccgctcctgcttggctaaaatcacactcgatgtttttatgggatcatttgatctggacattgtcaaagaaaaaattgcaccagacaagttaaaccttcaaggaaggactcagtcaggactactgcaatacggaagagaggagcttaacttcattgaaacaaaaggctggggagtttttaagtgccggggtgagatgctgagaaggaactggagacatcaggaagaggctgcatccgcggaagcccggctccccgagcgctccggcccggcccggcgccccggacctgagtgcgtccccatgaaggcgcccgggctggcccaggcggccgtggcagaggagaccccggactgggcgcccgagctctgccccagccccgagtcgcggtcgccggagccgcctgccaaccgccttcaagacttcgacacgctggtcaccgtgggcctatggtgcatgctgttggtggatctacctttctggggtttggacgacagtagctctcttctcacagctctactaggcagtgccccagtagggactctgtgtgggggctccaaccccacatttcccttctgcactgccctagcagaggttctccatgagggcctcacccctgccacagacttttgcctggacatccaggcatttccatacatcttctga

SEQ ID NO: 4831 - DNA, 1511 bp, Homo sapiens
  SIMILAR (1368)..(1018): 731254mologous to Homo sapiens hypothetical protein,accession number AL137478,Smith-Waterman Score=433.
  misc_feature (1)...(1511): n = a,t,c or g
cctcctccctcctccctcttcttcctccttcctccctcctnctccccnctttttaaaaaagggggtctctctctggttgccccaggcctagagtgcaatggccaaaaccctagctcaactgcaaccctcaaaactcccgggcctcaaatgaaccttcccagcctcagcctgctgaagtaaactgggacccacacatgtgcaccactgtgccctaatttttttgtttttttaacttatttaatagaaatgaggtctcactatgttgcccaggctggtctcatacttctggcctcaagtgttcctcctctttggcctcccaaagcactgggattacaggtgtgagccaccatgctttggcatggtggagtatgcagtaggagagcaggggtcggtggtagtgtctccatatgtactctcactaaaactggtgtgggcagatactggatgcctacttatttaggggcatctaaattcctgtgctaaattacgaaaatagaggcagctcttgaaaggagtgatggcatgaaggagagatgcttggaccaaccaccacacaacccttataaataattgataaccttgggttttgatgccacgtcctcttccgacagttgttggttgaaatgacacatgattccaggtgagcttttccagataaattgccctgggaacttcagactttgtcaggtgaatcgatgtggaatttcagaatgggctggaatgtctgagatgggcatgtccgatattccccacactgagctgaatatcggacatgcccatctcagtgtggggaaactggtggccagggctggttgcaagctgagttgtaggggtggacagttcaccaacagtgtataagcaaggcgttcccttctttgcattctcgccaagaggtcaacgtttttctgcaggccactgcgtgctgactcttttaccaagcaggagcgggcccctccctcacgcggagccgctggcacggacagccccgggaaggtcaggctgagcgtcctttcctcttgtgcacccccggagggtgctcccattggctttctcagatagcaccatctcagggtccagctggccatggcctggattaagtttaaaatgctgggccagtccccacttccgtatatatgactttttacaagtttgacacttgaagcttttgggcctcagggagcagcttgataagtcaaagagcgcctgcctctccctgtgatcgtcttccgccctgacttctgaatcatcatcagaatctggcagatgaccgtcggccaaatcatccctttttatgaactcagctttagctttatacttggcaggtagagatacctgtctcagcgtgtcttcacttttaacgatggttttagtttctcagtatgttttgtatgcaagttggaaataaatgaacgtcgtgatctggatgaaacatgccccagtcggcggactggaggcaaagaaggggtaaacatggtgtcctgtccatgtgcggccgcgtgggtcgaccccaa

SEQ ID NO: 4832 - DNA, 1405 bp, Homo sapiens
  SIMILAR (833)..(1402): 991254mologous to Escherichia coli Helicase (EC 3.6.1.-) IV,accession number D90734,Smith-Waterman Score=954.
atgccctgtagagtcatgaaggacgaacaaataaacaaaagtgcctctgcctcacagagatgttatcctacacctgcaaaatctcaaggagcattctctgatgatgaaataaaatcaaatccacaaaaagtgccttcagctttacaaaacaaagctgggccacagtttatgaaaagccagtatccaggtatttcattaaaccaagttcttagcttaggatggcattttggagacattttgctgtccattgtaatgctcattcattacaaacgtgccctcacagtccagttttctgccagaaccagccgcacaccacctagctacaaacataaggggttgtcggaacaaagacattcctatattgacgatcctcaaaggggcaagggacggaaatgggtgccaccacacaatcaatggcggctgcgggtcaattttcgcctgcctcgcctggagaatgagcgggaagctaaccattttgatgccgcgccgcgccttgaattgttggatggcgatgcgacgccgattccggtaaagctggatattctcgccattacctcaacggcaaaaacgattgattatgaggtcgaggttgaacgctataacaaatccgcgaaacgcgcttcactaccgcaatttgccacgatgatggcagatgacagtacgctgctttcgggtgtttccgagctggatgctattccaccgcagtctcaggtgctcacagaacaacggctgaactggtgcgtctggcgaacggattggaacatttcggtcggcacccacgtgggaccggggaaattattaattcaatcggcgcattttaaaaataaatggcttgacgcgtgagcaaacctctggcgtgcagcaacaaatccgccaggctttgtcggcgttgccgttgccggttaaccgactggaagaattcgataactgccgtgaggcgtggcgtaaatgtcaggcctggttgaaagatattgaaagcgctcggttgcagcataaccaggcgtataccgaagccatgcttaccgagtatgcggattttttccgccaggtcgagtcttcaccgctgaatccggcgcaggcccgggcagtcgttaatggcgagcattctctgttagtgctggcaggtgcaggaagcggaaaaacgtcggtgctggtggcccgtgcaggctggttgctggcgcgtggtgaagcgtcccctgagcaaattttattgctggcgtttggtcgcaaagccgctgaagagatggacgagcggattcgcgaacggctacataccgaagacattaccgcacgcacgtttcatgcgctggcgctgcatattattcagcagggcagcaaaaaagttccgatagtcagcaaactggaaaatgataccgcttgccgtcatgaactctttattgcttga

SEQ ID NO: 4833 - DNA, 720 bp, Homo sapiens
aacactgaccctgccccccaaataccataaattcccactaggcctaagactcccctgtcaccccacttgtgccccagcctgtgcctaggtaaagttgggggtccctgaaaagtccctcagacccccagtctgggagaaacagagctggaacagaagaaacccccagtccccatggcatcaggctggactggaggaagaaacggtggctgggaaaagtccctgaggggaaaggaaaggagggttttctcccaagaggggtttccgtgatgggttttgaaggacgaataggagttctctgggggaaagaaaagagggtggaaattgcaaaaacagttctagcctgggagtcaggaaaactcattcaacaaatattccctgaagaagcttgtttccttcacatgcctgggccattgctggggaaccctaaacacacacactcacacacggaggtcttgaacagaaagactcctaaggaatcttttgggaaataacttggctctctcaggcagctcgacttccccatttctttccagccatccaaaaatcttccagatcaccctcaccccaggtcacagatcacttcccctttgggctctatgggttacaaccctgaatcatccatccacccgacccctaccctcagccatgtcatggttcgaaattcacatgtgctccacagtccatataacaatcacataagcttatccctggctacaaccc

SEQ ID NO: 4834 - DNA, 1350 bp, Homo sapiens
  SIMILAR (417)..(623): 751254mologous to Homo sapiens neuronal thread protein AD7c- NTP,accession number AF010144,Smith-Waterman Score=263.
ccgggcaggtatgtttgtatgtgtgtgcggtttttgaaaaaacaaaacctggaagcatctcaagtgcctaccagcaggaggatggctacactgccatacgttttcacaatggactatgcataacaatacttccccacagccacacatggcaacgtcaagaagtctctgctgagtggaaaagcaagtctcaaaagattgcacagagtatgctgctcctgtttgttttatatagtacaaaaacaaccaaaactaaacaaaacattgtttaggcagtcatatatatgtgatcaaactactttcagaaagagcaaagggataataaacataaaattcattttttttttttttgagatggagtctcgctctgtcgcccaggctggaatgcagtggcgcaatctcggctcgctgcaactccgcctcccgggttcatgccattatcctgcctcagcctcctgagtagctgggactataagcgcccaccaccatgcccggcgaatttttttgtatttttagtagagacaggtttcaccgtgttagccaggatggtctcgatctcctgaccttgtgatctgcctgcctcgacctcccaaagtgctgggattacagatgtgagccaccacgcctggcacataaaattcaaaccagaggttacctggagggagagaggcagggaggagcacgtggatagacatatattcagattattagatatcaggtttacagatactcattttattaagaaggaattaatgaggtccgacacattatagaattgagggtcacgcatctaccaaatatgacatgaagggttttgattacctaacaatggacagtccagaaagcacagggtcaaaagatgtagatgggccatcagttaaaaagacaggcactcaggtccagctctaggaagagaaataaactaacagatacctatgcaggcattggcaaagcaaagagactttcctttcctttgttgagctgaaggcgagggtggtgaattcctgtttgtttttggatccctgccttgccttcacaccagggacccagtgtgtggtcccacgttccttagatacgtatgcctggtcagggtactagtctcaattaaaagcaactgcaacatcagtcccaatccatagtgcccacggccaacatagaggctgagggtgaagctaagaagaaaaagaggcgcgagctaaccctaaagagcacagtggcactcctccgtggcctctgctccaacccaggtgtgctccgcgaggccacaggtgagactccctcagaggcccgttcctaatggggtctacaaagaatgcacaagggaggctcagagacatttacagttaggctcaa

SEQ ID NO: 4835 - DNA, 344 bp, Homo sapiens
  SIMILAR (3)..(176): 841254mologous to Homo sapiens PRO2852,accession number AF130079,Smith-Waterman Score=238.
  misc_feature (1)...(344): n = a,t,c or g
ctgtctcagcctcctgagtagctgatattacagncgcatgtcaccacgcccggctaatttttgtatttttagtagagacagggtttcatcatattggtgaggctggtctcgaactcctgaccttaggtgatccacccgcctcggcctcacaaggtgctgggattacaggagtaagccagcgtggccagtctctgtttgcctttttaatgtcatctacttcattttgtaagtagggtatcaaggaaataattatcaaggtatagtttgggaaaaggtgagcaaatccttaacacagctggcccaaggttttatttggtaggtctaaatcttgaccttatggctat

SEQ ID NO: 4836 - DNA, 983 bp, Homo sapiens
  SIMILAR (24)..(278): 581254mologous to Homo sapiens Human myelin oligodendrocyte glycoprotein gene,accession number AAZ29204,Smith-Waterman Score= 189.
caggctggagtgcaatggcatgatcttggctcactgcaacctccacttccagggctcaagcaattctcctgcctcagcctcccaagtagctgggattacaggcgtgtgccaccccgcctggctaatttttgtattttttagtagagacagagtttcatcatgttggccaggctgatcttgaactccggacctcaggcaatctgcccacctcggcctcccaaagtgctgggattacaggtgtgagccaccatgcctagcsaaaaagacgactcttgaaacacatttttccaatttgcagctatactttttcacacctttggatttcactttgtctgaagcagtgcatttagagagagattgcaaacccagtccattagattctattgttcttttctcctatgctgcttaatagtctacatccaggtttatcccctctcactcagaaggcaaaatattaagcctttaaattagagtttccaaaagtatgaacatacatcctttcatttggtcctcacaacagccctgtgaggcaggcaggcaggcatcatggttccagaatgcagaggacagagtcctaagttggttaagctggaaaccaaatccatgtcctctgtctcctggtttagtgctcctcccactccatgagatgaacagcactcactgtaatgaacaaaacagcctttctgcttagaatagatgaaatgtcctttgggcttgcacacaggtgattttaagtagaaaccttgctagaaagcttggaagaaaaacacacctgagctcagttcagcatcagaatcagcatcagagggatgaacaggaaagaacatggacatctttgacaagggtttctgcttatgttcttgattctcacccagatcatggttgagtgctgtaactttaaagcagcaaagtccagtaggagggaaggcatttaaaggactttctcctcgtgccgaattcctgcagcgcgcatctatttctat

SEQ ID NO: 4837 - DNA, 1297 bp, Homo sapiens
  SIMILAR (47)..(577): 941254mologous to Homo sapiens Human H38087 (clone GTB6) protein sequence SEQ ID NO:7,accession number AAB24284,Smith- Waterman Score=870.
  misc_feature (1)...(1297): n = a,t,c or g
gaacggctccggtatttccgggtcgagcacctggatcagcggctgaaagctgcagagaacaagttttcttatgtgcctcatgacctggctcaaatgcggcttctggtgcctggagaagttcatcaaattccttaataggaatgcctacatcatgattgccatctacggcaccaatttctgcacctcggccaggaatgccttcttcctgctcatgagaaacatcatcagagtggctgtcctggataaagttactgacttcctcttcctgttgggcaaacttctgatcgttggtagtgtggggatcctggctttcttcttcttcacccaccgtatcaggatcgtgcaggatacagcaccacccctcaattattactgggttcctatactgacggtgatcgttggctcctacttgattgcacacggtttcttcagcgtctatggcatgtgtgtggacacgctgttcctctgcttcttggaggacctggagaggaatgacggctcggccgagaggccttacttcatgtcttccaccctcaagaaactcttgaacaagaccaacaagaaggcagcggagtcctgaaggccccgtgctccccacctcttcaaggagtctcatgccgcagggtgcttcagtagctgggtctgttccccccagccccttgggttccacctgaaagtcctattcacttgccgctttggacccttccccatggaggccagattcccaccagttttttgggacgttggagagttttgggggcatctccttcttatgcccaagggggcgcttgggagttttcaatggctgcccctaccagactgcgaagaaacaagtaaaagacccattggggccctcttgatgtctggggatggcacgtgggcccgaccctcccacaagctcccctcatgcttccctgtcccccgcttacacgacaacgggccagacccacgggaaggacggtgtttgtgtcttagggaacctgctggccacagttgaacacccacggtttattccatgccctgcttccggccagggacttgaacccctttcttccacacctggaacagttgggttcaaggggccaccaggaaggcattttcttttatttatttatttatttttttaaacctggggacatggcatttaaagggtctattagctttctttccgtctgtctcaacagctgagatggggccgccaaggagtgcctttccttttgctccctcctanctgggactgacgggtgggagtgtgtgtgcccaggtggaggtgtctcctggctgggaaggagggaat

SEQ ID NO: 4838 - DNA, 1776 bp, Homo sapiens
  SIMILAR (166)..(966): 1001254mologous to Homo sapiens inducible membrane protein,accession number X53795,Smith-Waterman Score=1412.
ccgactgaggcacgagcgggtgacgctgggcctgcagcgcggagcagaaagcagaacccgcagagtcctccctgctgctgtgtggacgacacgtgggcacaggcagaagtgggccctgtgaccagctgcactggtttcgtggaaggaagctccaggactggcgggatgggctcagcctgtatcaaagtcaccaaatactttctcttcctcttcaacttgatcttctttatcctgggcgcagtgatcctgggcttcggggtgtggatcctggccgacaagagcagtttcatctctgtcctgcaaacctcctccagctcgcttaggatgggggcctatgtcttcatcggcgtgggggcagtcactatgctcatgggcttcctgggctgcatcggcgccgtcaacgaggtccgctgcctgctggggctgtactttgctttcctgctcctgatcctcattgcccaggtgacggccggggccctcttctacttcaacatgggcaagctgaagcaggagatgggcggcatcgtgactgagctcattcgagactacaacagcagtcgcgaggacagcctgcaggatgcctgggactacgtgcaggctcaggtgaagtgctgcggctgggtcagcttctacaactggacagacaacgctgagctcatgaatcgccctgaggtcacctacccctgttcctgcgaagtcaagggggaagaggacaacagcctttctgtgaggaagggcttctgcgaggcccccggcaacaggacccagagtggcaaccaccctgaggactggcctgtgtaccaggagggctgcatggagaaggtgcaggcgtggctgcaggagaacctgggcatcatcctcggcgtgggcgtgggtgtggccatcatcgagctcctggggatggtcctgtccatctgcttgtgccggcacgtccattccgaagactacagcaaggtccccaagtactgaggcagctgctatccccatctccctgcctggcccccaacctcagggctcccaggggtctccctggctccctcctccaggcctgcctcccacttcactgcgaagaccctcttgcccaccctgactgaaagtagggggctttctggggcctagcgatctctcctggcctatccgctgccagccttgagccctggctgttctgtggttcctctgctcaccgcccatcagggttctcttatcaactcagagaaaaatgctccccacagcgtccctggcgcaggtgggctggacttctacctgccctcaagggtgtgtatattgtataggggcaactgtatgaaaaattggggaggagggggccgggcgcggtgctcacgcctgtaatcccagcactttgggaggccgaggcgggtggatcacgaggtcaggagatcgagaccatcctggctaacatggtgaaaccccgtctctactaaaaatacaaaaaaaatttagccgggcgcggtggcgggcacctgtagtcccagctacttgggaggctgaggcaggagaatggtgtgaacccgggagcggaggttgcagtgagctgagatcgtgctactgcactccagcctgggggacagaaagagactccgtctcaattccttgatagctggctggcctccgttttgctagattttcatacactttaatggtttctgttttattgtctttgagaatatgatgtcagacattttcggatgggctgtttagatgttatataatccacaaaaggttcattgagctaaaaaagtggagacttgttttttt

SEQ ID NO: 4839 - DNA, 524 bp, Homo sapiens
  SIMILAR (87)..(299): 601254mologous to Homo sapiens Human myelin oligodendrocyte glycoprotein gene,accession number AAZ29204,Smith-Waterman Score= 205.
tttttttttaaaggtggctcaaaattttacctttttttttttttttttgagacggagtctcgtctctgtcgcccaggccggactgcggactgcagtggcgcaatctcggctcactgcaagctccgcttcccgggttcacgccgttctcctgcctcagcctcccgagtagctgggacgcctcccgagtagctgggactacaggcgcccgcactgcgcccggctaatttttttttttttgtatttttagtagagacggggtttcaccttgttagccaggatggtctcgatctcctgacctcatgatccacctgcctcggcctcccaaagtgctgggattacaggcgtgacgaccgcgcccggccaaaattttaccttttaagttttgtttcaaataaaattgagtctgttcacttaagagtgagtctaaaccagtttctctaaagagtaactgggtgcagatttaaatgtgctttaaataaagattttaaaatgctttatccaaaagagaaaactatagttaggaa

SEQ ID NO: 4840 - DNA, 2059 bp, Homo sapiens
  SIMILAR (1893)..(1093): 1001254mologous to Homo sapiens C33 antigen=type III integral membrane protein,accession number S48196,Smith-Waterman Score= 1413.
aaaaaaacaagtctccacttttttagctcaatgaaccttttgtggattatataacatctaaacagcccatccgaaaatgtctgacatcatattctcaaagacaataaaacagaaaccattaaagtgtatgaaaatctagcaaaacggaggccagccagctatcaaggaagcaaagcacttacttacctacatgcttctttggctctaaaaaaggtctcttaatgatgaatgaaatccctgctttgttctccaaaatccatttcagggttgcaagatcatagttctcggggtgtttaaaggcaacaccttccgtaagcccctgcactaccacagccgactggtctcgcagcatcttctcatatggtacaggtaccactgtggatttgcctaaagctttcccatagcaaaagcagaaatagtcctcaactgtttttctgagtgtttcaatttctgagacggagtctctttctgtcccccaggctggagtgcagtagcacgatctcagctcactgcaacctccgctcccgggttcacaccattctcctgcctcagcctcccaagtagctgggactacaggtgcccgccaccgcgcccggctaaattttttttgtatttttagtagagacggggtttcaccatgttagccaggatggtctcgatctcctgacctcgtgatccacccgcctcggcctcccaaagtgctgggattacaggcgtgagccaccgcgcccggccccctcctccccaatttttcatacagttgcccctatacaatatacacacccttgagggcaggtagaagtccagcccacctgcgccagggacgctgtggggagcatttttctctgagttgctaagagaaccctgatgggcggtgagcagaggaaccacagaacagccagggctcaaggctggcagcggataggccaggagagatcgctaggccccagaaagccccctactttcagtcagggtgggcaagagggtcttcgcagtgaagtgggaggcaggcctggaggagggagccagggagacccctgggagccctgaggttgggggccaggcagggagatggggatagcagctgcctcagtacttggggaccttgctgtagtcttcggaatgcacgtgccggcacaagcagatggacaggaccatccccaggagctcgaccatggccacacccacgcccacgccgaggatgatgcccaggttctcctgcagccacgcctgcaccttctccatgcagccctcctggtacacaggccagtcctcagggtggttgccactctgggtcctgttgccgggggcctcgcagaagcccttcctcacagaaaggctgttgtcctcttcccccttgacttcgcaggaacaggggtaggtgacctcagggcgattcatgagctcagcgttgtctgtccagttgtagaagctgacccagccgcagcacttcacctgagcctgcacgtagtcccaggcatcctgcaggctgtcctcgcgactgctgttgtagtctcgaatgagctcagtcacgatgccacccatctcctgcttcagcttgcccatgttgaagtagaagagggccccggccgtcacctgggcaatgaggatcaggagcaggaaagcaaagtacagccccagcaggcagcggacctcgttgacggcgccgatgcagcccaggaagcccatgagcatagtgactgcccccacgccgatgaagacataggcccccatcctaagcgagctggaggaggtttgcaggacagagatgaaactgctcttgtcggccaggatccacaccccgaagcccaggatcactgcgcccaggataaagaagatcaagttgaagaggaagagaaagtatttggtgactttgatacaggctgagcccatcccgccagtcctggagcttccttccacgaaaccagtgcagctggtcacagggcccacttctgcctgtgcccacgtgtcgtccacacagcagcagggaggactctgcgggttctgctttctgctccgcgctgcaggcccagcgtcacccgctcgtgcctcagtcggc

SEQ ID NO: 4841 - DNA, 1293 bp, Homo sapiens
  SIMILAR (752)..(1090): 511254mologous to Homo sapiens Human myelin oligodendrocyte glycoprotein gene,accession number AAZ29204,Smith-Waterman Score= 216.
atggcatcctcaatctgacgtccaggctgaagtgcagtggcgtgatcttggcttactgcaaagctccgcctccccgggttcacgctattctcctgcctcagcctcctcagtagctgggactacaggcgcccgccaccacgccctgggtaatttttgtatttttagtagagacggggtttcaccgtgttagccaggatggtctcgatctcctgactccatgatccacccgccttggcctcccaaagtgctgggattacaggcgtgagccaccgcacccggccaggggctgacctttaaccgagggtccagaagcctcgcgcaagcctcgggggctgaaatcacatgtgcaacatgaagtcacttcccacggggcagaccaggcttaacaagggcaggcggctgggtcacttcccagatcactggaggtggaaggagacacccggcctctagtgtttccatgggaacttctgtggggctttaaaagcagggagggcccacctggatggacaggggagaagatgaggccatgagctggcaagggcctggtgccgaccacgggagatcacggcacctgagcagcaatgcgggttcgaccaatttttaaatttataagcatctgtgttgtagcttaatgactttaacagttttttcctcaatcatatcagaatgtagtttgatgattatctgggtgaagagttttggtggtcaacgtatggctaagaaagttatatattaaagatgaagggttttggccgggtgcggtggctcacgcctgtaatcccagcactttgggaggccaaggcgggcggatcacgaggtcaggagatcgagaccatcctggctaacacggtgaaaccctgtctctactaaagatacaacaaaaattagccgaaattagccgggcgcggtggcgggcgcctgtagtcccagctactcgggaggctgaggcaggagaatggcgtgaacccgggaagcagagcttgcagtgagccgagattgtgccactgcagtccgcagtccagcctgggcgacagagcgagactctgtctcaaaaaaaaaaaaaaaaagaagaagaagaagaagaagaagaagaagaggaggaggaggaggaggaggaggaggaggaggaggaggaagaagaagaagaagaagaagaagaagaagaagaagaagaagaagaagaagaagaagaagaagaagaagaagaagaaggagaagaagaagaaggagaagaggaagaagatcaactagacacaatgttatgggactcatcaacaaacctcaccaacacag

SEQ ID NO: 4842 - DNA, 666 bp, Homo sapiens
  SIMILAR (460)..(663): 981254mologous to Homo sapiens N-acetylglucosamine-1- phosphodiester alpha-N-acetylglucosaminidase,accession number AF187072,Smith-Waterman Score=344.
atgatcagccccttcatcaatgagaacaccaggcggaagttcctcatctacagtggcagcaactaccagggacccggaggccttgtggactatctggatagagaagtgatccctgacttccttgggggagagagtgtgctcggactgaattacctgcgctcttttcggctggcgggctggcgggcggtgctggtgatgttaactttttatctccaggtatggggggacacagataggggccaggccagccccttttcatccacagtcaaactttctgggcttggactaagccccttttttgacccctgttcctttagcccgcccacgggaaggtgtcctggttgcgacaataaactgtatggtcagttggccaatgtaaagaaagtgagaacaggatataagtatattgggatgggaagaaaggcaagaaataacgtagaagaaagtcaagaaataacgaccgcctggctagccctcaccctggcgctggccttcctcctgctgatcagcactgcagcaaacctgtccttgctcctgtccagagcagagaggaaccggcgcctgcatggggactatgcataccacccgctgcaggagatgaacggggagcctctggccgcagagaaggagcagccagggggcgcccacaaccccttcaaggactga

SEQ ID NO: 4843 - DNA, 1643 bp, Homo sapiens
  SIMILAR (732)..(1529): 401254mologous to Neisseria meningitidis Z2491 putative integral membrane protein,accession number AL162752,Smith-Waterman Score=549.
cgtcggcaaaggagccatggattctagcaactaacttacctgttgaaattcgaacacccaaacaacttgttaatatctattcgaagcgaatgcagattgaagaaaccttccgagacttgaaaagtcctgcctacggactaggcctacgccatagccgaacgagcagctcagagcgttttgatatcatgctgctaatcgccctgatgcttcaactaacatgttggcttgcgggcgttcatgctcagaaacaaggttgggacaagcacttccaggctaacacagtcagaaatcgaaacattttacccttactggctttccaccttggacccttccgatcattggccgacattccgcggaatcgggtttacgaggactttgacccgcactgcaggccgatgataattacaagtctttcaaacttaccctggcacagcatcaacagttgtcaacagcccttgggtgttgccatcacatgcacgtgcagcctcaacgtccacgattcacatttgcggtatgctgcgtccacatgcacctgcgtcttacccatgtctggagcacaaccgttgtccactcgagctgtagcccaactttactccccagacgcagatgccaagcgggctgctgtgccggcacgcagtaccgacaagccagagaaccacgcgcatccacattcgcacttcactcatcaatattacaagacacaatatcaccacctcaagaaaacgtttccgtggtggctgggtgatgtaaaactgacgattccgctaacgctggggatggtggcagcggcgctgaccgatctcgatgaccgactggcgggacgtttgcgtaacctcatcattacgctgttctgcttttttatcgcctcggcctcagtagaattgctgtttccctggccctggctatttgcgattggcttaacgctctctaccagcggcttcattttgctcggcgctctggttcaacgctatgcaaccattgccttcggtgcattgctgatcgccatttacactatgttgggaacatcactgtatgagcactggtatcagcagccgatgtatctgctggccggtgccgtctggtacaacgtcctgacacttattggtcatctgctgttcccggtccgcccgctgcaggacaacctggcgcgttgctatgaacaactggcgcgttatcttgagctcaagtcgcgcatgtttgatcctgatattgaagatcaaagccaggcaccgctgtacgatttggctctcgccaacggtctgctgatggcgacattgaatcagacgaaactctcgctgctgacccgcttacgtggcgatcgtggtcaacggggaacgcgtcgcacgctgcattattactttgtcgcacaggatattcacgagcgtgccagctcttctcatattcagtatcaaacattgcgtgaacattttcgccacagcgacgtgctgttccgttttcagcggctgatgtcgatgcagggccaggcgtgccagcaactgtcacgctgtattttgttgcgtcagccttatcaacatgactccgcattcttgagcgcgcttttacgcatattgatgctgcgctggagcggatgcgcgataacggcgcacccgccgatttactcaaaacactgggataatgcttga

SEQ ID NO: 4844 - DNA, 2216 bp, Homo sapiens
  SIMILAR (951)..(1559): 741254mologous to Homo sapiens N-acetylglucosamine-1- phosphodiester alpha-N-acetylglucosaminidase,accession number AF187072,Smith-Waterman Score=784.
  misc_feature (1)...(2216): n = a,t,c or g
atggcgacctccacgggtcgctggcttctcctccggcttgcactattcggcttcctctgggaagcgtccggcggcctcgactcgggggcctcccgcgacgacgacttgctactgccctatccacgcgcgcgcgcgcgcctcccccgggactgcacacgggtgcgcgccggcaaccgcgagcacgagagttggcctccgcctcccgcgactcccggcgccggcggtctggccgtgcgcaccttcgtgtcgcacttcagggaccgcgcggtggccggccacctgacgcgggccgttgagcccctgcgcaccttctcggtgctggagcccggtggacccggcggctgcgcggcgagacgacgcgccaccgtggaggagacggcgcgggcggccgactgccgtgtcgcccagaacggcggcttcttccgcatgaactcgggcgagtgcctggggaacgtggtgagcgacgagcggcgggtgagcagctccggggggctgcagaacgcgcagttcgggatccgccgcgacgggaccctggtcaccgggtacctgtctgaggaggaggtgctggacactgagaacccatttgtgcagctgctgagtggggtcgtgtggctgattcgtaatggaagcatctacatcaacgagagccaagccacagagtgtgacgagacacaggagacaggttcctttagcaaatttgtgaatgtgatatcagccaggacggccattggccacgaccggaaagggcagctggtgctctttcatgcagacggccatacggagcagcgtggcatcaacctgtgggaaatggcggagttcctgctgaaacaggacgtggtcaacgccatcaacctggatgggggtggctctgccacctttgtgctcaacgggaccattggccagttacccgtcagatcactgccaggacaacatgtggcgctgtccccgccaagtgtccaccgtggtgtgtgtgcacgaaccccgctgccagccgcctgactgccacggccacgggacctgcgtgggacgggcactgccaatgcaccgggcacttctgggcggggtcccggctgtgatgagctggactgtggcccctcttaacttgcagcccagcacggactgtgcaacgggagtaccgggctgtccgctgttgattgccggatgggaccgggtccaactgcagtgaagagtgtccccttggctggcatgggccgggctgccagaggccttgtaagtgtgagcaccattgtccctgtgaccccaagactggcaactgcagcgtctccagagtaaagcagtgtctccagccacctgaagccaccctgagggcgggagaactctcctttttcaccaggaccgcctggctagccctcaccctggcgctggccttcctcctgctgatcagcattgcagcaaacctgtccttgctcctgtccagagcagagaggaaccggcgcctgcatggggactatgcataccacccgctgcaggagatgaacggggagcctctggccgcagagaaggagcagccagggggcgcccacaaccccttcaaggactgaagcctcaagctgcccggggtggcacgtcgcgaaagcttgtttccccacggtctggcttctgcaggggaaatttcaaggccactggcgtggaccatctgggtgtcctcagcccctgtggggcagccaagttcctgatagcacttgtgcctcagcccctcacctggccacctgccagggcacctgcaaccctagcaataccatgctcgctggagaggctcagctgcctgcttttcgccctgcctgtgtctgctgcccgaaaaagcccgttgcccccggggaaggntgccggcactgcccaaagagtctcccctccctccctggggaaggggctgcccaacgaaccagactcagtgaccacgtcatgacagaacagcacatccctggccagcacccctgggctggagtgggttaaagggacgaagtcctgccttccctggctgtgaacacgggacccctttttctacagacctcatcactggatttgccaactagaattcgatttcctgtcatagtgattgcttcttgtaagaagggatggggggatgagatcattgtttacagacctgttttgtcatcctgctgccaagaagttttttaatcacttgaataaattgatataataaaaggagccaccaggtgggtgtgtggattctg

SEQ ID NO: 4845 - DNA, 2677 bp, Homo sapiens
aagcgctaccccagaaggcggtgaatggaccctccctctccgttctttcctccatggttcctgtgctggagcaggtgggtgggaacactgcccctctcctctgggcaggtctgccttctccttcccacaggaggccaagctggggttgtggggaatgggcacagccaggtttggtgctgaaccccattcacccctaggaatgccatgggaggaaaaagatcccacaggctagggcccctggaagacaggaaacagcatgtgcatgtgggctgggcaggggtcagggatgtgatgagggaaaaaagtgctgccagccagtgcccatccctggaagagggggtgtgggctcctttggagataagtcccaaccctgaggctcccaggcagaccctggcctgcatcccccagcagtcaaaggtgctgggaatgtgtgcgagtgtgtgcctctgtccatgtgggggtgaaatgcaatggggatggactgtggcatccacacctgcccggatggttggcattttggcaaattcaggcagagagggagagggtttgagggccaagtttccctagctaaatgcaaatccagatgacttgcactggaaactcaggacacacacatggtggacgctacagggcacctttctgccctctgcggtagcatcaggaggggagagtggaattgggggccagtgtttctgttctgctagaaagaatcttgccagctgcagcgaggaggtgaggcctgggcaggagcggacagcccttgcccggatggggctgggcctccaagcccttggctatgacagaaatggggaaacgatggctgcctaagcccttctttgttcctaacctatagatggttaaactgaggcgagaggcagtcggagatacgccggcagtcatatcagcactcaggccggaactcactcttgggccacaagggaacgtttggggaagaatccctctggttgggattcttcctatctatgcagggcctgggattgacggtggtgcatcccagtctgacgcgtggccccctccatgccccatgatcccgtgaacatccagctctaagaatcttgcaggaagaaaactgattgatgaaaaccacaggcccctgagccttgcacccacctgctcagggtgagcttttttgtgattattttaaagatccaagctggtcagaagggccacagtcacctcccctgaccaggctggcgcctcatccccaaacccagtgcacagagctctcaggagggagaaggggcagtgcagtccttgaagagtgtgtccccacgcctgcctctgctcaccttgcagcttcacctgcagaggctggaacagcaggagtgtggaggtgacggcatcatttccaagcacaggactgctgggcccacgttagctctcgatgagcttgctgatgagttaatgcaaagcagggaggtgtccccctggtgaggactgcccgaggccactacccggctgctcattgagccctctggagaggaaactctgtttttcctcagcctgaggcccggcttctttcctgggagggttgacagcaaaggcttcaggctgctccctaagcctgaggcctccagccacatacaaggtcatggtctctgggaaaagctttaggtgcccgctcggcgtgcagggggtggggtgtgctttaaaagtgctctcccacctccaatctctctgataaaagccctccagcaaagccagcaagagggagggataacagtaaactctgccttcagccactattggagaacttccatttaaatgacacgcccccaagcatttatgcaatgctcagggctttctttgcaaaattcactaacaccataagaaacagccaatgcaattaaagcctaaggtgggcctgggagcctagaagggaccctgaggaggcctggctctccaccctcaagcctaggggttggatctggcaaaactgaagtgaattctcagaattgcaggcatctgggcagggaaggggttagctaaagaacatgtttcagggtttttggctttgtgggtgttttgtattttaaagagccacgctggtgcagaaagaccagggccctatcagcttcccctcctcctcaagaacctcgggccttcggaaggcctttgacccggtcctggggtttcagacccactttgtgctgccttacacttggtgttgggatctgtgcctggcttttctttttgagagccggacccctttgccctccaggggaaaagttaaccatgtggctttttttctttctgcagttcctttctgtagcatcctccttactgcttccgagccctgggcatcctgcatgaggcggagttcatctcacacctctgagatgcctgtgccagcatggctggagcccctggctggcagagcgggcaacttggtcctgcacattaggatggggaagctcctaattccagctgtctttctgccgccatcccccaacaccctcaggaaggggcacctttctgggcctgcctaaaggagggagcatgggtgtgagggctgcccaggcaggtgggagtacggagccttgtggggcagggtggaggcgtccaggcccttcctaggagcttccgcccaactccccgtaagtgatggcaggtctcaggaggggcccgcctcctcatatgggagggagaagccccc

SEQ ID NO: 4846 - DNA, 1308 bp, Homo sapiens
  SIMILAR (8)..(406): 471254mologous to Homo sapiens Human myelin oligodendrocyte glycoprotein gene,accession number AAZ29204,Smith-Waterman Score= 203.
tttttttttttttttttttgagacagagtcttactcagtcatctaggctggagtgcaggcaacctctgcctcctgagttcaagcgattgtcctgcctcagcctccccagtagctgggactacaggtgtgcgccagcacactcggctaatttttgtatttttagtaaagacagggtttcaccatgttgaccaggctggtctcaaactcctggcagcaagcgaactgcccaccttggcctcccaaagtgggattacaggcgtgagccaccacacccagcctatttatcattattatttttgtagagacagagtttcaccatgttgcccaggctggcgtcaaactcctagcctcaagtgatcctcccgcctcagcctcccaaagcagtggaattacagccatgagccactatacccagctctttttaacgagacttttttctttaagtaaataaccgaagtgacacacatgtgtcatcaaaaacaacaggaaggtggttccagaatgaagtcaggaaatgatagtggaaataaaactagatttgaggtcagagaactgcagttggttcttcttaactgagagtcgcgtcctcatctgtaaaacagagagaactctcccgacctgacagaatttttgcaagagcaaaagtaaggtatgcaagatagccacacgcagggccataaatgcctaggttattatcacgtacactatagggaaaggatgttttcttcattatggcccagcatgctgaggaccttccaggcccctgtggcaaagaagagctcattaaaggcctcacttacgcccacgactggggagtgcttgccctcgagagcctggtgggatgggcatgagatcacccgtgagtagaacagagttcacgccacaggcctgaagctgctctccttaggaattctggctggcatctgggaaccccagatttcagaagggtccccaccatcccctacttgatgagagtagttcactgggccgaaattatttgtacaaacaatatggttcttgctcagcacctgctttccttcccagagcctagaattttggtacctgccaggcagaggtgcccacatgactggcccctagcaaaacaccatgggcactgaatttttaatgagcttccctgctagacaacatctcctacatgttgtcacaactcattgctaaagacattaagtgcatcctgtaggaaccccctggaagaggactctggaagctccagcctggcctcccccgacttcaaaacaaggtgctttttccctttgctaattttgctttgaattccctcgtgccaag

SEQ ID NO: 4847 - DNA, 6741 bp, Homo sapiens
  SIMILAR (2068)..(6006): 761254mologous to Homo sapiens NuMA protein,accession number Z11583,Smith-Waterman Score=4590.
  misc_feature (1)...(6741): n = a,t,c or g
atgaggggagctcagaaggccacaaacgttaacaagctctctgaggtcattcagggtaaagaagaaagtccagcacaattctaccagagactgtgtgaggtctatcgtatgtatactccctgtgatcccgatagccctgaaaatcagcacatgattcacatggctttagtccgtcaaagcccagaagacatgagaagaaaactgcagaaacaggctgggcttgcagggatgaatccatcccaattactagaaatagctagccaggtgtttgtaaacagggatgcagtaagccgtaaggaaaacggcaaagagaatggaggtcaggcccggcgatatgccgacctgtttagccctgtcgagcctgattgtgtagaagtgttggactcaattcactctagcagacctgacctccgggaccagccttggccatcaggagactgggaactatatgtggatgggagcagcttcttcaacccccaaggagagagaggtgcagggtatgcagtgataaccctggacactgttgttgaagccacatcgttgccccaggccacttcaggccagaaagctgaactcattgctttcattggggccttagaactcagtgagggtgagactgtcaacatttacactgattctcgccatggcactgaagagggacagcaaatcttgaagcagccggtgtcagagagactggactttgtgtgcagttttctgcagagaaggaacagcttctacatgggcacttgccaggatgagcctgagcagctggatgactggaaccgcattgcagagctgcagcagcgcaatcgagtgtgccccccacatctgaagacctgctatcccctggagtccaggccttccctgagcctgggcaccatcacagatgaggagatgaaaactggagacccccaagagaccctgcgccgagccagcatgcagccaatccagatagccgagggcactggcatcaccacccggcagcagcgcaaacgggtctccctagagccccaccagggccctggaactcctgagtctaagaaggccaccagctgtttcccacgccccatgactccccgagaccgacatgaagggcgcaaacagagcactactgaggcccagaagaaagcagctccagcttctactaaacaggctgaccggcgccagtcgatggccttcagcatcctcaacacacccaagaagctagggaacagccttctgcggcggggagcctcaaagaaggccctgtccaaggcttcccccaacactcgcagtggaacccgccgttctccgcgcattgccaccaccacagccagcgccgccactgctgccgccattggtgccacccctcgagccaagggcaagctgggccaggacgacgtgacgctggacaacctgttcagggtccacgagcacacaggagaagttggtgctgtgcagggcaggggtcagctgctccagcaccaaggccttgcacagctgcgtacctgtgctcccacgttcccggctggagcggaagggaaggaaaggtatggtttccaggaagttcaccctgttttctacgttgttgtcattgcagaaaatcgaaaacatccctcttccccagaatgcctggtatctgcacagaaggtgctagagggatcagagctggaactggcgaagatgaccatgctgctcttataccactctaccatgagctccaaaagtcccagggactgggaacagtttgaatataaaattcaggctgagttggctgtcattcttaaatttgtgctggaccatgaggacgggctaaaccttaatgaggacctagagaacttcctacagaaagctcctgtgccttctacctgttctagcacattccctgaagagctctccccacctagccaccaggccaagagggagattcgcttcctagagctacagaaggttgcctcctcttccagtgggaacaactttctctcaggttctccagcttctcccatgggtgatatcctgcagaccccacagttccagatgagacggctgaagaagcagcttgctgatgagagaagtaatagggatgagctggagctggagctagctgagaaccgcaagctcctcaccgagaaggatgcacagatagccatgatgcagcagcgcattgaccgcctagccctgctgaatgagaagcaggcggccagcccactggagcccaaggagcttgaggagctgcgtgacaagaatgagagccttaccatgcggctgcatgaaaccctgaagcagtgccaggacctgaagacagagaagagccagatggatcgcaaaatcaaccagctttcggaggagaatggagacctttcctttaagctgcgggagtttgccagtcatctgcagcagctacaggatgccctcaatgagctgacggaggagcacagcaaggccactcaggagtggctagagaagcaggcccagctggagaaggagctcagcgcagccctgcaggacaaggccagggcaaaaggagatcttggtaacaagatgatgggccccatgtttgctgatgtttatgagggcttgtgtggtaatctgaaatgccttgaagagaagaacgaaatccttcagggaaaactttcacagctggaagaacacttgtcccagctgcaggataacccaccccaggagaagggcgaggtgctgggtgatgtcttgcagctggaaaccttgaagcaagaggcagccactcttgctgcaaacaacacacagctccaagccagggtagagatgctggagactgagcgaggccagcaggaagccaagctgcttgctgagcggggccacttcgaagaagaaaagcagcagctgtctagcctgatcactgacctgcagagctccatctccaacctcagccaggccaaggaagagctggagcaggcctcccaggctcatggggcccggttgactgcccaggtggcctctctgacctctgagctcaccacactcaatgccaccatccagcaacaggatcaagaactggctggcctgaagcagcaggccaaagagaagcaggcccagctagcacagaccctccaacagcaagaacaggcctcccagngcctccgccaccaggtggagcagctaagcagtagcctgaagcagaaggagcagcagttgaaggaggtagcggagaagcaggaggcaactaggcaggaccatgcccagcaactggccactgctgcagaggagcgagaggcctccttaagggagcgggatgcggctctcaagcagctggaggcactggagaaggagaaggctgccaagctggagattctgcagcagcaacttcaggtggctaatgaagcccgggacagtgcccagacctcagtgacacaggcccagcgggagaaggcagagctgagccggaaggtggaggaactccaggcctgtgttgagacagcccgccaggaacagcatgaggcccaggcccaggttgcagagctagagttgcagctgcggtctgagcagcaaaaagcaactgagaaagaaagggtggcccaggagaaggaccagctccaggagcagctccaggccctcaaagagtccttgaaggtcaccaagggcagccttgaagaggagaagcgcagggctgcagatgccctggaagagcagcagcgttgtatctctgagctgaaggcagagacccgaagcctggtggagcagcataagcgggaacgaaaggagctggaagaagagagggctgggcgcaaggggctggaggctcgattacagcagcttggggaggcccatcaggctgagactgaagtcctgcggcgggagctggcagaggccatggctgcccagcacacagctgagagtgagtgtgagcagctcgtcaaagaagtagctgcctggcgtgagcggtatgaggatagccagcaagaggaggcacagtatggcgccatgttccaggaacagctgatgactttgaaggaggaatgtgagaaggcccgccaggagctgcaggaggcaaaggagaaggtggcaggcatagaatcccacagcgagctccagataagccggcagcagaacgaactagctgagctccatgccaacctggccagagcactccagcaggtccaagagaaggaagtcagggcccagaagcttgcagatgacctctccactctgcaggaaaagatggctgccaccagcaaagaggtggcccgcttggagaccttggtgcgcaaggcaggtgagcagcaggaaacagcctcccgggagttagtcaaggagcctgcgagggcaggagacagacagcccgagtggctggaagagcaacagggacgccagttctgcagcacacaggcagcgctgcaggctatggagcgggaggcagagcagatgggcaatgagctggaacggctgcgggccgcgctgatggagagccaggggcagcagcaggaggagcgtgggcagcaggaaagggaggtggcgcggctgacccaggagcggggccgtgcccaggctgaccttgccctggagaaggcggccagagcagagcttgagatgcggctgcagaacgccctcaacgagcagcgtgtggagttcgctaccctgcaagaggcactggctcatgccctgacggaaaaggaaggcaaggaccaggagttggccaagcttcgtggtctggaggcagcccagataaaagagctggaggaacttcggcaaaccgtgaagcaactgaaggaacagctggctaagaaagaaaaggagcacgcatctggctcaggagcccaatctgaggctgctggcaggacagagccaacaggccccaagctggaggcactgcgggcagaggtgagcaagctggaacagcaatgccagaagcagcaggagcaggctgacagcctggaacgcagcctcgaggctgagcgggcctcccgggctgagcgggacagtgctctggagactctgcagggccagttagaggagaaggcccaggagctagggcacagtcagagtgccttagcctcggcccaacgggagttggctgccttccgcaccaaggtacaagaccacagcaaggctgaagatgagtggaaggcccaggtggcccggggccggcaagaggctgagaggaaaaatagcctcatcagcagcttggaggaggaggtgtccatcctgaatcgccaggtcctggagaaggagggggagagcaaggagttgaagcggctggtgatggccgagtcagagaagagccagaagctggaggagaggctgcgcctgctgcaggcagagacagccagcaacagtgccagagctgcagaacgcagctctgctctgcgggaggagctcgagcacaccagcacacaggccctggtgagtgagctgctgccagctaagcacctctgccagcagctgcaggccgagcaggccgctgccgagaaacgccaccgtgaggagctggagcagagcaagcaggccgctgggggactgcgggcagagctgctgcgggcccagcgggagcttggggagctgattcctctgcggcagaaggtggcagagcaggagcgaacagctcagcagctgcgggcagagaaggccagctatgcagagcagctgagcatgctgaagaaggcgcatggcctgctggcagaggagaaccgggggctgggtgagcgggccaaccttggccggcagtttctggaagtggagttggaccaggcccgggagaagtatgtccaagagttggcagccgtacgtgctgatgctgagacccgtctggctgaggtgcagcgagaagcacagagcactgcccgggagctggaggtgatgactgccaagtatgagggtgccaaggtcaaggtcctggaggagaggcagcggttccaggaagagaggcagaaactcactgcccaggtggagcagctagaggtatttcagagagagcaaactaagcaggtggaagaactgagtaagaaactggctgactctgaccaagccagcaaggtgcagcagcagaagctgaaggtggggcagctgggggaatgggtctggcctctggacaagggagggaagctattctctaagctctggggccgtggggggttggtttataagtggttcctgctaatctataaaatcagctatgccactggcattgttggctacatggctgtcatgtttaccctctttggtcttaacttattattcaagatcaaaccagaagatgccatggactttggcatctcccttctcttctatggcctctactatggagttctggaacgggactttgcagaaatgtgtgcagactacatggcatctaccatagggttctacagcgagtcgggcatgcctaccaaacatctttcagacagtgtgtgtgctgtgtgtgggcagcagatctttgtggacgtcagtgaagaggggatcattgagaacaccggtgctcagcttccacgagttctgcatccgtggctggtgcatcgtgggaaagaagcaaacgtgtccctactgcaaagagaaggtagacctcaagaggatgttcagcaatccgtatcctttattggggtcgttgttgggagtgggctgtgggaagaaagtactggccagtgtgacctgcatttgggtcctcctggggccctcacttctgcccccaaccagaacatgtcaaaccatgaacaacaaaaagattatgaaggtgatgatgaggataaagaggatgatgacagacaccatggcatcatgaacccttactga

SEQ ID NO: 4848 - DNA, 511 bp, Homo sapiens
  SIMILAR (8)..(511): 971254mologous to Homo sapiens NuMA protein,accession number Z11584,Smith-Waterman Score=815.
  misc_feature (1)...(511): n = a,t,c or g
tttcgtgcgcattgaccgcctagccctgctgaatgagattcaggcggccagcccactggagcccaaggagcttgaggagctgcgtgacaagaatgagagccttaccatgcggctgcatgaaaccctgaagcagtgccaggacctgaagacagagaagagccagatggatcgcaaaatcaaccagctttcggaggagaatggagacctttcctttaagctgcgggagtttgccagtcatctgcagcagctacaggatgccctcaatgagctgacggaggagcacagcaaggccactcaggagtggctagagaagcaggcccagctggagaaggagctcagcgcagccctgcaggacaagaaatgccttgaagagaagaacgaaatccttcagggaaaactttcacagctggaagaacacttgtcccagctgcaggataacccaccccaggagaagggcgaggcgctgggtgatgtcttgncgctggaaaccttgaagccagaggcagccacc

SEQ ID NO: 4849 - DNA, 577 bp, Homo sapiens
  SIMILAR (320)..(493): 1001254mologous to Homo sapiens nuclear mitotic apparatus protein 1,accession number AF110460,Smith-Waterman Score=287.
gatttggggctagtcactttatttctttgcacttcatctccaaaatgggccgataaacactctgcattccctacctcaaagcattatgaatagactccatgaaaaaaatgcgtagaagagtcttgacaacatcagcaccaccttgtgagggcttctgtcgacaaggcccatttcttgcagacatacactttaaggacctttgcaaagcagttgggaatacatggatgtgccgtgggatctgagggcttcggaagggaatgggaagcttctgtacagtgccagggactgtacactgcaacagattcactctgtcttccagaagctagatgtggaagagccagacagcgccaactcatcgttctacagcacgcggtctgctcctgcttcccaggctagcctgcgagccacctcctctactcagtctctagctcgcctgggttctcccgattatggcaactcagccctgctcagcttgcctggctaccgccccacccactcgcagttctgctcgtcgttcccaggccggggtgtccagtggggcccctccaggtgaggggactacagggacttactatac

SEQ ID NO: 4850 - DNA, 515 bp, Homo sapiens
  SIMILAR (2)..(106): 801254mologous to Homo sapiens NuMA protein,accession number Z11584,Smith-Waterman Score=135.
  misc_feature (1)...(515): n = a,t,c or g
ggagaaagccaaaacacattatgatgcccagaagcagcagaaccaagagctgcaggagcagctgcggagcctggagcagctgcatgaaggaaaacaaagagctgcgagctgaagctgaacggctgggccatgagctacagcaggctgggctgaagaccaaggaggctgaacagacctgccgccaccttactgcccaggtgcgcagcctcggaggcacaggtaagaatttggctggcagactcacctcactcctattccactggacccctgtgccctctcctcctaggccactgctgccttaggcttttcttcactctccccctggccctctccttctcaaggttgcccatgcaagaccaagcagcttccgagacctgggcaaattccaggtggcaacttgatgcttttaaagagccgggagccccagtctaagccccagctggacttgagtattgacagcctggatctgaagctgcgaggaggggaccccantcagtatcancaggttaggaggg

SEQ ID NO: 4851 - DNA, 727 bp, Homo sapiens
  SIMILAR (308)..(667): 761254mologous to Homo sapiens Similar to nuclear mitotic apparatus protein 1,accession number BC004165,Smith-Waterman Score= 429.
  misc_feature (1)...(727): n = a,t,c or g
tcgaagaacagacaagtnnnctcagatggggacgtgtttgctgtgaagcagccttgttcatctggtggggatgggacatctggggctgggcattgccactatgaggagctattaggagaagccaggggagtggactgaaaggaaggcccaggtcaagtgctttccttggtacctctgaaaaatcagagagatgggctgcttgacctcatctgcttgtagtaaggatgggaaatggtctctttcaaaaagggctggacaaaatgccttctagcgtgaaggactgtacctcagcaggtttcctttccatagcaagctgcctcgtacccagccagacggcaccagcgtccctggagaaccagcctcacctatctcccagcgcctgccccccaaggtagaatccctggagagtctctacttcactcccatccctgctcggagtcaggcccccctggagagcagcctggactccctgggagacgtcttcctggactcgggtcgtaagacccgctccgctcgtcggcgcaccacgcagatcatcaacatcaccatgaccaaggtcaggctgctgggacaggggctgcagggcagcaattcccacttcctctcaagggcatctttgcactgggcactcagtcaggagcagggagggatgagcagccagtccatgttacagtgggaaagctgagaggtcttaaaaagggcagtgacttggttaagggcacttctg

SEQ ID NO: 4852 - DNA, 697 bp, Homo sapiens
  SIMILAR (1)..(330): 1001254mologous to Homo sapiens Similar to nuclear mitotic apparatus protein 1,accession number BC004165,Smith-Waterman Score= 544.
caagagctgcaggagcagctgcggagcctggagcagctgcagaaggaaaacaaagagctgcgagctgaagctgaacggctgggccatgagctacagcaggctgggctgaagaccaaggaggctgaacagacctgccgccaccttactgcccaggtgcgcagcctggaggcacaggttgcccatgcagaccagcagcttcgagacctgggcaaattccaggtggcaactgatgctttaaagagccgtgagccccaggctaagccccagctggacttgagtattgacagcctggatctgagctgcgaggaggggaccccactcagtatcaccaggtcaggaggcagccttcctccctatgtctgtttatggagtgcctgctgtttatcaggctgtatcctagtgagataaataagatgtgatctaaatttattcttagagaagaataaagaaaaaccgggtattataccagatatctattttagggcacagtttggaattaaaaagccaattggtcaagaaaggcttccgttggaagctatcgctccctgctgagtcttgaaagcatccataggtgtgtgtgccaggttgacgagaagagcagtgttgaacagaggctgtgaaagagcctgactaagctgagatgttgaggccaggaaggccccattgggagaccgggctattaagactttgattccct

SEQ ID NO: 4853 - DNA, 6123 bp, Homo sapiens
  SIMILAR (250)..(2991): 981254mologous to Homo sapiens GAL4/HA/NuMA fusion protein,accession number AAW21731,Smith-Waterman Score=4334.
  misc_feature (1)...(6123): n = a,t,c or g
ccgagtaaactcagcagccttggggaagtagtaagcaggttacattatgactttattgtgccttagaactaggtctagagaatcaggtccctcatgctcccagttccatggtttctgcttttttctaggccagggcaaaaggagatcttggtaacaagatgaatgggcccccatgtttgctgaatgtttaatgaagggcttgtgtggtaaatctggtgcctgttccccctctctgttcacatgggtctcatttactcccagaaatgccttgaagagaagaacgaaatccttcagggaaaactttcacagctggaagaacacttgtcccagctgcaggataacccaccccaggagaagggcgaggtgctgggtgatgtcttgcagctggaaaccttgaagcaagaggcagccactcttgctgcaaacaacacacagctccaagccagggtagagatgctggagactgagcgaggccagcaggaagccaagctgcttgctgagcggggccacttcgaagaagaaaagcagcagctgtctagcctgatcactgacctgcagagctccatctccaacctcagccaggccaaggaagagctggagcaggcctcccaggctcatggggcccggttgactgcccaggtggcctctctgacctctgagctcaccacactcaatgccaccatccagcaacaggatcaagaactggctggcctgaagcagcaggccaaagagaagcaggcccagctagcacagaccctccaacagcaagaacaggcctcccagngcctccgccaccaggtggagcagctaagcagtagcctgaagcagaaggagcagcagttgaaggaggtagcggagaagcaggaggcaactaggcaggaccatgcccagcaactggccactgctgcagaggagcgagaggcctccttaagggagcgggatgcggctctcaagcagctggaggcactggagaaggagaaggctgccaagctggagattctgcagcagcaacttcaggtggctaatgaagcccgggacagtgcccagacctcagtgacacaggcccagcgggagaaggcagagctgagccggaaggtggaggaactccaggcctgtgttgagacagcccgccaggaacagcatgaggcccaggcccaggttgcagagctagagttgcagctgcggtctgagcagcaaaaagcaactgagaaagaaagggtggcccaggagaaggaccagctccaggagcagctccaggccctcaaagagtccttgaaggtcaccaagggcagccttgaagaggagaagcgcagggctgcagatgccctggaagagcagcagcgttgtatctctgagctgaaggcagagacccgaagcctggtggagcagcataagcgggaacgaaaggagctggaagaagagagggctgggcgcaaggggctggaggctcgattacagcagcttggggaggcccatcaggctgagactgaagtcctgcggcgggagctggcagaggccatggctgcccagcacacagctgagagtgagtgtgagcagctcgtcaaagaagtagctgcctggcgtgagcggtatgaggatagccagcaagaggaggcacagtatggcgccatgttccaggaacagctgatgactttgaaggaggaatgtgagaaggcccgccaggagctgcaggaggcaaaggagaaggtggcaggcatagaatcccacagcgagctccagataagccggcagcagaacgaactagctgagctccatgccaacctggccagagcactccagcaggtccaagagaaggaagtcagggcccagaagcttgcagatgacctctccactctgcaggaaaagatggctgccaccagcaaagaggtggcccgcttggagaccttggtgcgcaaggcaggtgagcagcaggaaacagcctcccgggagttagtcaaggagcctgcgagggcaggagacagacagcccgagtggctggaagagcaacagggacgccagttctgcagcacacaggcagcgctgcaggctatggagcgggaggcagagcagatgggcaatgagctggaacggctgcgggccgcgctgatggagagccaggggcagcagcaggaggagcgtgggcagcaggaaagggaggtggcgcggctgacccaggagcggggccgtgcccaggctgaccttgccctggagaaggcggccagagcagagcttgagatgcggctgcagaacgccctcaacgagcagcgtgtggagttcgctaccctgcaagaggcactggctcatgccctgacggaaaaggaaggcaaggaccaggagttggccaagcttcgtggtctggaggcagcccagataaaagagctggaggaacttcggcaaaccgtgaagcaactgaaggaacagctggctaagaaagaaaaggagcacgcatctggctcaggagcccaatctgaggctgctggcaggacagagccaacaggccccaagctggaggcactgcgggcagaggtgagcaagctggaacagcaatgccagaagcagcaggagcaggctgacagcctggaacgcagcctcgaggctgagcgggcctcccgggctgagcgggacagtgctctggagactctgcagggccagttagaggagaaggcccaggagctagggcacagtcagagtgccttagcctcggcccaacgggagttggctgccttccgcaccaaggtacaagaccacagcaaggctgaagatgagtggaaggcccaggtggcccggggccggcaagaggctgagaggaaaaatagcctcatcagcagcttggaggaggaggtgtccatcctgaatcgccaggtcctggagaaggagggggagagcaaggagttgaagcggctggtgatggccgagtcagagaagagccagaagctggaggagaggctgcgcctgcttgcaggcagagacagccagcaacagtgccagagctgcagaacgcagctctgctctgcgggaggagctcgagcacaccagcacacaggccctggtgagtgagctgctgtcagctatagcacctctgccagcagctgcaggccgagcaggccgctgccgagaaacgccaccgtgaggagctggagcacagcaagcaggccgctgggggactgcgggcagagctgctgcgggcccagcgggagcttggggagctgattcctctgcggcagaaggtggcagagcaggagcgaacagctcagcagctgcgggcagagaaggccagctatgcagagcagctgagcatgctgaagaaggcgcatggcctgctggcagaggagaaccggtggctgggtgagcgggccaaccttggccggcagtttctggaagtggagttggaccaggcccgggagaagtatgtccaagagttggcagccgtacgtgctgatgctgatacccgtctggctgaggtgcagcgagaagcacagagcactgcccgggagctggaggtgatgactgccaagtatgagggtgccaaggtcaaggtcctggaggagaggcagcggttccaggaagagaggcagaaactcactgcccaggtggagcagctagaggtatttcagagagagcaaactaagcaggtggaagaactgagtaagaaactggctgactctgaccaagccagcaaggtgcagtagcagaagctgaaggctgtccaggctcagggaggcgagagccagcaggaggcccagcgcctccaggcccagctgaatgaactgcaagcccagttgagccagaaggagcaggcagctgagcactataagctgcagatggagaaagccaaaacacattatgatgccaagaagcagcagaaccaatagctgcaggagcagctgcggagcctggagcagctgcagaaggaaaacaaagagctgcgagctgaagctgaacggctgggccatgagctacagcaggctgggctgaagaccaaggaaggctgaacaagacctgccgccacctttacttgcccaggttgcgcagcttggaaggcacaaggttgcccatgcaagaccaagcagctttcgagacctgggcaaattccaggtggcaacttgatgctttaaagagccgtgagccccaggctaagccccagctggacttgagtattgacagcctggatctgagctgcgaggaggggaccccactcagtatcaccagcaagctgcctcgtacccagccagacggcaccagcgtccctggagaaccagcctcacctatctcccagcgcctgccccccaaggtagaatccctggagagtctctacttcactcccatccctgctcggagtcaggccccccctggagagcagcctggactccctgggagacgtcttccttggactcgggtcgtaagacccgctccgctcgtcggcgcaccacgcagatcattaacattcaccatgaccaagaaagctagatgtgggaagagccagacaggcgccaaacttatcgttctacagcaacgcggtctgctcctgcttcccaggctagcctgcgagccaccctcctctacttagtctctaactcgcctgggtttctcccgattatggcaactcagccctgctcagcttgcctggctaccgccccaccactcgcagttctgctcgtcgttcccaggccggggtgtccagtggggcccctccaggaaggaacagcttctacatgggcacttgccaggatgagcctgagcagctggatgactggaaccgcattgcagagctggcagcagcgcaattcggagttgtggcccccaaatctgaagaactggctatccccctgggagtccaggcctttccctgagcctgggcaccatcacagatgaggagatgaaaactggagacccccaagagaccctgcgccgagccaggcatgcagccaatccagatagccgagggcacgtggcatcaccacccggcagcagcgcaaaacgggtctcccttaggagccccaccagggccctgggaattccttgagtcttaaagaaggccaccagcatgtttcccacgccccatgactccccgaggaccgacttgaaggggcgcaaacagagcacttacttgaggcccagaagaaagcagctccagctttcttacttaaacaggcttgaccggcgccagtcgatggcctttcagcatccttcaaccacacccaagaagcttaggggaacagccttctgcggcggggagcctcaaagaaggccctgtccaaggcttcccccaacactcgcagtggaacccgccgttctccgcgcattgccaccaccacagccagcgccgccactgctgccgccattggtgccacccctcgagccaagggaacggcaaatcacctaaagggccaagtaccagtgagtggccccaccttgtgtccccgatgcttgccgtcacctggtcctccgcctactgtccctctcagtgccttctctcagcttcccaggccaaacagtagcctaacctcctagagacagtgatgtcttgcccccacccttgcctggttccttgttcttcacttgccgccttttccgaagtctccagggggccttgagcatggacagtgtgggcgctctcccctaccttgccctcccttttttccttaaaaagcaaaagtcactttctccatcacaaccaagatttgaaggcttggttttgatggctggggtcccttgggctctgtctatttcttcctcttagccttctggatctagcaagggacccataagaggagtaggcccctggttcctgctgtccctggtggctggggcccagccaggggccctcactttttaagttccaggactgggtttgacctggtgggagcccctgccagaaggatgctcttttcccaggacggatgggccctgtgttctcaggagtggggttgggggacagccttcagcagcagctcacaccctaccttccccagacttgcactggggtgggatttggagtgatgggaaggtttttaagggccggggatggatcttttctaaatgttattacttgtaaataaagtctatttttctcccgtgagtactgagttgacttgatcggtgtgggaaaaagaggaatatagg

SEQ ID NO: 4854 - DNA, 5272 bp, Homo sapiens
  SIMILAR (3383)..(4441): 991254mologous to Escherichia coli matches PS00743: Beta- lactamases class B signature 1, and PS00225: Crystallins beta and gamma,accession number U00006,Smith-Waterman Score=1863.
atgtccattttgctgacctcaatcgcgagacagtcgagagataagcgtacacgccttggacacaaacaacggattctggccggcctcgggtctaaccatccgatccgtcgtaatctgcaaggtctgcgtcgtttcgccctggtagaccggcagctcgtcgtccaaaatgtagtcacccgctggtgccggatggtgtaccagagtgctgcaaatgtgttcatccagcatcgaccaatttcccacgacgaacgagtacagcagcgcggcacagccatcacaatgatggttcaacaagcacaatgggccgaacgtggcaaatctgggctatctggtgtcgcaatcgggcctgccgttggataccagcgcattgcaggcgcagcttcgtgaaacattgccaccacatatggtaccggaggttctgctgcaacttccacagttaccacttaacgccaacggcaagctggatcgcaaagccttaccgttgcctgaactgaaggcacaagcgccagggcgtgcgccgaaagcgggcagtgaaacgattatcgccgcggcattctcgtcgttgctggggtgtgacgtgcaggatgccgatgctgatttcttcgcgcttggcggtcattcgctactggcaatgaaactggcagcgcagttaagtcggcaggttgcccgccaggtgacgccggggcaagtgatggtcgcgtcaactgtcgccaaactggcaacgattattgatgctgaagaagacagcacccggcgtatgggattcgaaaccattctgccgttgcgtgaaggtaatggcccgacgctgttttgtttccatcctgcgtccggttttgcctggcagttcagcgtgctctcgcgttatctcgatccacaatggtcgattatcggcattcagtcaccgcgccccaatggccccatgcagacggcggcaaacctggatgaagtctgcgaagcgcatctggcaacgttacttgaacaacaaccgcatggcccttattacctgctggggtattcccttggcggtacgctggcgcagggtattgcggcgcgactgcgtgcccgtggcgaacaggtggcatttcttggcttgctggatacctggccgccagaaacgcaaaactggcaggaaaaagaagctaatggtctggacccggaagtgctggcggagattaaccgcgaacgcgaggccttcctggcagcacagcagggaagtacttcaacggagttgtttaccaccattgaaggcaactacgctgatctgtcatcagctcggtcctgggcttccacatcgtttccacttaaccatgactttgggaccttagctggcgtttgcatcgggttgagtcacaacagagcaagtgatgcagaaactgtggtattggaaaactggcggcaggtacatgaacaatgtctcgcattacacagccagcagcagacgttacagcaacaggatgttctggcggcgcaaagtctgcaaaaagcccaggcgcagtttgacaccgcgctacaggccagcgtctttgacgatcagcaggcgttccttgcggcgctaatggatgaacaaacactaacgcagctggaacagctcaagcagaatctggaaaaccagcgccgtcaggcgcaaactctggtcactcagacagcagaaacgctggcacagcatcaacaacaccgacctgacgacgggttggctctcactgtgacggtggagcagattcagcaagagttagcgcaaactcaccaaaagttgcgtgaaaacaccacgagtcaaggcgagattcgccagcagctgaagcaggatgcagataaccgtcagcaacaacaaaccttaatgcagcaaattgctcaaatgacgcagcaggttgaggactggggatatctgaattcgctaataggttccaaagagggcgataaattccgcaagtttgcccaggggctgacgctggataatttagtccatctcgctaatcagcaacttacccggctgcacgggcgctatctgttacagcgcaaagccagcgaggcgctggaagtcgaggttgttgatacctggcaggcagatgcgaacgaaaaccaaacacacgcacaacacgagcaagcaccaacaacagggacgacacacggaacgacgatgacacacaacacggagcacacagaaagactaagcccgggatcgggtcaccgccgataccgacacaggtcgactgaccgaaaccgtcagtgtaccggaacgggaaacgatacccactttacccggtttgtgaatgtgaccaggctggataccgattttgcattcacccggagtgataacgcctgggcagttcgggccgatcatacgaacgcctgcttcatccagcttcactttcacggtcagcatatccagcgtcgggatgccttcagtgatggtgataatcagtttgatgcctgcgtcgatggcttccagaatggagtctttgcagaacggtgctggtacagtaacagaagcggtagcgccagtggcagcaacggcttcacgcacggtgttgaacaccggcaggccgaggccgctgtcagccagtttcttcgcgccgagttcggcgttgttaccttccagacgtaccacgaccggtacgttaacacccacttctgctaccgcgccgatgataccgtcagcgatcaggtcgcaacgaacgataccgccgaagatgttaaccagaacggctttcactttgtcgtcagagaggatgattttgaacgcttcggttacacgttctttggttgcgccgccgccaacgtcaaggaagttagccggttcgccgccgtgcagtttaacgatgtccatcgtacccatcgccagacctgcgccgttaaccatacaaccgatgttaccgtccagcgcaacttcccactgtgcagcctgtgcttcacgcggatcttcctgcgactggtcacgcatttcgcgcagatcaggctggcggaacagtgcgttgccgtcagcgcccagtttgccgtcgaggcaaatcagatcgccctgtttggtgatgaccagcgtaagcggatcaagcgcaactttatggataaggtccggagtttcttccgccactttttcgatttccacgccgccttcggtggaggcaataaagaccacacgacgggaactacggtcaacaacggcaccgagatacagctcttaagcgatatcggtcgctgcttcaaccagaatctggttaaccggttggccattggcatctgtttgatacgttaccagacgcttgcccagccagttttctgcaaaagcacggatgtcttctttgctgtttacaactttcacaccgccagcggactattccagtcatcgtccgcaaacgatgtgcgttatacactcacagccaccgaaatggtgattgcccctgcaggctttatggacgaagccatcagcgaaaacgtgctggcgggtaacatcatgagccgccgtgcgctctactcttacggtctgttactgccgcacaacgcgcaaggcaatgtgggtaatggccttggcgtgacgctggcaacgggcgacccgagcattattgcaccgacgaaaactatcgtcagaactggcgagaagatgattatcgacggcctggagtttgacttcctgatgaccccaggtagcgaagcgccagccgaaatgcacttctatattccggccctgaaagccctgtgtaccgccgagaacgccacgcataccctgcacaacttctacactctgcgcggcgcgaaaacccgcgacaccagcaagtggaccgagtatctgaacgaaacgctggatatgtggggtaacgacgcggaagtgctgtttatgccgcacacctggccggtctggggcaataagcatatcaatgattatattggtaaataccgcgataccatcaagtacattcacgaccagaccctgcacctggcgaaccaggtctacaccatgaatgaaatcggcgacatgattaagctgccgcctgcacttgccaataactgggccagccgcggctattacggttctgtcagccacaacgcccgcgcggtgtataacttctatcttggctattacgacgtgtacccggctaacctgcatccgtatggtcaggtggagatgggtaaacgttacgtgcaggcgctgggcggttctgcccgtgtcatcaacctggcgcaagaagcgaacaagcaaggtgattaccgctggtcggcagaactgctgaaacaggtgattgccgccaacccgggtgaccaggtcgcgaagaatctgcaagcgaataactttgaacagctgggctatcaggccgagtccgccacatggcgcggtttctacctgaccggcgcgaaagagctgcgcgaaggggtgcataagttcagccacggcaccaccggttccccggacaccattcgcgggatgtccgtcgaaatgctgttcgactttatggaccgccaggcttgtcatcaatacaatcgcacgcgggtagtcgatcaacttatcgagtttctccaagaccagcacgtcaatgcccatctggccgagatagttcgccatcatcagcccaaccgggccggcaccagcgatcgccaccttgaacgctatgaaatgtcaattaatatgcagaacaatgagcagacggaatacaaaaccgtgcgcggcttaacccgcggtctaatgttattaaatatgttaaataaacttgatggcggtgccagcgtcgggctgctggcggaactcagcggcctgcatcgcaccactgtgcggcgactgctggagacgctgcaggaagagggatatgtccgccgtagcccctccgatgatagttttcgactgaccatcaaagtgcggcaattaagcgaaggatttcgtgacgaacagtggatttctgcactggcggccccactgctgggcgatctgttgcgcgaagtggtatggccgacagatgtgtccacgctggatgttgatgcaatggtggtacgcgaaaccactcaccgtttcagccgcttatcctttcaccgggcaatggtcgggcgacgtttgccgcttctgaaaaccgcctcgggcctgacctggctggccttttgcccggaacaagaccgcaaggaattaatcgaaatgttagcctcccgccccggtgatgactatcaactggcacgggaaccgttaaagctggaagccattctggcgcgcgcgcgcaaagagggttacggacagaactaccgcggctgggatccaggaggagaagatcgcctctatcgccgtaccgctgcgcagtga

SEQ ID NO: 4855 - DNA, 565 bp, Homo sapiens
  SIMILAR (224)..(304): 741254mologous to Homo sapiens PRO1902,accession number AF118082,Smith-Waterman Score=112.
  misc_feature (1)...(565): n = a,t,c or g
taattttggaccctnaagtaagcttaagtctaatttncaagctgtacgtaaatnaagatttgggtgcctaagaaanaatgtaactaacatataactttaactcaccatnaaatttgctaagaaccatgattttttggtttggttttgaagacagagtctggctgtgttgcccagtgctcactgcaacctcagtgctcactgcaacctccacttcccagggttcaagcaattctcatgcctcagcctcctgagttcctgggactacaggtgcataccaccacacccaggtaatctttggtatttttagtagagacagggtttcaccatgttggccaggctggactccaactccgggcctcaagcgatccacccgcctcagcctcccaaagtgctgggattgcacgtgtgaaccaccgcacccagccagatccatgatattttgaattcaacttagtctcaggcttccatatccccaaaatatccatctttacattggtacaagttctcttctgggataatgttcttcaacaaaaaacaactctctttggagcaaaacctcctctcc

SEQ ID NO: 4856 - DNA, 613 bp, Homo sapiens
  SIMILAR (30)..(611): 941254mologous to Homo sapiens Similar to single-stranded-DNA -binding protein,accession number BC000274,Smith-Waterman Score= 1002.
gaggcctgcgagcactccggcgaggccaaggccttccaggactatagtgctgcagccgcccccagccctccccacgagcccaggggcatccgagcatgggcggcccaatgcagagggtgacgcctcctcgtggcatggccagcgtggggccccagagctatggaggtggcatgcgacccccacccaactccctcgccggcccaggcctgcctgccatgaacatgggcccaggagttcgtggcccgtgggccagccccagtggaaactcgatcccctactcctcctcatcccccggcagctacaccggacccccaggaggaggtgggccccctggaacacccatcatgcctagccctggagattccaccaactccagcgaaaacatgtacactatcatgaaccccatcgggcagggcgccggcagggctaatttcccgctcggccctggcccggagggccccatggccgccatgagcgcgatggagcctcaccacgtgaacggatccctgggctcgggcgacatggacgggttgccgaagagttcccccggcgccgtggccggcctgagcaacgccccgggcaccccgcgggacgacggcgagatggcggccgc

SEQ ID NO: 4857 - DNA, 555 bp, Homo sapiens
  SIMILAR (192)..(269): 341254mologous to Homo sapiens single stranded DNA binding protein-3,accession number AY026292,Smith-Waterman Score=37.
  misc_feature (1)...(555): n = a,t,c or g
gacgatgcctgccgtgcccgcctggggctcgggncggtgaggcccggggcgcggggtagctatggcgacggcaagcgcggcccgcggcgccgcctgacaggtgtgggccccggcggcggcggcgtggagcagcatgtacgccaaggggggcaagggttcggccgtgccctccgacagccaggcccgcgagaagttggcgctgtacgtttatgagtacctgctgcacatcggtgcccagaagtcagcccagaccttcctgtctgagatccgatgggagaagaacatcatgcctagccctggagattccaccaactccagcgaaaacatgtacactatcatgaaccccatcgggcagggcgccggcagggctaatttcccgctcggccctggcccggagggccccatggccgccatgagcgcgatggagcctcaccacgtgaacggatccctgggctcgggcgacatggacgggttgccgaagagttcccccggcgccgtggccggcctgagcaacgccccgggcaccccgcgggacgacggcgagatggcggccgc

SEQ ID NO: 4858 - DNA, 776 bp, Homo sapiens
  SIMILAR (4)..(774): 891254mologous to Homo sapiens single stranded DNA binding protein-3,accession number AY026292,Smith-Waterman Score=1227.
  misc_feature (1)...(776): n = a,t,c or g
gcngagnccangnccttccagnactatagtgctgcagccgccncagccccggttatgnggagtatggccccaggtgacacaatgncngcaggctccatgcggcntggctctcccagccccttcatgtcaccgcgcttcncagngggcntncggccaccctgcggatgcganngtcagcctcccgcaggcctcctggctccccagcccctcctccctggcgccatggagccctccccacgagcccaggggcatccgagcatgggcggcncaatgcagagggtgacgcctcctcgtggcatggccagcgtggggccccagagctatggaggtggcatgcgacccccacccaactccctcgccggcccaggcctgcctgccatgaacatgggcccaggagttcgtggcccgtgggccagccccagtggaaactcgatcccctactcctcctcatcccccggcagctacaccggacccccaggaggaggtgggccccctggaacacccatcatgcctagccctggagattccaccaactccagcgaaaacatgtacactatcatgaaccccatcgggcagggcgccggcagggctaatttcccgctcggccctggcccggagggccccatggccgccatgagcgcgatggagcctcaccacgtgaacggatccctgggctcgggcgacatggacgggttgccgaagagttcccccggcgccgtggccggcctgagcaacgccccgggcaccccgcgggacgacggcgagatggcggccgc

SEQ ID NO: 4859 - DNA, 457 bp, Homo sapiens
acctcccgctcctatttcaccgtcccgatcccatccgcccccaccccgggacccgcgccccagggcggccttcccatgcatcgcccctcccccgttccctcctgtccccaccccatgtctgcccaggacccagccctgccctgtcccccattgtccctgggggcgggtcccagcctcttccggagctgaactcggcccctgcgcgctgccccctcctctctccgcagtactcgccagggatgaccatgagcgtgtgatggggcggcagccccgggcctctctgcgggcctaggcttctgcccagcgcccctgctcagggcgaggggctgaggtcacacctcgggcacctggactcctggccaatcaaggcttgcccagctgggaggccccacacgaaagactcttaccattttattaaaaacgcaaggacctcagagcggacgcgtgggtcgacccg

SEQ ID NO: 4860 - DNA, 2035 bp, Homo sapiens
  SIMILAR (1)..(816): 461254mologous to Homo sapiens Similar to single-stranded-DNA -binding protein,accession number BC000274,Smith-Waterman Score= 489.
atgtacgccaaggggggcaagggttcggccgtgccctccgacagccaggcccgcgagaacctcagcgccttccaagctgccacagagctcacctctcttgacaggttggcgctgtacgtttatgagtacctgctgcacatcggtgcccagaagtcagcccagaccttcctgtctgagatccgatgggagaagaacatcacgctgggggagccccctgggttcctgcactcctggtggtggtacgggctgggctgctgtggcgtcttctgggacctgtactgcgcggcgcctgacagaagagaggcctgcgagcactccggcgaggccaaggccttccaggactatgaaacgccggagcgcccagcccatcgccatggcaacgcgggccgggccggctcctcttcagggatgattgacgtaggggggtcttcagacccacagatcctcaggccgacaaccccagtgtgctcactgaccaatgccagctcgctgtcccatggggccggccacctgcagagaggagggggcacaccccagagtgctgcagccgcccccagccccgttatggggagtatggccccaggtgacacaatggccgcaggctccatggcggctggcttcttccagggcccccccggctcccagccgtccccccacaaccccaacgcccccatgatggggcctcacggtcagcccttcatgtcaccgcgcttcccagggggcccccggcccaccctgcgggatgcggagtcagcctcccgcagggcctccctgggttcccagcccctcctcgcctgggcgccatggagccctccccacgagcccaggggcatcccgagcatgggcggccaaatgcaagaggggtgacgcctcctcgtggcatgggccagcgtggggccccagagcctatggaggtggcatgcgacccccacccaactccctcacccgccccagggcatgcctgcccatgaacatgggccccaggaagttcgtgggcccgtgggcccagcccccagtcgaatactcgatcccctaattcctcctcatcccccggcagctacaccgggacccccaggaggaggtgggccccctggaacaccccatcatgcctagccctggagattcccaccaactccagcgaaaacatgtacactatcatgaaccccatcgggcagggcgccgacagggctaatttcccgtctcggccctggcccggagggccccatggccgcctatgagcgcgtatggagcctcaccacgtgaacggatccctgggctcgggcgacatggacgggtttgccgagagagttcccccaggcgccagtggccggcctgagcaacgccccgggcaaccccgcgggacgacggcgagatggcggccgccgggaccttccatgcacccagttcccagagcgaaaagctactcgcccagggatgaccatgagccgtgtgaattgggcggcagccccgggcgctctctgcgggcctaggcttctgcccaggcgcccctgcctcagggcgaaggggctgaaggtcacaccttcgggcaccctggactccctggccaatcaaggcttgcccatgctgggaggccccacacgaaagactcttaccattttattaaaaacgcaaggacctcgagagacgttcttttctgtatggacccttcctgccatttgtattttggtcccagagagaaaggctctttgggggggcccctcttccccaggacgtcaggggggtggggcccattaaataaattggaagctggttttggtttttggtagcttgtctcagattccctctttggccttctgccaccacactctccaccctgtggtctttgttccgtcccggcccccatctagccccacctttgagaactgggggcagagcgaggctccaggttctgggctctccctgggagttggggtgatgaccatgggcagaggggatgggactgaagctgggcgctcaagagtcggggaagtagagggaggcagagtcaggtcacaggctctcgacgaagaactgg

SEQ ID NO: 4861 - DNA, 471 bp, Homo sapiens
  SIMILAR (351)..(470): 901254mologous to Homo sapiens Human FLEXHT-35 protein sequence SEQ ID NO:35,accession number AAB36613,Smith-Waterman Score=187.
  misc_feature (1)...(471): n = a,t,c or g
agcgcccnnnattggaatcgagaccactagtcagagtggtggaattcggcgagcggagaggcccgcggggctcgcgggagtccaggggcagacgggatgggtctccgtgctgaaacccccggcgctccggcaacactgtgaagcatcctgtgtgtgtgtgaagcacccgccgtcagtcaagtatgcccggtgctttctctcagaactcatcaaaaagccctcgggaggctcggtcacaatctccgagagcacagccatcatctctcacggtaccacaggcctggtcacatgggacgccaccctctaccttgcagaatgggccatcgagaacccagcagccttcactaacagacgtgctgtattgcccagaagccatcgtgtcgctggtcggggtcctgcggaggctggctgcctgccaggagcacaagcgggctcctgaggtctacgtggcctttaccgtccgcaacccaa

SEQ ID NO: 4862 - DNA, 402 bp, Homo sapiens
  SIMILAR (157)..(2): 881254mologous to Homo sapiens Human FLEXHT-35 protein sequence SEQ ID NO:35,accession number AAB36613,Smith-Waterman Score=241.
cccggcctagctcggtggtgaacagctggcacgtctctgggttgtggacggtaaaggccacgtagacctcaggagcctgctggtgctcccggcaggcagccagcctccgcaggatcctgaccagcgacacgatggcttctgggcaatacagcacgtctttttgatgagttctgagagaaagcaccgggctttcttgactgacggcgggtgcttcacacacacacaggatgcttcacagtcttctgcaaaatatcccgcagcagctcagaatctgatgagtctcttaactttgcttctaagctgtggcaggagcgccgggggtttcagcacggagacccatcccgtctgcccctggactcccgcgagccccgcgggcctctccgctcgcccgccgccacgaaa

SEQ ID NO: 4863 - DNA, 3159 bp, Homo sapiens
  SIMILAR (1546)..(2046): 761254mologous to Homo sapiens Human FLEXHT-35 protein sequence SEQ ID NO:35,accession number AAB36613,Smith-Waterman Score=595.
ctcctgctgtgggactgggtcatctgccagctctccaaggagctggcggaaaaccgctgcaatcagagcgaacccaggtcccggtcagcctgtgtggagattgctgcattcacctttaatatggctaaaatgttttccttcaatgacagtaatgctgccagaatccatcaagacacccaggaactgatgtgctttggcagatggtgctggaaagatgggattcccggcagcctttgcatcccttgctcacagcccatgagcatctccactgtccagcaggggaagaaagcagcatcatcccactattccaggggaggtgctaaatacgagggtgaggctgtcaagcggtccctggtggagtcctacactcacccaaacagcaacgagacagagcggagggagaacatcgataccgtcatgaactgcttcagcacagaagactttgactttgtgactctgtactacagagagccagataacgtgggacatcgattcgggccagaggcagagaagaggaagttgatgattcagcaaatcggcaggaccatcgtgtatctggtgggagccactgagaagcacagcctgcagagcacctcagcaccatggggtgaccaccgtgaagaagagacccaacgtcaacaagatcccttgaccaactacatcaagttcagggtctgggtcaagtttgatattgcgggctacggtggctttgggctgcccctacccaaattggggcaagaggaagccctttaccaggcactgaagaatgcgcaccctcacctccaggtctacaagaaggaggagtttccagaacacttccatctcgctaaacatgaccgggttctgccaatcgtgatttttcagagaattataatgtgtttcaacaaaggcagccatggctttgataatgtcctcatggacatgaacatcatattcagagctttcgggccagatttcaagaggaatcgcctggccgagccttttaacagcatccacatctacccattcgtgtctcctgggagtcacccccaaacccacaacggctccctggcagtcacccaggaaatgctcatgaactcttatgaccagcagccaggcagagagctgatcaaaacagcaaaagcaaagcagtgccccggcccagttctaaagccaaccttccttaatcacccagacccatcccagtccaggctcggcttccgcccggtctcccggcaacgctgcggccccgcccccgtcttggtgcccgaggagaacgcggggaccgaactcttgctgcagagtttcgagcgccgcttcctggcggcgcgcgcactgcgttccttcccctggcagactgtgaagcatcctgtgtgtgtgaagcaccggctgtcagtcaagtatgcccggtgctttctctcagaactcaccaaaaagcacgaggctgtccacacagagcttttggacaagctgtacgaggacctggcagagaccctgatggccaaggagtccacccagggccacccgagctatttgctgaattccgttgtctcaggaatgttcgatgaatggaatcctgtgtggcctgagatgagtgtctttcatgccacgactgtcctagagcttggcagtggcgccagcctcacaggcctggccatctgcaagatgtgccgcctccaggcatacatcttcagcgactgtcacagccaggtcctcgagaagctccgagggaatgtccttctcaatggcctctcattagaggcagacatctctgccaacttagacagccccagggtgacagtggcccagctggactgggacgtcgcgacggtccatcagctctctgccatccagccagatgttgtcattgcagcaggcaatgcccagccccgggcactctgtgcaggcgacgtgctgtattgcccagaatccatcgtgtcgctggtcgcggtcctgcggaggctggctgcctaccgggagcaccagcgggctcctcaagtctacgtggcccttatcgtccgcaacccagagacgtgccagctgttcaccaccgagctatcctttgccccagatcaccctgagcacagcccctcctggcagccatgtgcacagatgcacgcgcagcagcctctgcctgcacacagagacgtgggtccaatgcctgtccacgtggggcagcgcgttaactacagagccaacaaacaagccagcacacgaaggcatactgggttccacgacaaacattttctttgtgcaaataaaaacgtgtgtatcaagtatgatgttccccccaacgtggacacactcggttcctcacaaagccaagcccgctgcagctgccacatctgtggacacactcggttcctcacaaagccaagcccgctgcagctgccacatcggtggacacactcggttcctcacaaagccaagcccgctgcagctgccacatccctggacacactcggttcctcacaaagccaagcccactgcagctgccacatccctggacacactcggttcctcacaaagccaagcccgctgcagctgccacatcggtggacacactcggttcttcacaaagccaagcccgctgcagctgccacatcggtggacacactcgattcctcacaaagccaagcccactgcagctgccacatccctggacacactcggttcttcacaaagccaagcccgctgcagctgccacatccctggacacactcggttcttcacaaagccaagcccgctgcagctgccacatccctggacacactcggttcctcacaaagccaagcccgctgcagctgccacatccctggacacactcggttcctcacaaagccaagcccgctgcagctgccacatcggtggacacactcggttcttcacaaagccaagcccgctgcagctgtcacatcggtggacacactcggttcttcacaaagccaagcccgctgcagctgccacatcggtggacacactcgattcctcacaaagccaagcccactgcagctgccacatccctggacacactcggttcttcacaaagccaagcccgctgcagctgccacatccctggacacactcggttcttcacaaagccaagcccgctgcagctgccacatccctgggcttatggtgcagcaggtgcttttttcaagacaggaatcaaaatgttag

SEQ ID NO: 4864 - DNA, 1473 bp, Homo sapiens
  SIMILAR (289)..(1038): 771254mologous to Homo sapiens Human FLEXHT-35 protein sequence SEQ ID NO:35,accession number AAB36613,Smith-Waterman Score=977.
atggcgcctgaggagaacgcgggtaccaaactcttgctgcagagtttcgagcgccgcttcctagcggcgcgcacactgcgctccttcccctggcaggtgggcggcggggcgagcggagaggcctgcggggcttgcggaagtccaggggcagacgggatgggtctccctgctgaaacccccggcgctcctgccacggagggatcacatagcgctttgccaacacattctattgcgtgttttaatgttcctgtgaatgcgcccttgagatttctctctctcccgtccacacggagcttagaagcaaaattaagagactcatcagattctgagctgctgcgggatattttgcagaagcacgaggctgtccacacggagcttttggacgagctgtacgaggcgctggcagagaccctgatggccaaggagtccacccagggccactggagctatttgctgcccagatacccttcctgcacagacaaagtgaaaacccctcggaaggctcggtcacactctccgagcacagccatcatctcccacggtaccacaggcctggtcacatgggacgctgcccgctaccttgcagaatgggccatcaagaacctggcagccttcactaacaggactgtcctagagcttggcagtggcgccggccttacaggcctgtccatctgcaagatgtgccacccccggacatacatcttcagcgactgtcacagccgggtcctcgagcagctccgagggaatgtccttctcaatggcctctcattagaggcagacatcactgccaacttagatagccccagggtgacagtggcccagctggactgggacgtagcgacggtccatcagctctctgccttccagccagatgttgtcattacagcagacgtgctgtattgcccagaagccatcgtgtccctggtcggggtcctgcggaggctggctgcctgctgggagcaccagtgggctcctgaggtctacatggcctttaccgtccgcaacccagagacttgccagctgttcaccaccgagctagcccccagcacctgtgagggtgttctgtcattgtcccatctcaccgacaaaaacactaggacacacagaggccaagagacccccgagctcccgcagattgcagcccggccacctggctttagtgccttcacagtacacccaagccccccattgccaccagattttgccccagctccccctgagcacagcccctcctggcagccatgtgcaaagatgcacccgcagcagcctctgcctgcacacagagacatggacgacccagtgcctgtccacgtggggcagcccgttaactacagagccaacaaacaagccagcacgcgaagacatactgggttccacgacagagtcccgcacaacctcgcacaggaggctggccaggcgtggggctcaggcctgtcatctcagcactttaggaggctaaggcaggaggactaa

SEQ ID NO: 4865 - DNA, 2967 bp, Homo sapiens
  SIMILAR (343)..(2670): 971254mologous to Escherichia coli K12 ATP-dependent serine activating enzyme (may be part of enterobactin synthase as component F),accession number AE000164,Smith-Waterman Score=3918.
atgaaacaagaagttatcctggtactcgactgtggcgcgaccaatgtcagggccatcgcggttaatcggcagggcaaaattgttgcccgcgcctcaacgcctaatgccagcgatatcgcgatggaaaacaacaaccaggcggtgttccctggaaagttgcagataccacgaaggcaaacgatgaccgaaatacaacgcctgctgaccgaaacgattgagtctctgaatacccgcgaaaaacgcgacaacaaaccccgctttagtatcagttttatccgtaaacatccggggctgtttatcgataataaaatgaacacttctattcccattaaaattgataacctgccaggtgagtatgcgcagctggcgcagctcaacgccactcaggttgagattccagaaaccacgcttagcgcgctggtggcagaacaagcggcaaaaacaccggatgctccggcgctggcagatgcgcgttacctgttcagctatcgggaaatgcgcgagcaggtggtggcgctggcgaatctgctgcgtgagcgcggcgttaaaccaggggacagcgtggcggtggcactaccgcgctcggtctttttgaccctggcactccatgcgatagttgaagctggagcggcctggctaccgctggataccggctatccggacgatcgcctgaaaatgatgctggaagatgcgcgtccgtcgctgttaattaccaccgacgatcaactgccgcgctttagcgatgttcccaatttaacaagcctttgctataacgccccgcttacaccgcagggcagtgcgccgctgcaactttcacaaccgcatcacacggcttatatcatctttacctctggctccaccggcaggccgaaaggggtaatggtcgggcagacggctatcgtcaaccgcctgctttggatgcaaaatcattatccgcttacaggcgaagatgtcgttgcccaaaaaacgccgtgcagttttgatgtctcggtgtgggagtttttctgcccgtttatcgcaggggcaaaactggtgatggctgaaccggaagcgcaccgcgacccgctcgctatgcagcaattctttgccgaatatggcgtaacgaccacgcactttgtgccgtcgatgctggcggcatttgttgcctcgctgacgccgcaaaccgctcgccagagttgcgcgacgttgaaacaggttttctgtagtggtgaggccttaccggctgatttatgccgcgaatggcaacagttaactggcgcgccgttgcataatctatatggcccgacggaagcggcggtagatgtcagctggtatccggcttttggcgaggaactggcacaggtgcgcggcagcagtgtgccgattggttatccggtatggaatacgggtctgcgtattcttgatgcgatgatgcatccggtgccgccgggtgtggcgggtgatctctatctcactggcattcaactggcgcagggctatctcggacgccccgatctgaccgccagccgctttattgccgatccttttgccccaggtgaacggatgtaccgtaccggagacgttgcccgctggctggataacggcgcggtggagtacctcgggcgcagtgatgatcagctaaaaattcgcgggcagcgtatcgaactgggcgaaatcgatcgcgtgatgcaggcgctgccggatgtcgaacaagccgttacccacgcctgtgtgattaaccaggcggctgccaccggtggtgatgcgcgtcaattggtgggctatctggtgtcgcaatcgggcctgccgttggataccagcgcattgcaggcgcagcttcgtgaaacattgccaccacatatggtaccggtggttctgctgcaacttccacagttaccacttagcgccaacggcaagctggatcgcaaagccttaccgttgcctgaactgaaggcacaagcgccagggcgtgcgccgaaagcgggcagtgaaacgattatcgccgcggcattctcgtcgttgctggggtgtgacgtgcaggatgccgatgctgatttcttcgcgcttggcggtcattcgctactggcaatgaaactggcagcgcagttaagtcggcaggttgcccgccaggtgacgccggggcaagtgatggtcgcgtcaactgtcgcccaactggcaacgattattgatgctgaagaagacagcacccggcgtatgggattcgaaaccattctgccgttgcgtgaaggtaatggcccgacgctgttttgtttccatcctgcgtccggttttgcctggcagttcagcgtgctctcgcgttatctcgatccacaatggtcgattatcggcattcagtcaccgcgccccaatggccccatgcagacggcggcaaacctggatgaagtctgcgaagcgcatctggcaacgttacttgaacaacaaccgcatggcccttattacctgctggggtattcccttggcggtacgtggcgcagggtggcatttcttggcttgctggatacctggccgccagaaacgcaaaactggcaggaaaaagaagctaatggtctggacccggaagtgctggcggagattaaccgcgaacgcgaggccttcctggcagcacagcagggaagtacttcaacggagttgtttaccaccattgaaagcgagtgtaacgtttacagcgatttagacctctatctcggtgttcagcgaatcaactggacagagatgtttaatcctggcgcgaccttcgctgtcactttcagtggtttgaatgacaccatccgcaacagtcagtacggcgcgatgaaagtgaaagacgcgatcgtcgatgctttcacgcggaaaaatctgccgcgtccaaatgttgatcgcgatgcgccggatatccgcgttaacgtctggctgcataaagaaaccgccagtatcgctcttgatctgagtggtgatggtttacatctgcgtggtatcgcgatcgtgctg

SEQ ID NO: 4866 - DNA, 413 bp, Homo sapiens
  SIMILAR (122)..(412): 421254mologous to Homo sapiens dJ8B1.3 (similar to PLASMA- CELL MEMBRANE GLYCOPROTEIN PC-1),accession number AL035701,Smith- Waterman Score=209.
accatggggtgaccaccgtgaagaagagacccaacgtcaacaagatcccttgaccaactacatcaagttcagggtctgggtcaagtttgatattgcgggctacggtggctttgggctgcccctacccaaattggggcaagaggaagccctttaccaggcactgaagaatgcgcaccctcacctccaggtctacaagaaggaggagtttccagaacacttccatctcgctaaacatgaccgggttctgccaatcgtgatttttcagagaattataatgtgtttcaacaaaggcagccatggctttgataatgtcctcatggacatgaacatcatattcagagctttcgggccagatttcaagaggaatcgcctggccgagccttttaacagcatccacatctacccattcgtgt

SEQ ID NO: 4867 - DNA, 231 bp, Homo sapiens
  SIMILAR (55)..(159): 651254mologous to Mus musculus putative,accession number AK017533,Smith-Waterman Score=122.
tccaggctcggcttccgcccggtctcccggcaacgctgcggccccgcccccgtcttggtgcccgaggagaacgcggggaccgaactcttgctgcagagtttcgagcgccgcttcctggcggcgcgcgcactgcgttccttcccctggcagactgtgaagcatcctgtgtgtgtgaagcaccggctgtcagtcaagtatgcccggtgctttctctcagaactcaccaaaaag

SEQ ID NO: 4868 - DNA, 1506 bp, Homo sapiens
  SIMILAR (220)..(663): 311254mologous to Homo sapiens dJ8B1.2 (KIAA0879 protein),accession number AL035701,Smith-Waterman Score=187.
atgcacaaattcaccaccaacaacacagaaattaccgtctccctctattctaaggaattatttttcattttgccatctctgaagttggaatacaccttacaatcactgggcaacaaagcagcatcatcccactattccaggggaggtgctaaatacgagggtgaggctgtcaagcagtccctggtggagtcctacactcacccaaacagcaacgagacagagcggagtgcgaacatcgatactgtcatgaactggttcaccaaggaagactttgactttgtgactctgtgttacagagagccagataacgtgggacatcgattcaggccagaggcagagaataggaagttgatgattcagcaaatcgacaggaccatcagaccatgggatgaccaccgtgaagaagagacccaatgtcaacaagatcccttgtccaactacatcaagtttatggacttggtcaagtttgatattgtgggctacggtggctttgggatgcccctgcccaaattggggcaagaggaagccctttaccaggcactgaagaatgcgtaccctcacctccacatctacaagaaggaggggtttccagaacacttccatctcgctaaacatgaccgggttctgccaatcgtgatgtatgccaactttggttacagtatcaatgggatatcgctattgtacttttatactcatttgtgtgataagtacttcaatgtccacttcttccacgagcccctgagcctctggagggcccagaccacacctagtctttctcaccgttacatctcccttgtcaggcacatggacgccaccaacctggacgcttctgaagcccagcttccaggatcgccctatcctgactccgccccaggacccgccaacctggactctacccaggacctgccccaacgacgcttatcctggccctaccccaggcctcgccctcctaacgctcatcctggccccgccctacagcccgcccccaggaccctcctcctgaccctacccccaggccccgccccctctctgccgccgcgcactgccctgggcccaccccctcttcagtccaggcccggcttccgcccggtctcccggcaacgctgcggccccgcccatttcatggcgcccgaggagaacgcggggaccgaactcttgctgcagagtttcgagcgccgcttcctggcggcgcgcacgctgcgctccttcccctggcaggggggcggcgggcgagcggagaggcccgcggggctcgcgggagtccaggggcagacgggatgggtctccgtgctgaaacccccggcgctcctgccacgtgagttcctgggctctccccggtcagggccgcgagacccggtccccgtccctggggcctggccaaagtcgctcgcacccctcctgccccgcgagctggcggcggaagatgagggcgtctccaccgccttgggggggcagacgcgtgctcggtgtggggtacagttcacgatcattttcacgactttttaa

SEQ ID NO: 4869 - DNA, 781 bp, Homo sapiens
  SIMILAR (289)..(780): 991254mologous to Homo sapiens Human FLEXHT-35 protein sequence SEQ ID NO:35,accession number AAB36613,Smith-Waterman Score=845.
atggcgcctgaggagaacgcgggtaccaaactcttgctgcagagtttcgagcgccgcttcctagcggcgcgcacactgcgctccttcccctggcaggtgggcggcggggcgagcggagaggcctgcggggcttgcggaagtccaggggcagacgggatgggtctccctgctgaaacccccggcgctcctgccacggagggatcacatagcgctttgccaacacattctattgcgtgttttaatgttcctgtgaatgcgcccttgagatttctctctctcccgtccacacggagcttagaagcaaaattaagagactcatcagattctgagctgctgcgggatattttgcacaagactgtgaagcatcctgtgtgtgtgaagcacccgccgtccgtcaaatatgcccggtgctttctctcagaactcatcaaaaagcacgaggctgtccacacagagcctttggacgagctgtatgaagcgctggcggagaccctgatggccaaggagtccacccagggccaccggagctatttgctgccctcgggaggctcggtcacactctccgagagcacggccatcatctcctacggtaccacaggcctggtcacatgggacgccgccctctaccttgcagaatgggccatcgagaacccggcagtcttcactaacaggactgtcctagagcttggcagtggtgctggcctcacaggcctggccatctgcaagatgtgccgcccccgggcatacatcttcagcgactgtcacagccgggtccttgagc

SEQ ID NO: 4870 - DNA, 613 bp, Homo sapiens
caccaaaggcatgtggcatatttaccaatgtcatgtattctgaacaaaggcaaaaaatacaaattcctaccattaaactggcttggttgttgtttgggttggagtagctgtgggggcttggggaagggtgtcgtttctttctagtagtctcatgtcgctttaggtcagctgggctggcttacacgcgctgtgcggtcttcatggagatgggagctctgtgtgtcaagcacaggaagtggtctcccagcgttcagcctgaagcagcccaagtcctgtaggtgctggtaagaggaagtgaagacaggaagttgcgtgggcatctcacactggcaaacaagcacaggttccctcaggccgtcttccatctgcctcctgtgctccttcctaggtccttggcctgcttgtcctgtcccaggggatgtgcccagataaggctgtcagtgaacacccccttacccccttttccccatcatcctcacgtacagttttggtatgctgagttccaccgtattgattaggcacattttagaaacgaataaaaaggagaagtctctccttgcagctgagggagtgaggcatttgcaggtatcctgaacctcccagcagtcacccg

SEQ ID NO: 4871 - DNA, 1845 bp, Homo sapiens
  SIMILAR (188)..(481): 731254mologous to Homo sapiens Human secreted protein, SEQ ID NO: 5954,accession number AAG01873,Smith-Waterman Score=326.
  misc_feature (1)...(1845): n = a,t,c or g
ctctaatacagcacacagacacagggttatctgtgtcgttatcaactacacccaacgtgacgccgccatctcttcgcggagacgcatcaacacttcagcactcaaacacaacgtgcgtgtcaacaggctcttctctcctcccctctccgtcatatatttataagaacgggggacctacatttgccagatcaccacctctctgtaccgagctcagcagatcatccagctcaacatccaagcttcccctaaagtacgactgagcttggcaaacgaagctctgctgcccaccctcatctgcgacattgctggctattaccctctggatgtggtggtgatgtggacccgagaggagctgggtggatccccaagcccaagtctctggtgcctccttctccaagcctcaggcaaaagcgttggcaggcacctacagcatctcctcctctctcaccgcagaacctgggctctgcaggtgccactttacacctgccaggtcacacacatctctctggaggagccccttggggccagcaccccaggttgtcccaccagagcggagaacagccttgggagtcatctttgccagcagtctcttccttcttgcactgatgttccctggggcttcagagacggccaagcacctaacaggacttgggctgcttcagggnctgaacgctgggagacccacttccctgtgctgacacacagagctccccatctccatgaagaccgcacagcgcgtgtaagcccagcccagctgaccctaaagcgacatgagactactagaaagaagcgacacctcttccccaagcccccacaggctactccaacccaaacaacaaccaagccagtttaatggtaggaatttgtatctctttccctttgttcagaaatacatgacatgtggtaaatatgccacatgcctttggtggaagtacaactgttgttattactctatacaagtatgagatcagggttaggaaaaaaagacaaagaggtgatcgacagacacgacagtgggaaaccccacatcgtctcatgggcaaaccgaaggaacggggatgtggggaagctcaacttttatttggactgcaaagtcccaggggttttgtttgcacatttgctcatgcacatggggtgggtggggagggaaagggggataggcagnaggacacacaggaaggaggggtacagggtggggtgaggaaaggaaagtagaagggcttaattacccccaaaggaacaagggccaactacacctggtgagccttcaggaggggacagaaaccccagggaatgattcctgtgatagggctgggagagccaagaggaccggattcgctccaagccttgggacacatcgaggacagtggtggttcttctccagcggtgaccccctgcattaggcaaggaggagcccagaggagagtggagaccttcgaggggggccgttgggagggtactgactgctttcttccagctcttcagtcccgcccttgggcaggacgaagggaatgtgggaaacaagggcgaaaggaaaggaaggatggttttggagcaatgaaatgctgctgcatggaaagtgggcatccagaccctgcccagcatggcctcagcctcttcctgttcgtggaccgagggaagaaggaataaagggccatgggcattctccgctctgttcccagcctgccctcctccccttgcacctgggcttatcccacattaatagcccatcctgaagctcagcaattgccccgaagataggctgagcagatcccatcctcaggttccactgtctatacacacaaaccatgcaaagaggaggaagagaaaggaggcaaagtagaa

SEQ ID NO: 4872 - DNA, 801 bp, Homo sapiens
  SIMILAR (497)..(601): 801254mologous to Caenorhabditis elegans contains similarity to Pfam domain: PF00097 (Zinc finger, C3HC4 type (RING finger)), Score=17.6, E-value=0.00013, N=1,accession number Z46787,Smith- Waterman Score=175.
gtggaagaactgagtaagaaactggctgactctgaccaagccagcaaggtgcagcagcagaagctgaaggtggggcagctgggggaatgggtctggcctctggacaagggagggaagctattctctaagctctggggccgtggggggttggtttataagtggttcctgctaatctataaaatcagctatgccactggcattgttggctacatggctgtcatgtttaccctctttggtcttaacttattattcaagatcaaaccagaagatgccatggactttggcatctcccttctcttctatggcctctactatggagttctggaacgggactttgcagaaatgtgtgcagactacatggcatctaccatagggttctacagcgagtcgggcatgcctaccaaacatctttcagacagtgtgtgtgctgtgtgtgggcagcagatctttgtggacgtcagtgaagaggggatcattgagaacaccggtgctcagcttccacgagttctgcatccgtggctggtgcatcgtgggaaagaagcaaacgtgtccctactgcaaagagaaggtagacctcaagaggatgttcagcaatccgtatcctttattggggtcgttgttgggagtgggctgtgggaagaaagtactggccagtgtgacctgcatttgggtcctcctggggccctcacttctgcccccaaccagaacatgtcaaaccatgaacaacaaaaagattatgaaggtgatgatgaggataaagaggatgatgacagacaccatggcatcatgaacccttactga

SEQ ID NO: 4873 - DNA, 1352 bp, Homo sapiens
  SIMILAR (97)..(738): 481254mologous to Caenorhabditis elegans contains similarity to Pfam domain: PF00097 (Zinc finger, C3HC4 type (RING finger)), Score=17.6, E-value=0.00013, N=1,accession number Z46787,Smith- Waterman Score=586.
tttcgtgggcgagccgtgaagatggcggcagtggtggaggtggaggttgtaggtggtgctgctggggaacgggagctggatgaggttgatatgtcagatctctctccagaagagcaatggagggtcgagcacgcacgcatgcatgccaagcaccgtggccatgaagctatgcatgctgaaatggtcctcatcctcatcgcaaccttggtggtggcccagctgctcctggtgcagtggaagcagaggcacccacgctcctacaatatggtgaccctctttcagatgtgggttgttcccctctatttcacagtgaagctgcactggtggaggttcctagtgatctggatcttgttctctgctgtcacagcctttgttaccttccgagccacccgaaaacctctagtacagacaaccccaaggttggtttataagtggttcctgctaatctataaaatcagctatgccactggcattgttggctacatggctgtcatgtttaccctctttggtcttaacttattattcaagatcaaaccagaagatgccatggactttggcatctcccttctcttctatggcctctactatggagttctggaacgggactttgcagaaatgtgtgcagactacatggcatctaccatagggttctacagcgagtcgggcatgcctaccaaacatctttcagacagtgtgtgtgctgtgtgtgggcagcagatctttgtggacgtcagtgaagagggggatcattgagaccacgtataggctgtcctgcaatcatgtctcccacgagttctgcatccgtggctggtgcatcgtgggaaagaagcaaacgtgtccctactgcaaagagaaggtagacctcaagaggatgttcagcaatccctgggagaggcctcacgtcatgtatgggcaactgctggactggcttcgatacttggtagcctggcagcctgtcatcattggtgtagtccaaggcatcaactacatcctgggcctggaatagtgatgaagagcatcagtgaaaaccccaccccacacgccatggacctcagggcactctcctccctgcccacaaagacctcctgggtgggaaagactcaaaggggcgcttagtccatttcaggaaccctccggctgtgtcggactggggagtgatttgatggagagccagccagtggggctgtcagcagtggggggctttttaaaagaaaactattttgatgaatatatttaaaaaacctttttttattgtggagcataggaattgcccccctccaggcttcaccctccctgcctaagcagggtgggggcagagccatgacatttttggtttaaaggagccatgtatt

SEQ ID NO: 4874 - DNA, 482 bp, Homo sapiens
  SIMILAR (44)..(382): 781254mologous to Homo sapiens dJ29M10B.1.2 (protein kinase C binding protein 1 (isoform 2)),accession number AL390212,Smith- Waterman Score=434.
  misc_feature (1)...(482): n = a,t,c or g
taatgacaactncttgaatggagcaatctccgaccggcacgaggaaacaccggngctgacccgctcttccggccaaactttcgcgggtggcgctatagccaccaccagtacgtcctccacggtcaccgtcacggccccgggccccgccgccacaggaagcccagtgaaaaagcacaggccgcttttaccgaaggagactgccccggccgtgcagcgggtcgtgtggaactcatcaagtaagttttaaacgtcctcccaaaagtggtacatgcagaannnnnnnnnnnnnnnnnnnnnnnnnnnnnngcaaaaccagcagcagcagcctcagtcttcccaggggacgagatatcacaccagacaggctgtgaaagctgtccagcagaaggagatcacacagagcccatccacgtccaccatcaccctggtgaccagcacacagtcatcgcccctggtcaccagctcggggtccatgagcaccc

SEQ ID NO: 4875 - DNA, 786 bp, Homo sapiens
  SIMILAR (1)..(393): 1001254mologous to Homo sapiens protein kinase C-binding protein RACK7,accession number U48251,Smith-Waterman Score=690.
atggcggagatgcggcagagcctggagcaggagcgggaccggctcatcgccgaggtgaagaagcagctggagttggagaagcagcaggcggtggatgagaccaagaagaagcagtggtgcgccaactgcaagaaggaggccatcttttactgctgttggaacaccagctactgtgactacccctgccagcaagcccactggcctgagcacatgaagtcctgcacccagtcagctactgctcctcagcaggaagcggatgctgaggtgaacacagaaacactaaataagtcctcccaggggagctcctcgagcacacaatcagcaccttcagaaacggccagcgcctccaaagagaaggagacgtcagctgagaaaagcaaggagagtggctcggattccatcgtccatgatggctatttctcaagttctctgctctgttttggacctccctgcatctctccctgcgtcaccatccctgggcgctcagggctgctcctctgccctctgcagggcctccgtgttagcaaaaggtgtgacaagcaacctgcctatgccccaaccaccacagaccaccagccgcaccccaactaccccgcccagaagtgtaagtatgaacctgtcttacgaaagctgccggggcttcttcctgaccattcccggagtaataaatccagttggagcagcagtgatgagaagaggggatcgacacgttccgatcacaacaccagtaccagcacgaagagcctcctcccgaaagagtctcggctggacaccttctgggactag

SEQ ID NO: 4876 - DNA, 3402 bp, Homo sapiens
  SIMILAR (2547)..(2933): 931254mologous to Escherichia coli enterobactin,accession number M60177,Smith-Waterman Score=605.
tcaccacgcgccagcaacaagcctgcacgggccacaagccaccgacgtttttccgcatcttgcacttgcaagcattaacagagaatgctcgccattaacgactgcccgggcttgcgccggattcagcggtgaagactcgacctggcggaaaaaatccgcatactcggtaagcatggcttcggtatacgcctggttatgctgcaaccgagcgctttcaatatctttcaaccaggcctgacatttacgccacgcctcacggcagttatcgaattcttccagtcggttaaccggcaacggcaacgccgacaaagcctggcggatttgttgctgcacgccagaggtttgctcacgcgtcagccatttattttccccagtgcgcgtggcaatcaaatccagttgctggcgtaaaacaccagacgcaatttcgctcatctcgccactccaccgccgccagtgagcatcaagatgatggtaaaaacgctgcgtctcgccccattcggtgccgtgcagacgcaccactttttcgtccggcagtacaaattccagctcgccccataccagaccgcgcttacagtgaatcgccagtaattgattgaaaggaataaggtattcgtggcgatcgccggagactttaatcccggcattgaggatcaccgcccgatcgtaagggtgctgagccagacgttttccaagcgttgtcgctttcagttccatgactctgtagatccacacgaaattatttcttatcagtgtaaccgtcagagaaaacgtgctccagcccaaaaaaacgttacaattgccgcccattactgaaaaccacagtaaagcgaggttttatgcgtaccgttttgacacattctgaactttgtgcttggcggatttgccaccactctgggctggctgttggcgactctggtcagtattgtgctgatttttaccttaccgctgacacgatcctgctgggagatcactaaactgtctctggtgccttatggcaatgaagctattcatgtcgatgaactgaacccggctggcaaaaatgtgctgctgaatactggcggtacggtattgaatattttctggctgattttctttggctggtggttatgcctgatgcacattgcaacgggcatcgcacaatgtatttcaatcattggcattcctgtcggcattgcgaactttaaaattgccgctattgcactatggccggttggtcgtcgcgtggtatcggtagaaacagcgcaacgtgcgcgtgaagccaatgcacgtcgtcgttttgaataatccactaatatggcctttatgctaagtcctttgctcaaacgctatacctggaacagcgcctggctgtattacgcgcgtatttttattgggctttttggaacccacagggtttcgcgggggggtgggggggggaaaaacggactattccccttaaccctggggatggtggaaacggcgctcaccgatctcgatgaccgactggcgggacgtttgcgtaacctcatcattacgctgttctgcttttttatcgcctcggcctcagtagaattgctgtttccctggccctggctatttgcgattggcttaacgctctctaccagcggcttcattttgctcggcggtctgggtcaacgctatgcaacaattggccttcggtgccattgttgaacgccatttacactatgttgggaacatcactgtatgagcactggtatcagcagccgatgtatctgctggccggtgccgtctggtacaacgaaatgaatcgataccgctcttggtgcagcctcttattcggttatgactgggttgggattccgctggtttacacccaggttgtcactcttgctgtctataccttcttctttgcgtgcctgattggacgccagtttttggatcccaccaaaggctacgcagggcatgacttggatctttacattcccatcttcaccctcctacaattcttcttctatgcaggatggcttaagggcagtgcgccgctgcaactttcacaaccgcatcacacggcttatatcatctttacctctggctccaccggcaggccgaaaggggtaatggtcgggcagacggctatcgtcaaccgcctgctttggatgcaaaatcattatccgcttacaggcgaagatgtcgttgcccaaaaaacgccgtgcagttttgatgtctcgcaattctttgccgaatatggcgtaacgaccacgcactttgtgccgtcgatgctggcggcatttgttgcctcgctgacgccgcaaaccgctcgccagagttgcgcgacgttgaaacaggttttctgtagtggtgaggccttaccggctgatttatgccgcgtatggcaacagttaactggcgcaccgttgcataatctatatggcccgacggaagcggcggtagatgtcagctggtatccggcttttggcgaggaactggcacaggtgcgcgggcagcagtgtgccgattggttatccgggctatctcggacgccccgatctgacacgccagccgctttattgccgatccttttgccaccaggtgaacggatgtaccgtaccggagacgttgcccgctggctggataacggcgcggtggagtacctcgggcgcagtgatgatcagctaaaaattcgcgggcagcgtatcgaactgggcgaaatcgatcgcgtgatgcaggcgctgccggatgtcgaacaagccgttacccacgcctgtgtgattaaccaggcggctgccaccggtggtgatgcgcgtcaattggtgggctatctggtgtcgcaatcgggcctgccgttggataccagcgcattgcaggcgcagcttcgtgaaacattgccaccacatatggtaccggtggttctgctgcaacttccacagttaccacttagcgccaaggcggggtgccccgctgcccaagtgccccgggtggcccaggtccgcgtgtgcgcggttctggaggatctgggtgacatcagagaatcagagggagaaaggaaacaggaggcagacgctgtgctgggcactcaggacacaccccgagtgacctcacagcccaatggcctcctgttgaagatagagccccaggagaatgtgaagattgaggggcagcaccagggcctggtgtggctgtgtgtggccgcgtcgccggtcctcgtccgcgtgacaagggagaaagaagagaaaaagaaagaagagggcaataacatgaggtttacctcgttggtattgtctgttttggtaaatattgtgcgtgcacttgaaaagaaggtgttggatataatgttcaacaattgtcgtaccggggtccaggccattacgttatctcatcggcgtgctctagcaattgcaattgcattggctcgctatattaaatcggcgctatacgatggca

SEQ ID NO: 4877 - DNA, 1629 bp, Homo sapiens
  SIMILAR (1)..(1029): 981254mologous to Homo sapiens dJ29M10B.1.2 (protein kinase C binding protein 1 (isoform 2)),accession number AL390212,Smith- Waterman Score=1735.
atggatttgaaggagctgagcgagtcggtccagcaacagtccacccctgttcctctcatctctcccaagcgccagattcgtagcaggttccagctgaatcttgacaagaccatagagagttgcaaagcacaattaggcataaatgaaatctcggaagatgtctatacggccgtagagcacagcgattcggaggattctgagaagtcagatagtagcgatagtgagtatatcagtgatgatgagcagaagtctaagaacgagccagaagacacagaggacaaagaaggttgtcagatggacaaagagccatctgctgttaaaaaaaagcccaagcctacaaacccagtggagattaaagaggagctgaaaagcacgtcaccagccagcgagaaggcagaccctggagcagtcaaggacaaggccagccctgagcctgagaaggacttttccgaaaaggcaaaaccttcacctcaccccataaaggataaactgaagggaaaagatgagacggattccccaacagtccatttgggcctggactctgattcagagagcgaacttgtcatagatttaggagaagaccattctgggcgggagggtcgaaaaaataagaaggaacccaaagaaccatctcccaaacaggatggtaaaactccaccatccacgacggtgggcagccattctcccccggaaacaccggtgctcacccgctcttccgcccaaacttccgcggctggcgccacagccaccaccagcacgtcctccacggtcaccgtcacggccccggcccccgccgccacaggaagcccagtgaaaaagcagaggccgcttttaccgaaggagactgccccggccgtgcagcgggtcgtgtggaactcatcaagtaagtttcaaacgtcctcccaaaagtggcacatgcagaagatgcagcgtcagcagcagcagcagcagcagcaaaaccagcagcagcagcctcagtcttcccaggggacgagatatcagaccagacaggctgtgaaagctgtccagcagaaggagatcacacagagcccatccacgtccaccatcaccctggtgaccagcacacagtcatcgcccctggtcaccagctcggggtccatgagcacccttgtgtcctcagtcaacgctgacctgcccatcgccactgcctcagctgatgtcgccgctgatattgccaagtacactagcaaaatgcctttcttccgagtgtaccttctaaaacacttggaatcgtggggatctgtggtgatccctgggctggaagccacggccatgcacctggctagttctgtgatgcaggaacagctgggttggggaaggagaccggcatgccgctggctgtgggctcctcactggctgacgccttgggtgctctcccctcagctatgggaatggagggagggggccctagaagtttttggggccaatgtgtatattgcagacactattagccacctactcaaaccctgcccttatgggccagtggttggttccaggcactgtggcaaccaggaagactcccagatgtctcctgaggagggcgcagtaccacccctagttaaaaacctctgttctagagaactccagaattctctagactacggctga

SEQ ID NO: 4878 - DNA, 849 bp, Homo sapiens
  SIMILAR (161)..(532): 471254mologous to Mus musculus putative,accession number AK014397,Smith-Waterman Score=221.
tgcggttggaacacaggctactgtgactaccctgccagcaagcccactggcctgagcacataaagtcctgcacccagtcaagctactgctcttcagcagggagcggatgttgaggtgaacacagaaccactaaataagtcctcccaggggagctcctcgagcacacaatcagcaccttcagaaacggcccagcgcctccaaagagaaggagacgtcagctgagaaaagcaaggagagtggctcgacccttgacctttctggctccagagagacgccctcctccattctcttaggctccaaccaaggctctgttagcaaaaggtgtgacaaagcaaccttgctatgccccaaccaccacagaccaccagccgcaccccaactaccccgcccagaagtaccatttccggagttataaaattccaggttgagcccgcccgtttttaaaaagaaggggatccgacgggttccgatccccaacaccagtaccagcacgaagagcctcctcccgaaagagtctcggctggacaccttcttgggactaacaggggatccgggacccaaacaacccaccccattgggagaaaaacccagacgccagggaaaagaagaaacaacaaaggcaggagaacagccactttcagacttgaaaatgacaaaaccctcagttgagcctgagcccccggcgcgggggctgctacactacaggacacccagcatcggctttgactgcagactgttcacccacacgagccctgtgcttttggtgtaaataatgtacaatttgtggatgtcattgaatctagaggactttcccctttttatatttgtattaactttaacttattaaaa

SEQ ID NO: 4879 - DNA, 3629 bp, Homo sapiens
  SIMILAR (2867)..(2890): 1001254mologous to Homo sapiens CTCL tumor antigen se14- 3,accession number AF273045,Smith-Waterman Score=40.
acatttgttggcttggctgaagaggaaataaaaacagaacaggaggtggtagagggcatggatatctctactcgctccaaagatcctggctctgcagagagaacagcccagaaaagaaagttccccagccctccacattcttccaatggccactcgccgcaggacacatcaacaagccccattaaaaagaaaaagaaacctggcttactgaacagtaacaataaggagcagtcagaactaagacatggtccgttttactatatgaagcagccactcaccacagaccctgttgatgttgtaccgcaggatggacggaatgatttctactgctgggtttgtcaccgggaaggccaagtcctttgctgtgagctctgtccccgggtttatcacgctaagtgtctgagactgacatcggaaccagagggggactggttttgtcctgaatgtgagaaaattacagtagcagaatgcatcgagacccagagtaaagccatgacaatgctcaccattgaacagttatcctacctgctcaagtttgccattcagaaaatgaaacagccagggacagatgcattccagaagcccgttccattggaacagcaccctgactatgcggaatacatcttccatccaatggacctttgtacattggaaaagaatgcgaaaaagaaaatgtatggctgcacagaagccttcctggctgatgcaaagtggattttgcacaactgcatcatttataatgggggaaatcacaaattgacgcaaatagcgaaagtagtcatcaaaatctgtgaacatgagatgaatgaaatcgaagtatgtccagaatgttatctagctgcttgccaaaaacgagataactggttttgtgagccttgtagcaatccacatcctttggtctgggccaaactgaaggggtttccattctggcctgcaaaagctctaagggataaagacgggcaggtcgatgcccgattctttggacaacatgacagggcctgggttccaataaataattgctacctcatgtctaaagaaattcctttttctgtgaaaaagactaagagcatcttcaacagtgccatgcaagagatggaggtttacgtggagaacatccgcaggaagtttggggtttttaattactctccatttaggacaccctacacacccaacagccagtatcaaatgctgctcgatcccaccaaccccagcgccggcactgccaagatagacaagcaggagaaggtcaagctcaactttgacatgacggcatcccccaagatcctgatgagcaagcctgtgctgagtgggggcacaggccgccggatttccttgtcggatatgccgcgctcccccatgagcacaaactcttctgtgcacacgggctccgacgtggagcaggatgctgagaagaaggccacgtcgagccacttcagtgcgagcgaggagtccatggacttcctggataagagcacagcttcaccagcctccaccaagacgggacaagcagggagtttatccggcagcccaaagcccttctctcctcaactgtcagctcctatcacgacgaaaacggacaaaacctccaccaccggcagcatcctgaatcttaacctggatcgaagcaaagctgagatggatttgaaggagctgagcgagtcggtccagcaacagtccacccctgttcctctcatctctcccaagcgccagattcgtagcaggttccagctgaatcttgacaagaccataggagagttccaaagcacaattaggcataaatggaaatctcggaagatgtctatacggccgtagggcacagcgattcggaggattctgagaagtcagatagtagcgatagtgagtttatcagtgatgatgagcagaagtctaaggacgagccagaagacacagaggacaaagaaggttgtcagatggacaaagagccatctgctgttaaaaaaaagcccaagcctacaaacccagtggagattaaagaggagctgaaaagcacgtcaccagccagcgagaaggcagaccctggagcagtcaaggacaaggccagccctgagcctgagaaggacttttccggaaaggcaaaaccttcacctcaccccattaaggataaactgaagggaaaagatgagacggattcccccacagttcatttgggcctggactctgattcagaggaacgaacttgtcatagatttaggagaagaccattctgggcgggagggtcgaaaaaataagaaggaacccaaagaaccatctcccaaacaggatgttgtaggtaaaactccaccatccacgacggtgggcagccattctcccccggaaacaccggtgctcacccgctcttccgcccaaacttccgcggctggcgccacagccaccaccagcacgtcctccacggtcaccgtcacggccccggcccccgccgccacaggaagcccagtgaaaaagcagaggaagcttaattccgaaggaggactgccccggcccgtgcagcgggtccgtgtggaactcatcaagtaaagtttcaaacgtcctcccaaaagtggcacatgcagaagatgcagcgtcagcagcagcagcagcagcagcaaaaccagcagcagcagccatcagtcttcccaggggacgagatatcagaccagacaggctgtgaaagctgtccaacagaaggagatcacacagagcccatccacgtccaccatcaccctggtgaccagcacacagtcatcgcccctggtcaccagctcggggtccatgagcacccttgtgtcctcagtcaacgctgacctgcccatcgccactgcctcagctgatgtcgccgctgatattgccaagtacactagcaaattggatggatgcaataaaaggtacaatggacagaaatatacaacgatctttctaaaaacactactggaagcacaatagctgagattcgcaggctgaggatcgagatagagaagctccagtggctgcaccagcaagagctctccgaaatgaaacacaacttagagctgaccatggcggagatgcggcagagctgggagcaggagcgggaccggctcatcgccgaggtgaagaagcagctggagttggagaagcagcaggcggtggatgagaccaagaagaagcagtggtgcgccaactgcaagaaggaggccatcttttactgctgttggaacaccagctactgtgactacccctgccagcaagcccactggcctgagcacatgaagtcctgcacccagtcagctactgctcctcagcaggaagcggatgctgaggtgaacacagaaacactaaataagtcctcccaggggagctcctcgagcacacaatcagcaccttcagaaacggccagcgcctccaaagagaaggagacgtcagctgagaaaagcaaggagagtggctcgacccttgacctttctggctccagagagacgccctcctccattctcttaggctccaaccaaggctctgaccattcccggagtaataaatccagttggagcagcagtgatgagaagaggggatcgacacgttccgatcacaacaccagtaccagcacgaagagcctcctcccgaaagagtctcggctggacaccttctgggactag

SEQ ID NO: 4880 - DNA, 2175 bp, Homo sapiens
  SIMILAR (2)..(688): 1001254mologous to Homo sapiens protein kinase C-binding protein RACK7,accession number U48251,Smith-Waterman Score=1177.
gcgttcggaggattctgagaagtcagatagtagcgatagtgagtatatcagtgatgatgagcagaagtctaagaacgagccagaagacacagaggacaaagaaggttgtcagatggacaaagagccatctgctgttaaaaaaaagcccaagcctacaaacccagtggagattaaagaggagctgaaaagcacgtcaccagccagcgagaaggcagaccctggagcagtcaaggacaaggccagccctgagcctgagaaggacttttccgaaaaggcaaaaccttcacctcaccccataaaggataaactgaagggaaaagatgagacggattccccaacagtccatttgggcctggactctgattcagagagcgaacttgtcatagatttaggagaagaccattctgggcgggagggtcgaaaaaataagaaggaacccaaagaaccatctcccaaacaggatgttgtaggtaaaacaccaccatccacgacggtgggcagccattctcccccggaaacaccggtgctcacccgctcttccgcccaaacttccgcggctggcgccacagccaccaccagcacgtcctccacggtcaccgtcacggccccggcccccgccgccacaggaagcccagtgaaaaagcagaggccgcttttaccgaaggagactgccccggccgtgcagcgggtcgtgtggaacttcatcaactgtccagcagaaggagatcacacagagcccatccacgtccaccatcaccctggtgaccagcacacagtcatcgcccctggtcaccagctcggggtccatgagcacccttgtgtcctcagtcaacgctgacctgcccatcgccactgcctcagctgatgtcgccgctgatattgccaagtacactagcaaaatgatggatgcaataaaaggaacaatgacagaaatatacaacgatctttctaaaaaccactacttggaaagcacaattagctgaagattcgcaaggcttgaggatcgagatagaaaagctccagtggctgcaccagcaagagcttctccgaaatgaaacacaacttagagctgaccatggcggagatgcggcagagcctggagcaggagcgggaccggctcatcgccgaggtgaagaagcagctggagttggagaagcagcaggcggtggatgagaccaagaagaagcagtggtgcgccaacttcaagaaggaggccatcttttactgctgttggaacaccagctactgtgactacccctgccaagcaagcccactggcctgagcacattgaagtcctgcacccagtcagcttactgctcctcaagcaggaaagcggatgctgaaggtgaacacagaaacacttaaattaagtccttcccaggggagctccttcgagcacacaatcagcacctttcagaaaacggccagcgccttccaaagagaagggagacgttcagcttgagaaaagccaaggagagtggctcgacccttgacctttctggctccagagagacgccctcctccattctcttaggctccaaccaaggctctgaccattcccgggagtaataaatccagttggagcagcagtgatgagaagaggggatcgaacacgttccgatcacaaccacccagtacccagcacggaaggagcctccttcccggaaaggagtctcgggctgggacaccctttctggggactagcaagtgaatccgggccacaaacccaccccaccccattgtggagaaaaaacccagacggccaggaaaagaagaaacaacaaaggcaaggagaacagcccacttttcagactttgaaaatgaccaaaaccctcagttgagcctaaagcccccggcgcgggggctgctacactacagggacacccagcatcggctttgactgcagactgttcacccacacgagccctgtgcttttggtgtaaataatgtacaatttgtggatgtcattgaatctagaggactttcccctttttatatttgtattaactaaaaacttattaaaaaaaaaaaaagaaaaagaaaaacgcatttaaaaaaaaaaaaaaaaagcaaccaaccccaacaacaaaaaagaatgttttggtattggagaagggatggtcagttagcctgtctgtcacacgacggaatggatactgggcccggggaccattt

SEQ ID NO: 4881 - DNA, 600 bp, Homo sapiens; identical to SEQ ID NO: 552
  SIMILAR (1)..(225): 631254mologous to Mus musculus gamma actin-like protein,accession number AF195094,Smith-Waterman Score=228.
  misc_feature (1)...(600): n = a,t,c or g

SEQ ID NO: 4882 - DNA, 1981 bp, Homo sapiens
  SIMILAR (1173)..(1199): 771254mologous to Trichosurus vulpecula gamma-actin,accession number AF076191,Smith-Waterman Score=43.
tctcagtcgccgctgccagctctcgcactctgttcttccgccgctccgccgtcgcgtttctctgccggtcgcaatggaagaagagatcgccgcgctggtcattgacaatggctccggcatgtgcaaagctggttttgctggggacgacgctccccgagccgtgtttccttccatcgtcgggcgccccagacaccagggcgtcatggtgggcatgggccagaaggactcctacgtgggcgacgaggcccagagcaagcgtggcatcctgaccctgaagtaccccattgagcatggcatcgtcaccaactgggacgacatggagaagatctggcaccacaccttctacaacgagctgcgcgtggccccggaggagcacccagtgctgctgaccgaggcccccctgaaccccaaggccaacagagagaagatgactcagattatgtttgagaccttcaacaccccggccatgtacgtggccatccaggccgtgctgtccctctacgcctctgggcgcaccactggcattgtcatggactctggagacggggtcacccacacggtgcccatctacgagggctacgccctcccccacgccatcctgcgtctggacctggctggccgggacctgaccgactacctcatgaagatcctcactgagcgaggctacagcttcaccaccacggccgagcgggaaatcgtgcgcgacatcaaggagaagctgtgctacgtcgccctggacttcgagcaggagatggccaccgccgcatcctcctcttctctggagaagagctacgagctgcccgatggccaggtcatcaccattggcaatgagcggttccggtgtccggaggcgctgttccagccttccttcctgggtatggaatcttgcggcatccacgagaccaccttcaactccatcatgaagtgtgacgtggacatccgcaaagacctgtacgccaacacggtgctgtcgggcggcaccaccatgtacccgggcattgccgacaggatgcagaaggagatcaccgccctggcgcccagcaccatgaagatcaagatcatcgcacccccagagcgcaagtactcggtgtggatcggtggctccatcctggcctcactgtccaccttccagcagatgtggattagcaagcaggagtacgacgagtcgggcccctccattcgtccaccgcaaatgcttctaaacggactcagcagatgcgtagcatttgctgcatgggttaattgagaatagaaatttgcccctggcaaatgcacacacctcatgctagcctcacgaaactggaataagccttcgaaaagaaattgtccttgaagcttgtatctgatatcagcactggattgtagaacttgttgctgattttgaccttgtattgaagttaactgttccccttggtatttgtttaataccctgtacatatctttgagttcaaacctttagtacgtgtggcttggtccccttcgtggctaaaggtaagaacgtgcttgtggaaagacaagtctgtggcttggtgagtctgtgtggcccagcagcctctgatctgtgcagggtattaacgtgtccagggctgagtgttctgggatttctctaaaggcctgccaagaaccagttgtttttgtcttgcgggtctgtcagggttggaaagtccaaagcgtaggaacccagtttcctttctttgcttgatgtctttggccagaacaccgtgggctgttaacttgccttgagttggaagcggtttgcatttacgcctgtaaatgtattcattcttaatttatgtaaggttttttttgtacgcaattctcgattctttgaagaagatgacaacaaacttttggttttctacatgttatgtgagaacattagcgccccacgcaacactgtcattgtgtaaggaaaaataaaagtgctgccgtaacccaaaaaaaaaaaaaagggcggccggtttaaaagattccataaagg

SEQ ID NO: 4883 - DNA, 1013 bp, Homo sapiens
  SIMILAR (34)..(366): 421254mologous to Tupaia belangeri beta-actin,accession number AF110103,Smith-Waterman Score=160.
  misc_feature (1)...(1013): n = a,t,c or g
ggtcccggtttccggaaggcctcttccaacctttctttccgggttatgaaatcttgcggcatccacgagaccacctttcactcccattcataaagtttgacgtggcaatccgccaaagacctttacgccaacacgttgcttccgggcggcaaccaccaggtatcgggggcattgttgacagggatgcagaaagaaatccacgcccctgccgcccaggcaacattgagattcaagatcattgcacccccaggaagcgcaagtactcggtgggtggatcggttggctccatcctggcctcactgtccaccttccaggcagatgtgggattagcaagcaagaagtacgacgagtcggggcccctccattcgtccaccgcaaaatgctttctaaacggactcagccagattgcgtagccatttgctgcatgggttaattgagaatagaaatttgcccctgggcaaatgcacacacctcatggctagccctcacgaaactggaaataagcccttcgaaaaggaaattgtccttggaagcttgtatccgaaaatcaagcaactggattgtaagaaacttgttgcctgaaatttgacccttgtattgaaagttaaactgttcccccttggtaantaaacgtgtccagggctgagtgttcctgggatttcctctagaggctggcaagaaaccagttgtttttgtcttgcgggtctgtcagggttggaaagtccaagccggtaggacccagttttcctttcttagctgatgtctttggccagaacaccgtgggctgttaacttgccttgagttggaagcggtttgcatttacgcctgtaaatgtattcattcttaaatttatgtaaggttttttttgtacgcaattctcgattctttaaagagatgacaacaaatctttggttttctcctagttatgtgagacacattagggccccagcgggctcgtctttgtgtaaggaaaaataaaagtgctgccgtaaccaaaaaaaaaaaaaaaaaaa

SEQ ID NO: 4884 - DNA, 2299 bp, Homo sapiens
  SIMILAR (352)..(756): 531254mologous to Homo sapiens Human Trk oncogene A coding sequence,accession number AAA09303,Smith-Waterman Score=242.
atgggcagagactggaacagtttggagagcttagaagaagacaggaagatgagagaaagtttggaacatgctagagacttgttaaattgttgtgaccaaaatgctgatcatcatatggacagtgaagtccaggctgaggtggtctcagaaggagatgaagaacttattgggaaatggagtaaagcatactgccataggtgtgagcaaaaagatgatctgaaatgggaacttatatttaaaagggaagcagagcataaaagtttggaaattttgcagcctgaccatgtggtagaaaagaaaaacccgggaggaggcaggaaccagagcacgagcagtagctgggtgggcactgtggctgagatcaccaccatcgaggcagtgaagtgcaagatccaggttctgcagcagcaggcagatgatgcagaggagcgagcttgagcgctcccagcgagagtttagggaagaaaggcgggcccgggaaccaggctgaggctgaggtggcctccttgaaccgtaggatccagcgtggttgaagaagagctggaccgtgctcaggagcgcctggccactgccctgcaaaagctggaagaagctgaaaaaagcttgctgatgagagtgagagaaggtattgaaggttatttgaaaacccgggccttaaaaagattgaaggaaaagattggaacttccagggaaatccaactcaaaagaagctaagcacattgcagaagaaggcagattaggaagtatgaagaggtgggctcgtaagtttggtgatcattgaaggagacttggaacgcacagagggaacgagctggagctggcagagtcccgttgccgagagatggatgagcagattagactgatggaccagaacctgaagtgtctgagtgctgctgaagaaaagtactctcaaaaagaagataaatatgaggaagaaatcaagattcttactgataaactcaaggaggcagagacccgtgctgagtttgctgagagatcggtagccaagctggaaaagacaattgatgacctggaagacactaacagcacatctggagacccggtggagaagaaggacgaaacaccttttggggtctcggtggctgtgggcctggccgtctttgcctgcctcttcctttctacgctgctccttgtgctcaacaaatgtggacggagaaacaagtttgggatcaaccgcccggctgtgctggctccagaggatgggctggccatgtccctgcatttcatgacattgggtggcagctccctgtcccccaccgagggcaaaggctctgggctccaaggccacatcatcgagaacccacaatacttcagtgatgcctgtgttcaccacatcaagcgccgggacatcgtgctcaagtgggagctgggggagggcgcctttgggaaggtcttccttgctgagtgccacaacctcctgcctgagcaggacaagatgctggtggctgtcaaggcactgaaggaggcgtccgagagtgctcggcaggacttccaacgtgaggctgagctgctcaccatgctgcagcaccagcacatcgtgcgcttcttcggcgtctgcaccgagggccgccccctgctcatggtcttcgagtatatgcggcacggggacctcaaccgcttcctccgatcccatggacccgatgccaagctgctggctggtggggaggatgtggctccaggccccctgggtctggggcagctgctggccgtggctagccaggtcgctgcggggatggtgtacctggcgggtctgcattttgtgcaccgggacctggccacacgcaactgtctagtgggccagggactggtggtcaagattggtgattttggcatgagcagggatatctacagcaccgactattaccgtgtgggaggccgcaccatgctgcccattcgctggatgccgcccgagagcatcctgtaccgtaagttcaccaccgagagcgacgtgtggagcttcggcgtggtgctctgggagatcttcacctacggcaagcagccctggtaccagctctccaacacggaggcaatcgactgcatcacgcagggacgtgagttggagcggccacgtgcctgcccaccagaggtctacgccatcatgcggggctgctggcagcgggagcccagcaacgccacagcatcaaggatgtgcacgcccggctgcaagccctggcctaggcacctcctgtctacctggatgtcctgggctagggggccggcccaggggctgggagtggttagccggaatactggggcctgccctcagcatcccccatag

SEQ ID NO: 4885 - DNA, 2158 bp, Homo sapiens
  SIMILAR (6)..(317): 941254mologous to Rattus norvegicus tropomyosin,accession number L24775,Smith-Waterman Score=457.
ggtgggcctggaaccaggctgaggctgaagtggcctccgtgaacggtaggatccagctggttgaagaggagctggactgtgctcaggagcgcctggccactgccctgcaaaagctggaagaagcgggaaaagctgctgatgagagtgagagaggtatgaaggttattgaaaaccgggccttaaaagatgaagaaaagatggaactccaggaaatccaactcaaagaagctaagcacattgcagaagaggcagataggaagtatgaagaggtggctcgtaagttggtgatcattgaaggagacttggaacgcacagaaggaacgagctgagctggcagagtcccgttgccgagagatggatgagcagattagactgatggaccagaacctgaagtgtctgagtgctgctgaagaaaagtactctcaaaaagaagataaatatgagaaagaaatcaagattccttactaataaactcagggaggcagagaccccgtgctgagtttgctgagagatcggtagccaagctggaaaagacaattgatgacctggaagataaactgaaatgcaccaaagaggagcacctctgtacacaaaggatgctggaccagaccctgcttgacctgaatgagatgtagaacgccccagtcccaccctgctgctgctcctccctctgacccagactccgcctgaggccagcctgcgggaagctgacctttaactgagggctgatctttaactgggaaggctgctttctccctttcaccaccccctcctttccctgtgtcttttttcgcccaaactgtctcttgccttcttcccgggagaaatccagctgggctagaggctggagcacctttgggaaacaacattttaaggggaatgtgagcacaatggcattaatgtttttaaaaaggcatgttgttgatgtacacattttgtaattacctttttttgttggttttgtagcaaccatttgtaaaacattcccaaataattccacagtcctgaagcagcaatcgaaatcccctttcctcacttttgggaagggtgacttttcacccttaaatgcatattcccccctctcccatagaggagaggaaaaggtgtagggcctgccttacccgagagccaaacagagcccccagggagactcagctgtgggaaacctcattgttctgtacaaagtactagctaaacccagaaaggtgattcccaggaggagttagccaaacaacaacaaagacaaaatatgtgctgttcaagttttcagctttaagaaatctttggataatgttatttctatttttttatttttttcattagaagttaccaaattaagatgggtaagacctctggagaccaaaattttgtcccatctctaccccctcacaactggcttacagaatggatcatggtcccccttatggttgaggtgaccacttaaatggctttcctggcctccttgaaaagaaaagaaaagaaagaagactgtggtttttggccactggatttaagccatgtgaaactccatctccatcaccccttttctggggtttgaaagctgctgtctctaagaagtggccatctcaaattggtgctttggtatcagtcagtgctgggagaaaatcttgaataggcttatggtacaaaactttttaaaattttatattattttggaaactttgcttctttgggtttgtgggcaccctggccaccccaatctggcttgtgacagcctctgcaggtccgtgggcctggcagtttactgattttttaaagtttccttccctaacccagcccccattttctggtaaggtttctaggaggtctgttaggtgtacatcctgcagcttattggcttaaaatgtactctccttttatgtggtctctttggggccgattgggagaaagagaaatcaatagtgcaactggttttgatactgaatattgacaagtgtctttttgaaataaagaaccagtccctcccaaaaagaaaaaaagagaaaaaaaaaagtttgcccaaagtgggcggatacaattgtgaccggcggaaattagtatataatcgacgggaatcggaccggcctgaagggccagtttcctaaggggccgataaagctgggaacagggaagcgttcggaggaatgtaccgcgcatt

SEQ ID NO: 4886 - DNA, 721 bp, Homo sapiens
  SIMILAR (2)..(238): 661254mologous to Canis familiaris beta-actin,accession number AF021873,Smith-Waterman Score=262.
  misc_feature (1)...(721): n = a,t,c or g
cagtgctgttctggcggcacacatggtaaccctgccattggcgacaggaatgcagaagnagatcctgccctgggcaccagcacaaatgaagatcagattcatggctcctcctgagcgcaagtactcggtgtggatcgcggctcccatcctggcctcgctgtccacctccagcaggatgtggatcagcaagcaggagtatgacgagtccggcccctccatcgtccaccgcaaatgcttctaggcggactatgacttagatttaaaaactggaacggtgaaggtgacagcagtcggttggagcgagcatcccccaaagttcacaatgtggccgaggactttgattgcacattgttgttttttttaatagtcattccaaatatgagatgcattgttacaggaagtcccttgccatcctaaaagccaccccacttctctctaaggagaatggcccagtcctctcccaagtccacacaggggaggtgatagcattgctttcgtgtaattaatgtaatgcaaaatttttttaatcttcgccttaatacttttttattttgttttattttgaatgacgagccttcgtgcccccccttcccccttttttgtcccccaacttgagatgtatgaaggcttttggtctccctgggagtgggtggaggcagccagggcttacctgtacactgacttgagaccagttgaataaaagtgcacaccttaaaaaaaa

SEQ ID NO: 4887 - DNA, 470 bp, Homo sapiens
  SIMILAR (139)..(453): 881254mologous to Homo sapiens MDS024,accession number AF182423,Smith-Waterman Score=464.
  misc_feature (1)...(470): n = a,t,c or g
ggcgctgtcgtgtacccttaacaggtatctgctcctcatggcgcaggagcatctggagttccgcctgccggtgagtccgtagcgccctccggaacttccgacggaagaggacgctggagtggagtggagtgggtggaggaaataaagtctttgcttttgctttttggaggtcagtttgccagcagtcaagaaacttatggaaagtcaccattttggattcttagcattccctctgaagatattgcaagaaatttgatgaaacggacagtgtgtgccaagtctatatttgaactatggggtcatggacaatctcctgaggagctgtacagttctcttaaaaactaccctgtggagaagatggttccatttctacattcggactctacatataaaataaagatttcacacttttaataagacattgacacaagnagggaaaattcaaggcgaattagatggcacttgaattt

SEQ ID NO: 4888 - DNA, 1857 bp, Homo sapiens
  SIMILAR (835)..(1101): 541254mologous to Gallus gallus beta-actin,accession number X00182,Smith-Waterman Score=213.
ttgccgatccgccgcccgtccacacccgccgccagctcaccatggatgatgatatcgccgcgctcgtcgtcgacaacggctccggcatgtgcaaggccggcttcgcgggcgacgatgccccccgggccgtcttcccctccatcgtggggcgccccaggcaccagggcgtgatggtgggcatgggtcagaaggattcctatgtgggcgacgaggcccagagcaagagaggcatcctcaccctgaagtaccccatcgagcacggcatcgtcaccaactgggacgacatggagaaaatctggcaccacaccttctacaatgagctgcgtgtggctcccgaggagcaccccgtgctgctgaccgaggcccccctgaaccccaaggccaaccgcgagaagatgacccagatcatgtttgagaccttcaacaccccagccatgtacgttgctatccaggctgtgctatccctgtacgcctctggccgtaccactggcatcgtgatggactccggtgacggggtcacccacactgtgcccatctacgaggggtatgccctcccccatgccatcctgcgtctggacctggctggccgggacctgactgactacctcatgaagatcctcaccgagcgcggctacagcttcaccaccacggccgagcgggaaatcgtgcgtgacattaaggagaagctgtgctacgtcgccctggacttcgagcaagagatggccacggctgcttccagctcctccctggagaagagctacgagctgcctgacggccaggtcatcaccattggcaatgagcggttccgctgccctgaggcactcttccagccttccttcctgggcactggagtcctgtggcatccacgaaactaccttcaactccatcatgaagtgtgacgtggacatccgcaaagacctgtacgccaacacagtgctttccggcggcacccaccaattccccttgccttgccgaccaggatgctgaaagaaaatcactgccctggaacccgtccacaatgaagattcagaatcattgcttcctcctgaggcgcaaagtactccgttatggaatcgcggggctccaatcctgggcctcgctggtccaccttccagccaagatgtgggatcagaaaagcagggagtatgacgagtccgggcccctcccattcgtccaccgcaaaatgctttctagggcggactatgacttagttgcggttacacccctttcttgacaaaaacctaaacttgcgccagaaaaccaagatgagaattggcatggcctttatttgttttttttgttttggtttggttttttttttttttttttggcttgactcaggattttaaaaactgggaacggtgaaaggtgaacagccagtcgggttggaagcgagccatccccccaaagtttcacaatgtggccgagggactttgaattgcacattgttgttttttttaatagtcatttccaaaatatgagatgcgttgttacaggaagtcccttgccatcctaaaagcccaccccacttcttctctaaggagaatggcccagttcttctcccaaagtccacacaagggggggggaacaacatttgctttggtgtaaattatgtaatgcaaaattttttttaatctttcgccttaatacttttttattttgttttattgtgaatgatgagccttcgtgccccccccttcccccttttttgtccccccaacttgagatgtatgaaggcttttggttctccctggggagtgggtgggagggcagccaggggcttaccttgtacacttgacttgagaccagttgcatgctaagtgcacaaccttaaaaatgaaaaaaaaaaaaaaaaaa

SEQ ID NO: 4889 - DNA, 324 bp, Homo sapiens
cgggtatggaagagagaaaatatagtattcgtaaaagatgtaagtgaaagaatttagcctggccttttaacataaactaggggtttccagtatcttggaatgggaggactccgtttgaatatctaatcttgatatgcactgtgctcatatctggttgtgcctcattatagttgagaagtctgtttctactgctccagtggttattagccattgttgtcaggcacatcctaacaggtccgcaaaagcaggacaattcacgtagcacagaatctaaaaggtccaaggttcggttccaggtatctctcccgagctctccaagccgcc

SEQ ID NO: 4890 - DNA, 383 bp, Homo sapiens
  SIMILAR (3)..(383): 1001254mologous to Homo sapiens DNA helicase Q1,accession number D37984,Smith-Waterman Score=656.
acaaaatgtgcgataactgctgtaaagacagtgcatttgaaagaaagaacataacagagtactgcagagatctaatcaagatcctgaagcaggcagaggaactgaatgaaaaactcactccattgaaactgattgattcttggatgggaaagggtgcagcaaaactgagagtagcaggtgttgtggctcccacacttcctcgtgaagatctggagaagattattgcacactttctaatacagcagtatcttaaagaagactacagttttacagcttatgctaccatttcgtatttgaaaataggacctaaagctaatcttctgaacaatgaggcacatgctattactatgcaagtgacaaagtccacgcagaactctttcagg

SEQ ID NO: 4891 - DNA, 758 bp, Homo sapiens
  SIMILAR (140)..(244): 771254mologous to Homo sapiens Human nucleic acid-binding protein, NuABP-5,accession number AAB21001,Smith-Waterman Score= 134.
tttttttttttttatttctgcattaaaggctttatttgcattcttgcaaattttattatttcaagtcaatgtgttaagaattactgcgcatatagttatttcttttataaatttgctttccgtgactccttcaaaagctttcttattgttggcctttattttctgcagagaagactacagttttacagcttatgccaccatttcgtatttgaaaataggacctaaagctaatcttctgaacaatgcaggcatatgttatcacctatgcaagtgacaaagtccacgcagaactctttcagggtaaatggctattaattttcagttttatatattttaaaaagtatattaaagcctatgggatgcttttctgtcatattcccctaggtccagttgaacatgagaaaagtcagttttctgattagatttctgggtatggaagagagaaaatatagttttctgtaaagatgtaagtgacagaatttagactggccttttcacataaactaggggtttccagtttcttggaatgggaggactccgtttgaatatctaattttgttatgcactctgctcttatttggttgtgattactaatagttgagaagtctgtttctgctgttccagtggttagaaaccactgttttaaaccaaatactatcaagtctgcaaaagcatgtcaagtcaagtgccattgtgtctaaggacatttgaggtctttagaacttctctcacaacgtagccccttttattcaaaatag

SEQ ID NO: 4892 - DNA, 1035 bp, Homo sapiens
  SIMILAR (48)..(170): 821254mologous to Homo sapiens Synthetic Construct,accession number AX047114,Smith-Waterman Score=171.
  misc_feature (1)...(1035): n = a,t,c or g
atgaggaccttcgccctcctcactgccatgcttctcctggtggccctgctcaggcggagccacttcaggcaagagctgatgaagctgcagcccaggagcagcctggagcagatgatcaggaaatggctcatgcctttacatggcatgaaagtgccgctcttccgctttcagcctgataaaatcattgtcctctccaccctgattcctacaggagactactcaccccataacctcaaaaacctcttcatgaggatggtaagtcacctgaatcctgaagtgaattactcgctattccattggaactcatataggacaccagaatctagacctccagagaacagcaggacccatcttcagaaaataagaagcatttgttccctgagcctgttgaatcaaagtgcaatttctattctttttggaatgttaaaaagtgaccccagccccatgaggaccctcgccactccttgctgccaattctcccctggtgggcctgaaggccccaggcttgagccactccccaggaaagagctgatgagcgttgctgcagcccccggagcagattgcagcgggacatccccagaagtgggttgtttccccttgcatgggaccaaaagctttggctcccaaagcatcccaggctcaagggaaaaccatggactgctattgcagaaataccagcgtgcattgcagggagaacgttcgctatgggaacctgcattttaccaggggaagactttggggcattcctgctgctgagcttgcagaaaaagaaaaatgagctccaaatttgactttgagagctacagggaattgcctattactcctgtaccttcttgttaaatttcctttcctaatctcaaataaatgccttgttacaagnnnnnnnnnnnnnnnnnnggtcaacccggccgcaatttccaaatttataaatggaaaatcctgaaaacccccggaggttaattaaaccgggccttgggccccattttaaattctttaatttaaaacatggtttggccttttttaatgaaaaaaacc

SEQ ID NO: 4893 - DNA, 2985 bp, Homo sapiens
  SIMILAR (401)..(2671): 1001254mologous to Homo sapiens skeletal muscle abundant protein,accession number X87613,Smith-Waterman Score=3853.
ggcaaacacaagctgctaagcactggccccacagagccatggtccatccgagagaagctatgtttagcatcttctgtcatgagaagtggcgatcaaaattgggtatcagttagcagagcaatcaagccctttgcagaacctggccgccctccagactggttctctcaaaaacattgtgcttcccagtactcggagcttttagagaccactgagacaccaaaacggaaacgaggtgaaaagggagaagtggtggaaactgttgaagatgttattgttcggaaattgactgctgagcgagttgaagaactaaagaaagtgataaaggaaacccaggagagatatagacggctaaagagagatgcagaactaattcaagctggacacatggacagcagactggatgagctttgcaatgacattgaaaaagaaattggaagaagaggaggctgaagtaaagaggaaggctacagatgctgcataccaggctcgtcaagcagtaaaaacacccccccggaggttacccactgtgatggttcgctctcctatagattctgcctccccaggaggtgattatccacttggggacttgactccaaccactatggaagaggctacctctggggtaacccccgggactttgccgagtaccccagtcacctcgtttcctgggattcctgacacccttcctccaggctctgcacccttagaagcccccatgaccccagtaacagatgattcaccccagaaaaagatgcttggacagaaagcaactccacccccctcccctctgctgtcagagctcttgaagaagggcagcctcctgcctactagccccagactggtcaatgagagtgaaatggctgtggcttctggccacctgaacagtacaggtgtcctcctggaggtaggcggggtccttcccatgatacatggtggggagatacagcaaacacccaatactgttgcagcctcccctgctgcatcagagtctgtgtcccaagctaccattgtcatgatgcctgcgctgccagcaccatcctctgctccggctgtctccactactgaaagtgtagctccagtgagtcaacccgacaactgtgttcccatggaggctgtgggggatccacatactgtgactgtttccatggacagcagtgaaatatccatgatcatcaattctatcaaagaagagtgttttcgatcaggggtagcagaggctcctgttggatcaaaggctcccagcatagatgggaaggaagaattagatctggctgagaagatggatattgctgtgtcttacacaggtgaagagctggattttgagactgttggagacatcattgccatcattgaggacaaggtagatgatcatcctgaagtgctggatgtggcagcagtggaagcagcactgtcattttgtgaagaaaatgatgatcctcagtccctgcctggcccctgggagcatcctatccagcaggagcgggacaagccagtacctctccctgcaccagaaatgacggtcaagcaagagagactggactttgaggaaacggaaaacaagggaatacatgaactggtggacatcagggagcccagtgcagagatcaaggtggaacctgcagaaccagagccagtcatttcaggagccgaaatagtagctggagttgttccagccacaagtatggagccaccagaactcaggagtcaggacttagatgaggaactgggaagtactgcagctggagagattcttgaagcagatgttgccattgggaaaggcgatgagactccacttacaaatgtgaagacagaggcatcccctgaaagcatgttgtctccatcacatggctcaaatcccattgaagatcctttagaggcagagactcagcacaagtttgaaatgtcagactcattgaaagaagaatcagggactatttttggaagccagataaaggatgccccaggtgaggatgaggaggaagatggtgtcagtgaagcggccagcctagaggagcctaaggaagaggatcaaggagaaggctacttgtcagaaatggataatgaacctcctgtgagcgagagtgatgatggcttcagcatacacaatgctacactgcagtcacacacactggcagactccatccccagcagccctgcttcttcacagttctctgtctgtagtgaggatcaggaagctattcaggcacagaaaatttggaagaaagccatcatgcttgtatggagagctgcagctaatcataggtatgccaatgtcttcctgcagcctgttacagatgacatagcacctggctaccacagcattgtgcagaggcctatggatttgtcaactattaagaaaaacatagaaaatggactgatccgaagcacagctgaatttcagcgtgacattatgctgatgtttcagaatgctgtaatgtacaatagctcagaccatgatgtctatcacatggcagtggagatgcagcgagatgtcttggaacagatccagcaattcttggccacgcagttgattatgcaaacatccgagtctgggatcagtgctaaaagtcttcgagggagagattctacccgcaaacaggatgcttcagagaaggatggaggaaccaggggacgccgctgtgccattgaagcagatatgaagatgaaaaagtgaagcctcagagttaccctctttgagccgaacctaaaataaaagtaaacaagatagagcttgggcttgcgggcccagttccagaggtggaagttacagaagaggaggtacctgggccacacgacatgagctggaaaatctctcttagagagttggagtagcacaattgcctgttttagggcagaaaccatgggctatgttaatgtcctaatgtgtagctagcagatcgtagctagtttgtattgtcttgtcaattgtacagactttttaaaaaaaacaaccaccagtgaaatgtgtgtgtatacaataaactg

SEQ ID NO: 4894 - DNA, 755 bp, Homo sapiens
  SIMILAR (45)..(380): 441254mologous to Homo sapiens skeletal muscle abundant protein,accession number X87613,Smith-Waterman Score=193.
tatgccaatgtcttcctgcagcctggtacaagatgacatagcgccctggctcccccagcattgggcaaagggcctatggatttgtcaactataagaaaaacatataaaatggctgatccgaagccccagctgattttcagcgttgacatatgctgatgtttcagaatctgttaatgtaccatagctcagaccattatttctatcacattgccattggagatgcagccgagatgtcttggaacagatccagcaattcttggccacgcagttgattatgcaaaccatccgagtctgggatccagtgctaaaaggtcttcgagggagagattctacccggccaacaggatgcttcagagatggatggaggaaccaggggacgcccgctgtgccattgaagcagatatgaagatgaaaaagtgaagcctcagagttacccttcttgagccgaaccttaaaataaaagtaaacaagatagagcttgggcttgcgggcccagttccagaggtggaagttacagaagaggaggtacctgggccacacgacatgagctggaaaatctctcttaaagagttggagtagcacaattgcctgttttagggcagaaaccatgggctatgttaatgtcctaatgtgtagctagcagatcgtagctagtttgtattgtcttgtcaattgtacagactttttaaaaaaaacaaccaccagtgaaatgtgtgtgtatacaataaactgaaaaaaaaaactaaaaaaaaaaa

SEQ ID NO: 4895 - DNA, 1165 bp, Homo sapiens
gatcagtgctaaaagtgcatcgagggagagattctacccgcaaacaggatgcttcagagaaggacagtgtcccaatgggctctcctgccttccttctctctctcttttgactctggatcccccaagcaaagcatttggctggctattgcaaggctggttaataggatcttttatctattgaagacagcaaaatattgcacaagaggaaggagctgggctgcagggagagagcagcagatggaaagaagccttctaattgtcctgatctcatggaaaaccactgtcaggaggtgctagggaactagtgccagggtcagtctgcaggaaaggcctttcttatagggaccaacagttggacaggtatgttagtcaagaaacctcactacccattgcccattctgactctcctacctttcttttactctcctgctcctttgcacatgatttgggcctgggtgggatgactaatagttattctgtgggaccctaggtgaattccaaggacctctgtagtgggcatgagcaagatattccatcctacatttcctctcacaaactaccagggtgttctttaggccactctgtggggaaggacaggaaatatggcccctcatccctctgggatttttctggctggattctcttccctctcccccaaggaaaccaaatccccaactttttctgttggcaccgtctcttgtcttcctggaccaactcatgctccctgttctttctctgcctgtcatctagggatgggagggaaccaggggggacggccgctgttgccattgaaggcagatatgaagatgaaaaagtgaagcctcagagttaccctctttgaggccgaacctaaaaataaaagtaaacaagataggagcttggggcttgcggggcccagtttccagaggtgggaagttacagaaggagggaggtaccgggggccacacgacatggagctgggaaaatctctttttaggagagttgggagtaggcacaatttgcctgttttttagggcagaaacccatgggctatgttaatgtcctaatgtgtagctagcagatcgtagctagtttgtattgtcttgtcaattgtacagactttttaaaaaaaacaaccaccagtgaaatgtgtgtgtatacaataaactgaaaaaaaaaactaaaa

SEQ ID NO: 4896 - DNA, 3201 bp, Homo sapiens
  SIMILAR (2407)..(2832): 641254mologous to Homo sapiens Protein regulating gene expression PRGE-27,accession number AAY58634,Smith-Waterman Score= 399.
cgggcaaacacaagctgctaagcactggccccacagagccatggtccatccgagagaagctatgtttagcatcttctgtcatgagaagtggcgatcaaaattgggtatcagttagcagagcaatcaagccctttgcagaacctggccgccctccagactggttctctcaaaaacattgtgcttcccagtactcggagcttttagagaccactgagacaccaaaacggaaacgaggtgaaaagggagaagtggtggaaactgttgaagatgttattgttcggaaattgactgctgagcgagttgaagaactaaagaaagtgataaaggaaacccaggagagatatagacggctaaagagagatgcagaactaattcaagctggacacatggacagcagactggatgagctttgcaatgacattgcaacgaaaaagaaattggaagaagaggaggctgaagtaaagaggaaggctacagatgctgcataccaggctcgtcaagcagtaaaaacacccccccggaggttacccactgtgatggttcgctctcctatagattctgcctccccaggaggtgattatccacttggggacttgactccaaccactatggaagaggctacctctggggtaacccccgggactttgccgagtaccccagtcacctcgtttcctgggattcctgacacccttcctccaggctctgcacccttagaagcccccatgaccccagtaacagatgattcaccccagaaaaagatgcttggacagaaagcaactccacccccctcccctctgctgtcagagctcttgaagaagggcagcctcctgcctactagccccagactggtcaatgagagtgaaatggctgtggcttctggccacctgaacagtacaggtgtcctcctggaggtaggcggggtccttcccatgatacatggtggggagatacagcaaacacccaatactgttgcagcctcccctgctgcatcaggtgctcccactctttcccggcttttagaagctggtcctacacagttcaccacacctcttgcttccttcactactgttgccagtgagcctccagttaaacttgtgccaccccctgtagagtctgtgtcccacgctaccattgtcatgatgcctgcgctgccagcaccatcctctgctccggctgtctccactactgaaagtgtagctccagtgagtcaacccgacaactgtgttcccatggaggctgtgggggatccacatactgtgactgtttccatggacagcagtgaaatatccatgatcatcaattctatcaaagaagagtgttttcgatcaggggtagcagaggctcctgttggatcaaaggctcccagcatagatgggaaggaagaattagatctggctgagaagatggatattgctgtgtcttacacaggtgaagagctggattttgagactgttggagacatcattgccatcattgaggacaaggtagatgatcatcctgaagtgctggatgtggcagcagtggaagcagcactgtcattttgtgaagaaaatgatgatcctcagtccctgcctggcccctgggagcatcctatccagcaggagcgggacaagccagtacctctccctgcaccagaaatgacggtcaagcaagagagactggactttgaggaaacggaaaacaagggaatacatgaactggtggacatcagggagcccagtgcagagatcaaggtggaacctgcagaaccagagccagtcatttcaggagccgaaatagtagctggagttgttccagccacaagtatggagccaccagaactcaggagtcaggacttagatgaggaactgggaagtactgcagctggagagattgttgaagcagatgttgccattgggaaaggcgatgagactccacttacaaatgtgaagacagaggcatcccctgaaagcatgttgtctccatcacatggctcaaatcccattgaagatcctttagaggcagagactcagcacaagtttgaaatgtcagactcattgaaagaagaatcagggactatttttggaagccagataaaggatgccccaggtgaggatgaggaggaagatggtgtcagtgaagcggccagcctagaggagcctaaggaagaggatcaaggagaaggctacttgtcagaaatggataatgaacctcctgtgagcgagagtgatgatggcttcagcatacacaatgctacactgcagtcacacacactggcagactccatccccagcagccctgcttcttcacagttctctgtctgtagtgaggatcaggaagctattcaggcacagaaaatttggaagaaagccatcatgcttgtatggagagctgcagctaatcataggtatgccaatgtcttcctgccagcctgttacagatgacatagcacctggctaccacagcattgtgcagaggcctatggatttgtcaactattaagaaaaacatagaaaatggactgatccgaagcacagctgaatttcagcgtgacattatgctgaggtttcagaatgctgtaatgtacaatagctcagaccatgatgtctatcacatgggcagtggagatgcagcgagatgtcttggaacagatccagcaatttcttggccacgcagttgttaatgcaaacatcacgagtctgggatcagtgctaaaagtcttcgagggagagattcttacccgcaaacaggatgcttcagagaaggacagtgtccccaatgggctctcctgcctttccttctctctctctttgatggaggaacccaggggacgcccgctgtgcccattgaagccagatatgaaagatgaaaaaagtgaaagcccctcagagttaccccctctttgagcccgaaccctaaaataaaagtaaacaagatagagcttgggcttgcgggccccagttcccagaggtggaagttacagaagaggaggtacctgggccacacgacatgagctggaaaatctctcttagagagttggagtagcacaattgcctgttttagggcagaaaccatgggctatgttaatgtcctaatgtgtagctagcagatcgtagctagtttgtattgtcttgtcaattgtacagactttttaaaaaaaaacaaccaccagtgaaatgtgtgtgtatacaataaactgaaaaaaaaaactaaaaaaaaaaaa

SEQ ID NO: 4897 - DNA, 802 bp, Homo sapiens
  SIMILAR (315)..(623): 531254mologous to Homo sapiens thrombin inhibitor,accession number Z22658,Smith-Waterman Score=199.
aaccccgcggggagaatcgttttaaagcccagccagaatggagaaaaaccccttgccaaatgatgttaagccaatctacttttaggaagaccctatatagggaaaatatttaccacaatcttggcgctccacatatgttggcagaggaactgaatatgatcatcatgcttccggacgagtaccactgacctgagcaccgttggagaaagactctactcacgcgaagttcgtagaatggacgagcctggacatgatggctgaagaggaggtgaagctgtccatcccgcggtttaaactagaggaaagctacgagcatggagagtgtcctgcgcaacctgggcatgactgatgccttcgaagctggggcaagggcaaacttctctggaatgtccccagacagacctgtctcttgtccaaaggtcgtgcacaaagtctatttgtgggaggtcaaatgagggaaggccacgggaggctgcaagcccgccaaaggttgccatccatgatgatgcggtgtgcccagattctgtcccccgcctcccgcgccggaccaccccttcctttttcttcatccagcacaggcaagaccaacggggattctattctgcggccgcttttcctctccgtgaggacagggcagtcttggtgtgcagcccctctcgtctgtgtcccctgacagtgcgcagtgtgcctgcaacccaagtggccttagtccgtgcagtggtgggcagttcagaaattaaagggcccatttgtggggattgccgcattcaaaaaaaaaaaaaaaaaaaaaaacctcgtgccg

SEQ ID NO: 4898 - DNA, 2151 bp, Homo sapiens
  SIMILAR (1030)..(1869): 871254mologous to Homo sapiens Human fetal brain cDNA clone vc23_1 derived protein,accession number AAY50930,Smith-Waterman Score=1294.
atggcggaggaacaggtgaaccgcagcgccggcctggcccccgactgtgaggcctcggcgactgcagaaactacggtttcctcagtggggacctgtgaagccgctggcaagtcaccagagcccaaggactacgacagcacctgcgtgttctgccggatcgcggggcggcaggacccgggcaccgaactcctgcactgcgaggtgggcggcgacgcgcggccggggaatgaggacctaatttgcttcaaagatatcaaaccagcagcaactcatcattatcttgtggtgccaaagaagcatattggaaactgcagaactctaaggaaagatcaagtagaactggttgagaacatggtaactgttggaaaaaccattcttgaaagaaataatttcactgacttcacgaatgtgaggatgggttttcatatgccaccattctgttccatttcccacttgcaccttcatgttctggcaccagtggatcagcttggcttcttatccaagttggtttatagagtcaattcctattggtttatcacaacaaacctacaaggaaatggtgaaatttccaaggaaatggtgaaatttcagtccaattttgaagaacaggttttgaagggctgtagagaaagctggaagcacactccaagtggaacgataacttggaaatatactgtcttattatcacaggctgctcctgaaagccacgcgtccccgctcaccagctaccagcgctgggagacccctaaccaccaggcattcacaggtgaggaagcccctcccacagcggccggagtttcggactcggagcgcgagaaacgtcgggatagcgcctgcctcgcagagcttccgcttccggcccttcaggctctgtctctgtggagactgggctttgggagggagaaagagggacctagcgcgggccgcgcaggcgcacggtgggcagctgcaatggcgctgtcgtgtacccttaacaggtatctgctcctcatggcgcaggagcatctggagttccgcctgccggaaataaagtctttgcttttgctttttggaggtcagtttgccagcagtcaagaaacttatggaaaggttccatttctacattcggactctacatataaaataaagattcacacttttaataagacattgacacaagaagagaaaatcaagcgaatagatgcacttgaatttctgccatttgaaggaaaagtgaatttaaagaaaccgcaacatgtattttctgttttggaggattatggtttagacccaaactgcatccctgagaatccacataatatttattttggtagatggattgcagatggacagagagagcttattgagtcatacagtgtcaaaaagagacactttattggaaatacaagtatggatgctggtttgtcattcattatggctaaccatggaaaagtgaaagaaaatgatattgtctttgatccatttgttggaacaggtggcctgctgatagcatgtgctcattttggtgcatatgtgtatgggacagacatagactacaacacagttcatggcttgggaaaggctactaggaaaaaccagaagtggagaggaccagatgaaaacattagggccaatcttcgtcaatatggtttagagaagtattaccttgatgtcctggtttcagatgcatctaaaccttcctggaggaagggcacatattttgatgcaatcattactgatcctccatatggtatcagagaatctacaagaagaacaggttcacagaaggagataccaaaggggatagaaaaatgggaaaaatgttcaggatttcagcagcagatctcaaacatttcactgattattttgtttgggtttctggatgtgatttgtggtacactggggggaaatctaaaagtattcaaggatgatttattttcagtttttctgtttaaaccatcttatttaaaatgtttcgaggttatatgggagctccccatccatcccgctgagagccacctctaccactcagttaaagccccgtattcaccatccttcaagtttgtgtgtgacctgattcttcctgcatgctggacaaggacccgggtatcaagagggcaaggtgtaaaaggctgtcaccctgactctccactgagctggtttaacacttag

SEQ ID NO: 4899 - DNA, 3262 bp, Homo sapiens
  SIMILAR (14)..(616): 851254mologous to Homo sapiens MOP-4,accession number AB014773,Smith-Waterman Score=840.
ggtataatctggtgaccttcagatggcagtgctttcatttgaaaaagatgatgatcataatggacacatagatttcatcacagctgcatcaaatcttcgtgccaaaatgtacagcattgaaccagctgaccgtttcaaaacaaagcgcatagctgtaaaaattatccttgtaaaaccaacaaccactggtacagtttctgggcttgtttgctttgaagatgatcaaagtaactgggggctatccatttgcagcttacaaaaattgttttcttaacttaagccattccaatttgtagtatttacagagacaactgaagtaaggaaaactaaaatcagaaatggaatatcatttacaatttgggatcgatggaccgtacatggaaaagaagatttcaccctcttggatttcataaatgcagtcaaagagaagtatggaattgagccaacaatggtggtacagggagtcaaaatgctttatgttcctgtaatgcctggtcatgcaaaaagattgaagttaacaatgcataaacttgtaaaacctactactgaaaagaaatatgtggatcttactgtgtcatttgctccagacattgatggagatgaagatttgccggggacctccaagtaagatactacttcaggtccattggacactgattaatacaagttgtcttaacgttactccaggaccacttgattttgaaaaagagtgcacttaattcagaagctaaagaaaatcagttcataatactatggatttctctttcattaagccttaattttaagggaaacatcagtaagaaactgcactgaagaattataaaacattttggggcatagcatacacttgtctaacggttcacacgtggctatgatcacaagcaactttgaactggaatgctatttacaaaagttttgtgccattaccctgtgtattaatctctctggataaaaagaaggaaaaaatatgtatgaccagaatagatatggatgaagaaattgaaagcaacgaatgcaactattcaaaaagtttaattttatgaatttcttttttgtttagtcttgaagactgattttctatgcaaatagtgtttggcatcctgcacctctgatatgatttggctttgagaatttaataccactgggaagaagtatggtagtggtggatgaagggtggatattttaaattgtgcagttacagtttactgtcctattacctctgctcgtttaaccagtttgttatatcactgtgtccccaaaatcaggatttttgttgatagcatcagtgttgtaggagcaataggtcagatgagacatattaacttagactaaacgtgaacagtattatatggactctcacaacgctcttagagaatccgtgaatgtgaacagacaaatgtggctaaccatttgagatcttcagtatgccttctaatgtggctataatatttatgtggagactctaaacctgattgtcctaatataaaaaactaaaagattttgtaaagggagtgtctttagaaatagatgaaatgtagaatgttaaaaattattgctagggtagtcttttttttttccagaaacctaattaggggtattaaattttgtgttttttttgttttttttttttaaacagaagcatgttatttcattcacattcccagaaagggagttaatgaagataaaaatttattttttaaggtctttattgagagaaactttgttttactgatatgaactattgcagatgtttttataaatactttcattaaaatgatgtaaacagtagtacccaacactgtaaactcagtgaaaatagtaaatgattcttttattactaagactgtcatgcattctgaagcagttggcttttttttaaccataggaagtaatttccctctagctcctttccttctactctcctgcttcagaccattagtaggtactttgttaaataaaaaactagattaacatcaatattactccaatttggtatcttttacactatgtattatacctactttctttttatttcatttacaaatagtttaaattactttatcaaccagctgtattgtttccctcttgtaaaaagtacccatcaagtggggaaaatgtatgtggaagtggagagtgaatttgtatgactaaaggataatctcgtacatgggggaagtggggcaaaagtggataggatgaatttaaagaaaatgactacctttggaaaaaagaaattaaattttgttcacatatcctaccctttcccgattgtgcatatcccaagtgtcatatttaaaactaaggttacttaaaacagaatccaggaatatcaaggctctgtggcttggaattttagaggataggactaataaaaggacttttgcaaagaaggctttttcccacgttcacttggtttggtgttccttggaaagtaactgatacttttcgggtagttaattcagcagtcccataaatatgatccagtaacttgctgtatatttttattgaagtcctcggacaagcctcttcaggaagtaaatttagaaccgatgctgtcagttcatatttatagatattagtgttttagcagataaaacaaaatcaacaaaaattaagttcattttggtgattaaacctggccaaccatttttccattactttttttctatagttaatggttattgccatgatttcttctgtttggttctactaagctagaaagccagggtgaagttaatgataattcccattattttatttctgtaccatgagattgctgttgatgactgaaataccaggtgcaaaaattaatgatttgatttttgtaccagtttcaatgagtattttttacttattaaaaataaattaagaaatgtaaagaatatctttgtaaaatccatgtttcataagttgactcccagagattctgattttgctgtttattttgtgagtaatgttgctttggtgtttcctgattttcaagtttgcaatcatggagatacagcagttattaggtgtggaaggacattacctcaaatgtcctcagatggctccaggaaattcttttaaaacagttggagagaaatagtcgtgaccatgtaaaacctagaggatctggtaaatcccatactactggttagggatttgtaaagtccatttctttttagagttcaaagcagttctgttacttgtccataagttcctcataaattgtcccaaaggtaggacatggaaataaatgtatatctttattttttaatct

SEQ ID NO: 4900 - DNA, 478 bp, Homo sapiens
  SIMILAR (121)..(264): 931254mologous to Homo sapiens peptidylprolyl isomerase,accession number X52851,Smith-Waterman Score=227.
  misc_feature (1)...(478): n = a,t,c or g
gggggggaaaccggtgtaattattagccatggtcaaaccccaccgtgttntttngacattgccgtcgacgggcgagcccttgggccgcgtntcctttgagctgtttgcagacaaggtcccaaagacagcaggttggatggcaagcatgtggtgtttggcaaagtgaaagaaggcatgaatattgtggaggccatggagcgctttgggtccaggaatggcaagaccagcaagaagatcaccattgctgactgtggacaactcgaataagtttgacttgtgttttatcttaaccaccagatcattccttctgtagctcaggagagcacccctccaccccatttgctcgcagtatcctagaatctttgtgctctcgctgcagttccctttgggttccatgttttccttgttccctcccatgcctagctggattgcagagttaagtttatgattatgaaataaaaactaaataacaaaaaaa

SEQ ID NO: 4901 - DNA, 1454 bp, Homo sapiens
  SIMILAR (100)..(435): 1001254mologous to Homo sapiens 2-oxoglutarate dehydrogenase precursor,accession number D10523,Smith-Waterman Score=597.
ggaaattccccaccttctgagctcaagtggaaggcaaagtctgaagaccttagacaccgaggcctgaaggcacaggcggagattaagggctcaacccagcagatcggcttcaccaccgaccctcggatggcccgctcctccccctaccccactgacgtggcccgagtggtgaatgcccccattttccacgtgaactcagatgaccccgaggctgtcatgtacgtgtgcaaagtggcggccgagtggaggagcaccttccacaaggacgtggttgtcgatttggtgtgttaccggcgcaacggccacaacgagatggatgagcccatgttcacgcagccgctcatgtacaagcagatccgcaagcagaagcctgtgttacagaagtacgctgagctgctggtgtcgcagggtgtggtcaaccagcctgagtatgagtgtgtctctatgcatggagtaagaaacaaaccatcctacaatagcaccaaatccagcatggatggactcatcctccaccctgctactggacttgtctttgtactctcaaagcagtgtgaggagattcatcaaccggtggtgtggacatgtgaacagcgtgaggcagagaacgccaccgccgaggaaaaccgtgtactattagccatggtcaaccccaccgtgttcttcgacattgccgtcgacggcgagcccttgggccgcgtctcctttgaggtcgggcgggcggcggcgtgcgggaatggggcccagaaagtgggccggggtcgggaaaattttccgtgcctctgagccactggagagaaaaggattttggttataaggggttccctgctttcacagattatttcccagggttttatgtgttcagggtggtgaacttcaacaacgccattaatggccactggtgggcaagccccattctatggggaagaaaatttgaaagattgaagaacttccatccctaaagcataccgggtcccctggcatcttgtccccatggcaaaatgctggaccccaaaccacaaatgggttccccagtttttccatctgcactgcccaagactgcagtggttggaatggccaagccatgtggtgttttggcacaagtgaaaggaaggccatgaatattgtggaggcccattggagccgctttggggtccaggaaatggcaagacccagcaaagaagatccccatttgctgactgtggacaactcttaataagtttgacttgtgtttttatcttaaccaccaagatcatttctttttgtaggctcaggagagcaccccttcaaccccatttgctcgcagtatcctagaatctttgtgctctcgctgcagttccctttggtttccatgttttccttggttcccttcccatgcctagctggattgcagcagttaaagtttatgattatgaaataaaaactaaataacaataaaaaaaaaaaaaaagggggcc

SEQ ID NO: 4902 - DNA, 400 bp, Homo sapiens
  SIMILAR (1)..(201): 951254mologous to Mus musculus putative,accession number AK014046,Smith-Waterman Score=362.
aagggagctgagcacataacgacttacacgttcaatactcacaaagcccagcataccttctgtaagagatgtggcgttcagagcttctatactccacgatcaaaccccggaggcttcggaattgccccccactgcctggatgagggcactgtgcggagtatggtcactgaggaattcaatggcagcgattgggagaaggcctgaatgtggctgacctgggctgctggttccgtggactagggtcatcttgatctctgcagtttgctccagctaccagtttctttaggcagctctttgtcctccctctgcccagattttgatgtagtctaattgacatccttctcttcccgacttttgtgtgatcttttaggaaaaaaaataaatatttttaacattaaaa

SEQ ID NO: 4903 - DNA, 1137 bp, Homo sapiens
  SIMILAR (101)..(454): 401254mologous to Mus musculus putative,accession number AK014046,Smith-Waterman Score=169.
atgcggcgatcgaggagctctgcggccgccaagctgcgcgggcagaagcggtccggggcctccgcggcccccgcggcctccgcggccgctgccttggcacccagcgccacccgcacacggcgctccgctagccaggccgggagcaagagccaggcggtcggagaagccgccgtcggagaagccgcggctgaggcgctcgtcgccgcgggcccaggaggagggcccgggggagccgccgccgcctgagctggcgttgctcccgccaccgccgccgccgccgccgactcccgcgaccccgacgtcctcggcgtccaacctggacctgggcgagcagcgggagcgctgggagacgttccagaagcggcagaagcttacctcgaaagggtgccgccaagctcctgctagacacctttgaataccaagggcctggtgaaagcacacaggaggctgccacttgtggaagcagttcgtttttgaaagttttgggcctcagcagactttgcatatatttgactgcaattgcagcattttgcaagaagaagcagaatagacacttcattgttccagcttctcgcttcaagctcctgaagggagctgagcacataacgacttacacgttcaatactcacaaagcccagcataccttctgtaagagaatgtggcgttcagagcttctatactccacgatcaaaccccggaggcttcggaattgccccccactgcctggatgagggcactgtgcggagtatggtcaactgagggaattccaatggcagcgattgggagaaggcccatgaaagagcacaagaccatcaagaacatgtctaaagagtgagcttctggcctctcctgccctgaaaaggaggaatgattggggccagcaactttgctctccctgccgtgcctcgggtggtgctcctgaatgtggctgacctgggctgctggttccgttgactagggtcatcttgatctctagcagtttgctccagctgaccagtttctttagggcagctctttgtcctccctctggcccagattttgatgtagtctaatttgacatccttctcttcccaacttttgttgttgatctttttagggaaaaaaaataaatattttttaacattaaagcaaaaaaaa

SEQ ID NO: 4904 - DNA, 1940 bp, Homo sapiens
  SIMILAR (15)..(194): 751254mologous to Homo sapiens Human myelin oligodendrocyte glycoprotein gene,accession number AAZ29204,Smith-Waterman Score= 209.
attctcctgccttagcctcctgaaaagctgggattacagggccctgccaccaagcccagctaattgtatttttagtagagacaggatttcaccatgttggccaggccagtctcaaactcctgacctcaggtgatccacctgcctcagcctcccagactgttgggattacaggcatgagccaccacgcctggccagtttcttcattttacatatggtcacattgggcgcctaggaacagttaggtcgctcgtcacatagggcagttaagtgggagaaccaggttttcaaaatcaggtaaggaaaaccatcattcatttaacttgaggcaccagctgtgcttaaggccttgccacgggcgttattccttggcaggccttcacaacagtgggaggtctgtatcctgaatgtcctcattttacagatgaggacattgaggagaagagacttacccagggctcacacagcagctcagcctgttccaggggcctggtcagtgcgtgttctttgccacccagccttgtcactccagtggccagcttccagaaacggaggctgttgcttttatccctaaactgcatccacagagaagccccaagaaggaggttggggccagctcataaaaagcctgaatgccaagccaaggagtggatgcctccagtcatatttagaacaaagtcaagtataaatttacagagaaaaaattctaagacagttggatgttgtcctgttggtgaggaagggaaaggtttttcttgtagggaactggaaccagcccactactgcacgcttgtgagctgtcatggaaacctgatccccaacagcttttgaggttgtttgtttgactgtttgtttacctgacttggactctaggaggttttggcaaaaggtacttcaaacaggggagggcctggactgagggggaccaggtcttcttgctgacctcgtctacaaaggcaaaggaaggcaaaggaagctgtctcgggtgtttctgaacaacgtgactcatgaggggctttggctacctcttgcgttccccctagaagatgtccagggccttacatttaaatcggcttttctcttgcggtggggtagagaatgggagctcccgccttgcgggcagtgctaaaggtggagctgggggattttcctgggaatgatttgagggctcttgaaagcccatgtgttccaaagcgtctttaactctgggatagcattggaagccgctgtcatgacaggacatggcactggatggctggcagagaagccctggctgggagttaagggagccctgggttggaatccagccccacctcttttatgccacaggttttggtcaagtttctctcccgctcagggtaagggctgtgaactccctcttacagctaagaaccatgcaggcttagtgaggacaagacccttctaagaagctttacccctaatccccccccaaggaagcccccgaggcccggcattattcctccccaattacagggggatgagccctcaaattccagagagccttaaagcaaccctgcctcagggtccacgtcctcccaacagggcagttagagtcaaggtataaaaccaaggtctgtttttgtacccagagtcccagactaactgttggtaggaatcttgtaaccagtcatgtattcttccttgttttggccgctgggaagctcaaaggtcaaattcgagaccctttttttttccaattgtgctgagtctcctactagactcgcttcattctagctttctgcttttacctttaccctaatctttttatttttatgctattgtactttatttttgtaagttgctgagatatcatgttttgcaacaagatgggctatatcctaaactaaagacatgatcaaaggaaaaaaaaaaaaaaaaaaaaaaaaaaaaaaaaaaaaaaaaaaaaacctcgggggggggcc

SEQ ID NO: 4905 - DNA, 872 bp, Homo sapiens
  SIMILAR (504)..(539): 831254mologous to Homo sapiens Human vesicle membrane protein -like protein 2,accession number AAY17389,Smith-Waterman Score=56.
  misc_feature (1)...(872): n = a,t,c or g
accttgaggaccttagtccgngtggtggaattcccggtgctcaccatggcggccaccagtggcattttgtcagcacttgggaacttcctggcccagatgattgagaagaagcggaaaaaagaaaactctagaagtctggatgtcggtgggcctctgagatatgccgtttacgggttcttcttcacagggccgctgaagtcacttcttctacttcttcatggaacattggatccctcctgaggtccccctggcaagggctcaggaggcttctcctggaccgcctttatctttgcaccgggccttcctcatgttgttcttcctcatcatgaactttctggaggggaaagacgcctccagccttcgccgccaagatgaggggggggcttctggccggccgctgaggatgaaacttgccgggtgtggacgcccactacagttcatcaacatccaactacgtcccttttgaaagttccgggtgcttcttcggccaacctggccagctcttgttctggtatgcctacctggccctccttggggaagtgacgacccgctgggagaacatcaggtgcacatgtggacgtgggtctgggggtcttcacccgcccaagcgagagcagaaaccaatccagtcaggatgtcactgactctaaatcaggtgattcaagatgcccaaaaatgattggatagagaaaccagaaatctctgaaatgtcagaaccctgtcttttaaaaaggcagtcgctgccttcatggtggtgctgccccagaaacttaaaatttagtcgaggcagtttcaattgttactgtggaccgaattaggatcacaataaacgataatgcaggttcttcaatggtgaaaaaaaaaaaaaaaaa

SEQ ID NO: 4906 - DNA, 1206 bp, Homo sapiens
  SIMILAR (8)..(325): 601254mologous to Homo sapiens PRO2550,accession number AF130089,Smith-Waterman Score=284.
tgttagattttttttgttttgagagctggagtctcgctctgtcacacaggctggagtgcagtggtgcgatcttggctcacgtgcaacctccacctttgtgttcaagcaattctccttcctcagcctcctgagtagctgggattacaggcatgtgccaccatgcccggctaatgtttgtattttagtagagatggggttggttggccaggctggtcttgaactcctgatctcaagtgatacgcccatctcggtctcccaaagtgctgggattataagcgtgagccatggcacccagcctcacataggaaacttcttagagcaacttaaagttgttcaactatgttatacgtctttcttatgttttactaagtctagtacagtaaaacatatacaattaattattattaaaatcaccttaagaaatactaaaaacaaggccagaatataagaaataaaatattgagagcctattaacaaactcagcttgtgagtgatttcagggaatggaaagttgagtcaaaaaaaaataggaaagattttaacagctttctgtggattttattatagattttatgtggagtaatccacagaatatgtaagactagtaggtactaggcactcaaaaaatgtttatcatacatatacttctgaatagttgtcaagaaaaaagcaattttaaacatggcttacgttacgcagaaattgcctggtttaagggccatcatgtgacttgagaagttttgacagtttgatgtatacagattatgaatgttaaactcttgtaccacagtataatcctttgtctattagtaatagatattcaagtcctcaaacatgccttaccctaggcgtgcaccttttgaatgttctcattaagccaaggaaagtcttggaacctccgtaagattattagtgtgccttgtcaagctcaaggtatgtaacaatacatatctatagtgcagataaaacaagaatatactagaatgtgtctgctctgaaaaagcatcccagctcaaataagtttagaaaacaataaatcaaagctaaacaactcttgtaatgaaaggacttctcagagcccctaatttgctgatccatactaagggtattggtatttaaaattatttacctgtaaagaacttttttccaagacacactaagcagagaaaagcaataacctctacacatattggttccaatttcttg

SEQ ID NO: 4907 - DNA, 598 bp, Homo sapiens
  SIMILAR (143)..(310): 691254mologous to Homo sapiens Human myelin oligodendrocyte glycoprotein gene,accession number AAZ29204,Smith-Waterman Score= 199.
gcggccgcctactactactactaaattagcggccggtcgactttttctcttttttcgagacagggtctctctgctctgtcacccaggctggagtggcagtgttgcaatctcggcccactgcaacctccgcctcccaggttcaagtaactgggactacaggtgcgtgacaccacacccggctaattttgtattttcagcagagatgggatttcaccatgttggccaggctggtttcgaagtcctgacctcaagtaatccgcctgcctcggcctccacaagtgctcggattacaggcatgagcaaccgcacccggacacctgtttaattttcatccataaatgtgttataaatatagatgtggatctctggccgggcgtggtggctcacgctggtaatctcagcaccttgggacggctgagatggggtggatcacccgaggtgaggagttcaagaccagcctggactgaaagtgagaggcttctttttttttgaataatctttcggctttggcttttagctttcgccttcgttgtttgaacttgggcatgattttagtctaagagccgggggagtcgatggagtccggctcgtggccgaa

SEQ ID NO: 4908 - DNA, 1573 bp, Homo sapiens
  SIMILAR (277)..(339): 851254mologous to Homo sapiens PRO2550,accession number AF130089,Smith-Waterman Score=82.
cagtgattattccctttatttttacataatgtaaatgtagctagcaggtttaaaaaaaaaaacttttactagaagctgatatatatctcttaacgtcactacccatttaatttttttttttttttttttgagacagggtctcttgctctgtcacccaggctggagtggcagtgttgcaatctcggctcactgcaacctctgcctcccaggttcaagtaactgggactacaggtgcgtgacaccacacctggctaattttgtatttttagtagagatgggatttcacctgcctcagcctcccaaagtgctgggattacaggcgtgagccactgcacccagctgggtgtttttatctgtatttgttatggatcatctcatggagtgaggcagagttggcatcagttttgttcatcaaagctgcttgtaaaaagtggcagagttggagttgggcttctagggtgagccagctgaaactttctccttaaggcctgcgtcatcactggagtcagacctgttcctgtttccatattttccttattggtaagaggggttccacctgggctcctctctacatcgacttttctaagcagtttccgcagatccatctgactttttccaggagtgattaagacgtgtgtaactcgagtcgataacacttttggaggtaggtttcaggggtaacatgctggcaagtcagagacggtaactaaggggatcccgtgcttttggcgatggtataaagctccttctttcatctaaactctggggcttccctttattttacaggacagcagaacctttaacctgttattttgcatgggtccatctttttttaatggtccagcctgaagtgctttagcgagactgggttttctgagcaacacaggtgctacgtggtggtggaggaggtggcagaggtggaggtggaggaggaggaggaaaatggctggctggctgtggcagtgtgggaggaagcacagctttggagtctccaggggtgatcagaacgcaggcaggcacatttgtaagtttaccacttcatgtgacatgtttgaccacagcttggacaggaagaactttctgagatggtcttcgagtgcttctctggagcttgcataatttactttccaaaatgcaaaactgttgttttacactgtaaagttctcggtggcagatacgagatggaaagatggtgtctttcaatacttctaaactctgggttatgcagttctggcaccagctgtatatagaccatactctatttgtccaaagttttattgcatctctgatgttaggaaaattgaagttccagggatgatgttagccagcttctgctttgagatatatctattgaagaaataccgactctttctggtgagggtggtggaggatggaggtgtaattagcttggactgaaagtgagaggcttctttttttttgaataatctttcggctttggcttttagctttcgtcttcgttgtttgaacttgggcatgattttagtctaagagccgggggagtcgatggagtccgggctgtggcctcacgaaatcgtcgacccgggaattgcga

SEQ ID NO: 4909 - DNA, 666 bp, Homo sapiens
  SIMILAR (192)..(359): 641254mologous to Homo sapiens MDS024,accession number AF182423,Smith-Waterman Score=163.
ctggagtggattggagtgggtggaagtgtattgcagagccagaggaagctgggattcgggggtgttcactggtctgcgcgggtcacgcgtccccagtcctcgggcggggtgagcttggcggagggtgtgtgtgagagaagtccgagaccacacccctcggcctgcttaaacttttcattcttttgcccgtgtatcaagtaccggagttaggcaggaaataaagtctttgcttttgctttttggaggtcagtttgccagcatgtcaagaaacttatggaaagtcaccattttggattcttagcattccctttgaagatattgcaagaaatttgatgaaacggacagtgtgtgccaagtcgtatatttgaactatggggtcatggacaatctcctgaggagctgtacagttctcttaaaaactaccctgtggagaagatggttccatttctacattcggactctacatataaaataaagattcacacttttaataagacattgacacaagaagagaaaatcaagcgaatagatgcacttgaatttctgccatttgaaggaaaagtgaatttaaagaaaccgcaacatgtattttctgttttggaggattatggtttagacccaaactgcatccctgagaatccacataatatttattttggtagatgg

SEQ ID NO: 4910 - DNA, 1844 bp, Homo sapiens
  SIMILAR (1679)..(1801): 631254mologous to Homo sapiens X-linked retinopathy protein {C-terminal, clone XEH.8c},accession number S58722,Smith-Waterman Score=119.
ttttctggttaaaagcactttattgattacagtatcaattcacaacatttcataaagccactgtacaaatagaggaatgaatcactgtgtaagaaagatctaagaacagttaaatcatgatacaagtccatagtttatatggtttagagctttaagagccttaatctaacacgtttacccttcccataattagactactactgacattcatgttcagttgaccacgagtgtgtacaaatcattctaggtaaagacaaacactttcagaatgctttaacagaaaaataattttaatcaactttaaaaacacacttagatgtggatgcctttggataggaaaatagaaatgcaagtgttcagatgcttctttgaaaagaaaacaataggatagagcaccattgtgtaaaagacaaaaggcttgagatatctaccaagtatatcactgaagttctattaattaagaaataaatactgtatgatgtaagattttgttggaatacatttaacacccgttggaatatagctttttccccccccgtaatgctgcctttatccacaactgtattttacaaaatcagccaactgggatttaagaaagaagacatagggagattttatcaacatgcaaacatttgcctaaatacaagggggtaccatcaatgtgtgattaattaataagttactttttaaaataaaggtgctagcttagatattctactataaaccatttcattgagtacctattatgtaaccaatattttaaaatatacactgaatctgaggcaacccaaaatgaacaatggaaagaaaactagtaaatctgaaatgtacttcacattctacttaatctaatttaaaatataaattcattgtgcaacccataagaaagatggtccaacctgtgggtatttttaaaaattctaacaggagaaatcatttaaaattttgctttttcacaatggcaaaaaggaaagaatttgaacataatatttaatttttaaaaaaattcagcctgactccgaccctgaagatttcagaaagaacatccgtcactattaaaatggatggacagggcccaaatggggggattgtttaaccagttttcctaagttaaaccaagaataagccacaagtattcaattgtgttacaacttagatctgagacatttacatcaaagcatacttccctgaacatgttcacatttaaaatgcttaaggtcttattattaaatccaaaataccaaaagtattagaggagctagttatacaatattggcacagcatttttaagcaataataaaagtttcattttgtcaccttaagtcaagatccatttatctattaataggttaagtctgaaattctgtaacatattctagaagcacctacatccattatttccaggagactagtttactactatcatgcaatcgctgaggtcatatgagtctaaaatgaagggaattgctgaacaggcccttttgctgttgagatatgaagcccaaaatctttgcctctgaagacggaattcaatgtggtgtgtgtaatcacaagtaaaaacttgagctagggaggaaccttggatattcagtctacatctcaaaacagcatagctgccaaaaatgaggcctgtccattaaagtggaggagatatccttgctgatggcaaaaactgctttttctttttgggacggaatcttgctctgtcgctcgggttggagtgcagtggcgccatctcagctcaccaaaacctccacctcctgagttcaagcaactctctgcctcagcctcacgagtagctgacaggcgcccacctccacgcccggctaatttttgtattttta

SEQ ID NO: 4911 - DNA, 309 bp, Homo sapiens
  SIMILAR (47)..(298): 741254mologous to Homo sapiens dynamin II {AA 474- 866],accession number AC007229,Smith-Waterman Score=307.
cggaaggaatagtagatttttgctagtacagcaccaaagagatcttgggcccgtctggggcccccccagattcttgtcagcgtggcgacaaaagcctcttttggggcgcccacaatcccatcccgtgcctggaccccagagcgtgtttgccaacagtgacctcttcccagccccgcctcagatcccatctcggccagttcggatccccccagggattcccccaggagtgcccagaagaccccctgctgcgcccagccggcccaccattatccgcccagccgagccatccctgctcgactaggcctcgag

SEQ ID NO: 4912 - DNA, 403 bp, Homo sapiens
  misc_feature (1)...(403): n = a,t,c or g
taaaactttgtattagtgtaacatactccccacagtctacttttacaaacgcctgtaaagactggcatcttcacaggatgtcagtgtttannnnnnnnnnnnnnnnnnnnnnnnnnnnnnnnnnnnnnnnnnnnnnnnnnnngaatgaggaaacaaaccaccctctgggggtagtttacagactgagtgacagtactcagtatatctgagataaactctataatgttttggataaaaataacattccaatcactattgtatatatgggcatgtattttttaaattaaagatgtctagttgctttttataagaccaagaaggagaaaatccgacaacctggaaagatttttgttttcactgcttgtatgatngttcccattcatacacctataatctctaacag

SEQ ID NO: 4913 - DNA, 491 bp, Homo sapiens
  misc_feature (1)...(491): n = a,t,c or g
cccacgcgtccgggaatgggctgagagtggtgtttgctttctccaccagaagggcacactttcatctaatttggggtatcactgagctgaagacaaagagaagggggagaaaacctagcagaccaccatgtgctatgggaagtgtgcacgatgcatcggacattctctggtggggctcgccctcctgtgcatctctaacaagaggccctttgaactgccttgtgttctgtgagaaacaaatatttacttagagtggaaggactgattgagaatgttccaatccaaatgaatgcatcacaacttacaatgctgctcattgttgtgagtactatgagattcaaatttttctaacatatggaaagccttttgtcctccaaagatgagtactagggatcatgtgtttaaaaaaagaaaggctacgatgactgggcaagaagaaagatgggaaactgaatanagccagtgatcagcatcattggaacatgggggac

SEQ ID NO: 4914 - DNA, 1307 bp, Homo sapiens
  SIMILAR (260)..(814): 381254mologous to Homo sapiens L6,accession number M90657,Smith-Waterman Score=194.
aagcaaagtacctcatcccctcagtgactaagaatcgcagtgtttaagaggtagcaggaatgggctgagagtggtgtttgctttctccaccagaagggcacacctttcatctaatttggggtatcactgagctgaagacaaagagaagggggagaaaacctagcagaccaccaatgtgctatgggaagtgtgcacgatgcatcggacattctcctggtggggctcgccatcctgtgcatcgcggctaatattttgcttttatttccccaagggggaaacaaagaatgcctcccgaaaaccacctcagccgctttcgtgtggttcttttctggcatcgtagggaggttggcctgctgatgcttcctgcccagcattttgttcttcattggggcttggaacaggatgactgcttgtggcttgctgtggccatgaaaacctgtggcaaacgatgtgcgatgctttcttctgtaattggctggctctcaattggaatttgcaggatctgggctactgtggtccattgtgggcagccccttggcttagccagaaaggacccattatgtcttgattcccctcgggccagtggaaactacaacctttgccaagcaccgaggggccagtaaccttctggataacctcaacatggtccggagtgcactgaacccaagcacatttgtgaaatggaatgtatctctgttttctatcctcttggctccttggtggacctgaactcatcttgtgtcttattcaagtaataaatgggagtgcttgggaggcatatgtgggcttttgctgctctcaccaacagcaatatggacttgctaaaagaaccaacccagggacagagccacaatctttcctctattttcattgtaatttatcatatttgcacttgtattcaatttgttaaaactttgtattaggtgtaaacattactccccacagtctacttttacaaacgcctgtaaagactggcatctttcacaggatgtcagtgtttaaatttagtaaacttcttttttgtttgtttatttgtgtaacatactccccacagtctacttttacaaacgcctgtaaagactggcatcttcacaggatgtcagtgtttaaatttagtaaacttcttttttgtttgtttatttgtttttgtttttttttaaggaatgaggaaacaaaccaccctctgggggtagtttacagactgagtgacagtactcagtatatctgagataaactctataatgttttggataaaaataacattccatggcacatatatacaatagtgattggctttagagcacaat

SEQ ID NO: 4915 - DNA, 1118 bp, Homo sapiens
  SIMILAR (4)..(198): 661254mologous to Homo sapiens L6,accession number M90657,Smith-Waterman Score=210.
cgagggcccgtccttctggatacctcaactgggcccggtgcaatgaacccaagccaattgggaatggaatgataccttgttttccaacctctggcttctggtgggattgaattcatcttgtgtcttattcaagtaataaatggagtgcttggaggcatatgtggcttttgctgctctcaccaacagcaatatgactgctaaaagaaccaacccaggacagagccacaatcttcctctatttcattgtaatttatatatttcacttgtattcatttgtaaaactttgtattagtgtaacatactccccaccagtcacttttacaaacgctgtaaaagactggcatcctcacaggaatgtcagtgtttaaatttagtaaacttcttttttgtttgtttatttgtttttgtttttttttaagggaatgagggaaacaaaccaccctctggggggtaggtttacaggactgaggtgacagtactcaggtatatctgaggataaactctattaatgttttggggataaaaataacattcccaatcactattgtatatatggtggcatggtatttttttaaattaaggatgtctaagttgctttttagtaagaccaagaaggagaaaatccgaccaacctggaaaagattttttgtttttcactgcttggtatgatgtttcccccattcataccccctataaatcttctaacaaggaggccctttgaacctgccttgtgttcctgtgagaaaccaaatatttacttaggagtgggaaggactgattgaggaatgttccaatccaaatggaatgcatcacaacttacaatgctgctccatttgttgtggagtactatgaggattcaaagtttttctaacatatggggaaagccttttgtcctcccaaaggtgaggtactagggggatccatgtgttttaaaaaaaggaaagggctacggatgactgggcaagaagaaaagatggggaaactgaataaagcagttgatcagcatcattggaacatggggacgagtgacggcaggaggaccacgaggaaataccctcaaaactaacttgtttacaacaaaataaagtattcactaccaaaaaacccacgcgtccgcc

SEQ ID NO: 4916 - DNA, 1205 bp, Homo sapiens
  SIMILAR (433)..(134): 761254mologous to Homo sapiens Human secreted protein, SEQ ID NO: 7881,accession number AAG03800,Smith-Waterman Score=369.
gagattgagtctcactcttgttgcccaggctgcagtgcaatggcacaatctcggctcactgcaacctccgcctcctgggttcaagcgattctcctgcctcagcctcccgagcagccaagaccacaggcacacaccaccatgcccagctaatcttttgtatttttagtagagacgaggcttcaccatgccggccaggctggtctcaaactcccgacctcaggtgaaccccctcctcggcctcccaaagtgctaggatcacaggcgtgagccaccgtgcccggtgctgggattctaattcaacaatttttcttggtagtcttgccaacagtaattggagaaacgtgttcctaattgttggtggggagaggattaaaggtaagcacacacattttaatacacattcaatgtctgaatttgaagaataaaaatgcattgctttccccacttaaaaagaggttaaattcggttccggttatttgacacagcaaagacatacaaatgtacatggcaacaggcaagttatataagctggttctttagatcaaactaaaattctagtattttcctgacccaaactaagttccaaaagtacctaaaagaaaatgaaacaggcaaatgatgaaatgtggatctttttcattccaagaatatggaaactcattggactgaaaaacccaaatcttcattataccaaacttctataatgatcttaatggtagttagctttaaaaaaacacaaaataggctgggcgtggtggctcaggcctgtaatcccagcccattgagatacttttttactcagtttttttctaagaatggattttcctctttatgaaaacaaaatattccttttctttataaaactttataggcaaatttatcaagctggtaaattccataacaggctgaaccaaatgaaatacctaagtaaagcaaattacatgattagaaggctaattatggtattactgcataggtttagtattaatgcatatgttctaagtttattgcaactacactatcttcgtaattttagatttgcagttgcatcctcctaactgcgtctaatggcagaagcaccaccttgtggcaaaagtaggagcttttaaattacagaagttagggcctgttacccagaaaggagaaagcaatataatgggcatccaggccgctgcgctatttcttgacctgtagagggattccat

SEQ ID NO: 4917 - DNA, 626 bp, Homo sapiens
  SIMILAR (139)..(624): 1001254mologous to Homo sapiens F-box and WD-repeats protein beta-TRCP2 isoform B,accession number AB033280,Smith-Waterman Score =856.
ctgccggcggcccgggcgggctggcagctagagtgggtgcgatagccgcctccgcctctgccgcctccgccgtcgcctcctccgcccgggccgttcgctgctgcgcggggagagcgaggcggggccgccggggccgccatggagcccgactcggtgattgaggacaagaccatcgagctcatgaacacttcagttatggaagatcaaaatgaagatgagtccccaaagaaaaatactctttggcagataagtaatggaacatcatctgtgatcgtctccagaaagaggccatcagaaggaaactatcaaaaagaaaaagacttgtgtattaaatattttgaccagtggtctgaatcagatcaagtggaatttgtggaacatcttatttcacgaatgtgtcattatcagcatggacatattaactcttacctgaagcccatgttgcagcgggactttattaccgctttaccagagcaaggcttagatcacatagcagaaaacattctttcgtacctggatgccaggtctctgtgtgcagcagagctggtatgtaaagaatggcagcgagtgatctcagaaggaatgctttggaagaagctgattgaacgaatggtacgcactgatcc

SEQ ID NO: 4918 - DNA, 1080 bp, Homo sapiens
  SIMILAR (268)..(924): 921254mologous to Homo sapiens F-box and WD-repeats protein beta-TRCP2 isoform A,accession number AB033279,Smith-Waterman Score =1017.
  misc_feature (1)...(1080): n = a,t,c or g
atgtggctgatcttggctgggctcgcctgggctggtctctgggtcagtgatggcctaaaggatgttcttgtcatggcaaaaggcaagagtagaagaggaaaatctgcccccaagcacatcatgagtttaggaccattactgatgattgcctttgcaatatgccactttgcgtctgtcatgggctttcactacttagaggttaatctgaggcttcagcagtgctttaaatatcagctcattgagacagcctttgctgtgctggttcagtctgttctgcgcatatacagctcaaggatatgggataaaaccagcctggaatgtttgaaagtgttaacaggacacacaggctctgtcctctgtctgcagtatgatgagcgtgtcattgtaactggctcttcagattctacggtgagagtgtgggatgtgaacacgggtgaagttcttaacacattgatccaccacaatgaggctgtattgcacttacgcttcagcaatggactgatggtgacctgttccaaggaccgctccattgctgtgtgggacatggcttctgcgaccgacatcactttacgccgtgtcctggttggccaccgggctgccgtcaatgtagtagactttgacgacaagtacatcgtgtctgcctctggtgacaggaccatcaaaaacagagacaaagcagaggtggcttataccaacctggtctggagcacgagcacctgtgaatttgttcgtactctcaatgggcacaagcggggcattgcctgtctccagtacagggatcgcctggttgttagtggatcatcagataataccattaggctctgggatattgaatgtggtgcctgtttaagagtcctagagggacatgaagaattggtccgatgcatccggtttgataacaagaggattgtcagtggggcctatgnatggggttttctagtcttgaactactggctacgtggctaccaaatgcctaagggagttcgttcacagctgagttatgaagctggaattggttctagacgctgggtagatgcaaagcagcctaactcttcaagtaccgacatttctcacctctga

SEQ ID NO: 4919 - DNA, 2250 bp, Homo sapiens
  SIMILAR (1440)..(733): 1001254mologous to Homo sapiens F19434_2,accession number AC004654,Smith-Waterman Score=1249.
ttagctgcagctgaaagaggtgtctgctaaggcaatgccaccagagacttttactgtcatggatttggagctttccttgccagtggctgagttacgaacagagcaagcatagagcccgctatgctttgtagtaatttgggggataaagagcttttgtcctgatagctgaaacttcccattaattgtccaagaatactgtgccggtgggttagagtccgcagaacaggacaagtagaggacttctcctgaacggtaataggtgaatgaagggtaaattctggggaggtctggaccatagaggacattcagggtgactgggtaactgcggatgccaccatattggtcccttatttcacattgatagggtcctgtttcatttctcgtgacactgggtagaatgaggatcctgttttcaatgggtcgctttaccctgggactgaccgggaggctctgaccatttagccaccaaatgtaggtgtagttctcactcttaggttcacaggtgaagtttaagacatccttattctccctgggttttaagttgttgatggtgatgtagggcttgggcagcttcgcagggactatgatcctcttgattatgagatttgttccagcagtggctgagttatggatgaaacagacatagacccctctatatgttttagtgatttgggggataaagaacacttgtgctgattgctggaacttcccatcaatcagccaagaatgctggaggagattcagggtgaatgggtcactgcggctggcactcactgggttccgtatttcacattcatagggtcctgcagtgtactttgtgacacccaatagaaagagggtcctgttggtttcagacaactgcaacctgtgagacatagggaggctctgaccattcatccaccacaggtagcttgcgtccggagtctcaggatcacaggttaagctcacagcctccatggcctccctggggtttaatttgctgctggagatggagggcttgggagtctccagatataaggtgaaggtgaaatgtccagttactcctctattctcatcacctcccattatgatgtgtaaggtgtaggatcctgcgtcttcctgggtgacattctggatcagcagggatgcattggaatatattgtttctcgtccactgtatgcaggcccatatataattatttgaccgtctactacatatgatgtaatgtaatggtagaggtccctgatttgccctttgtaccagatgtagccagtaagattctggggcaaattgtggacaagtagaagaacatccttcccctcagaaactttggttggctgggcttcaatcgtgacttgggcagtcgtgggtgggttccagaagtttaaaagtgatgctgtgagcaggagccccttccaggtgatgcgctgtgtgcagggaggggctgagaggagccccatggtctctgctgtctgtgtgttctcctctgtggagatgagctttttgatggggttgtttgtttttttcttgtaaatttgtttgagttcattgtagattctggatattagccctttgtcagatgagtaggttgtgaaaattttctcccattttgtaggttgcctgttcactctgatggtagtttcttttgctgtgcagaagctctttagtttaattagatcccatttgtcaattttggcttttgttgccattgcttttggtgttttagacatgaagtccttgcccatgcctatgtcctgaatggtaatgcctaggttttcttctagggtttttatggttttaggtctaacatttaagtctttaatccatcttgaattgatttttgtataaggtgtaaggaagggatccagtttcagctttctacatatggctagccagttttcccagcaccatttattaaatagggaatcctttccccattgcttgtttttctcaggtttgtcaaagatcagatagttgtagatatgaggtgttatttctgaggggtctgttctattccattgatctatatctctgttttggtaccagtaccatgctgttttggttactgtagccttgtagtatagtttgaagtcaggtagtgtgatgcctccagctttgttcttttggcttaggattgacttggcgatgcaggctcttttttggttccatatgaactttaaagtagttctttccaattctgtgaagaaagtcattggtagcttgatgggtatggcattgaatctgtaaattaccttgggcagtatggccat

SEQ ID NO: 4920 - DNA, 439 bp, Homo sapiens
  SIMILAR (96)..(431): 881254mologous to Homo sapiens succinate dehydrogenase flavoprotein subunit,accession number L21936,Smith-Waterman Score= 533.
ttcccgggtcgacgatttcgtgggactgcgcggcggcgactacagacgtgtcgggggtccggggcctgtcgcggttgccaagcgctcggcgcctggcgctggcgctggccaaggcggtagaaaattatggcatgccgtttagcagaactgaagatgggaagatttatcagcgtgcatttggcggacacagcctcaagtttggaaagggcgggcaggcccatcggtgctgctgtgtggctgatcggaccggccactcaatattgcacaccttatacgggaggtctctgcgatatgataccagctgttttgtggagtattttgccttggatctcctgatggagagtggggagtgccgtggtgtcttcgcactgtgcatacaggacgggtccatccatcgcataagagcaaagaatactattgttgccacagggctactggc

SEQ ID NO: 4921 - DNA, 3087 bp, Homo sapiens
  SIMILAR (202)..(1308): 971254mologous to Homo sapiens F-box and WD-repeats protein beta-TRCP2 isoform B,accession number AB033280,Smith-Waterman Score =1911.
atggcagcgtctgcttggcttcaattatggcagaaggcgaaggggaagcgggcacttcgtgtggccggagcaggaggaagagagagtgctcatttaatcctgtcgccctgctctggcccacggctcctgggctggcctggccccgtggctgcttcctgtcatgcggggctgctgcctggcaccggcagagggtggagggctacagtattacagcgttttacctacccatgttcgaacacttcagttatggaagatcaaaatgaagatgagtccccaaagaaaaatactctttggcagataagtaatggaacatcatctgtgatcgtctccagaaagaggccatcagaaggaaactatcaaaaagaaaaagacttgtgtattaaatattttgaccagtggtctgaatcagatcaagtggaatttgtggaacatcttatttcacgaatgtgtcattatcagcatggacatattaactcttacctgaagcccatgttgcagcgggactttattaccgctttaccagagcaaggcttagatcacatagcagaaaacattctttcgtacctggatgccaggtctctgtgtgcagcagagctggtatgtaaagaatggcagcgagtgatctcagaaggaatgctttggaagaagctgattgaacgaatggtacgcactgatcccctatggaaaggactttcagaaagaagagggtgggatcagtacctgtttaaaaacagacccacagatggccctccaaattcattttataggtcattatacccaaagattatccaggatatagagactatagaatctaactggcggtgtggacgacacaacttgcagaggattcagtgccgctctgaaaatagtaaaggtgtctactgtttacagtacgatgatgaaaaaattatcagtggcctacgagataattctattaagatatgggataaaaccagcctggaatgtttgaaagtgttaacaggacacacaggctctgtcctctgtctgcagtatgatgagcgtgtcattgtaactggctcttcagattctacggtgagagtgtgggatgtgaacacgggtgaagttcttaacacattgatccaccacaatgaggctgtattgcacttacgcttcagcaatggactgatggtgacctgttccaaggaccgctccattgctgtgtgggacatggcttctgcgaccgacatcactttacgccgtgtcctggttggccaccgggctgccgtcaatgtagtagactttgacgacaagtacatcgtgtctgcctctggtgacaggaccatcaaaaacagagacaaagcagaggtggcttataccaacctgagaccaggtctcactttgtcacccaggcttgtgtttagcattttgaggaactgccaaactgttttccaaaggcgctgtaccattttacaatcctgccagtggtatatgagggtttcagcttgctcagaagaacctccttttcataaccagcactggatagcactcttatacctagccccacaaatcacgaagtgtgtagcatcaggctttgcattggatagctgggaagctaaacaactaggatttatatgcggcaacttactcccacagtcacaccaattggtctggagcacgagcacctgtgaatttgttcgtactctcaatgggcacaagcggggcattgcctgtctccagtacagggatcgcctggttgttagtggatcatcagataataccattaggctctgggatattgaatgtggtgcctgtttaagagtcctagagggacatgaagaattggtccgatgcatccggtttgataacaagaggattgtcagtggggcctatgatgggaaaattaaagtttgggacttgcaagctgctcttgaccctcgagccccagcaagcacattgtgtttgcgcacattggtgggttttctagtcttgaactactggctacgtggctaccaaatgcctaagggagttcgttcacagctgagttatgaagctggaattggttctagacgctgggtagatgcaaagcagcctaactcttcaactcagggcctttgcacgcactgcatgcatttccccagctatttgcacggctgcttcctcatcattcaggtctcagcccaatttcattctaaagcaggcttgcttccacatggtatccaggtggctgccagcagccccaagagcatgtcctatcctttgagtgtctctggtggagcaaaatctcttcccagcagccgcaagagcatgtcctatcctttgagcatctgtggagggcactcaggtgtggctgacaccatcactcacagatcaggacccaaactccgccaggaggctctgctcctccccatccaccccagctccttgctaagctttgacaagctgtgccgggttcacacgcctgtccctggagcctggggaggagccaacaccaacggaaccatttggtggggaacaggagaggaatggttctttagaggcaaacggggcagttacttgaagagaggtctcccaaggtcgcctgttgctattttggaaagaggtggacagatactggagggccactcttcaggccactgcccaatcttttcttgtcaatttgatgtcagcttgtgccaatcatccctgaagggccattctgacacagcaaagccccctaacgttttcttcctaatcctcctcaggagaaccatcactcggattatcatgaaacccgagcgtgtgcgcatgaggtgcgaccctttacaaccggcggaccatctcgtttctgcccagttctgtttgtttaaactctttgctggcaggaccccagcgcaggggcagagttccatggcgttcacaggcagatgttctggcctgttgcagggaccaacgttaaaagccggggcaggagagctggtggccggaatccaggccctgggggcggagggcacttcacggaggaaggagagggagttcagggagggagttcagggaggagagggattggggatgaaaacaacagctcactgtccttttgcaaatggaatttacaggccccatttcatgcatgagaacactgaggcttag

SEQ ID NO: 4922 - DNA, 265 bp, Homo sapiens
  SIMILAR (120)..(263): 891254mologous to Homo sapiens F-box and WD-repeats protein beta-TRCP2 isoform A,accession number AB033279,Smith-Waterman Score =212.
cctttgcaatatgccactttgcgtctgtcatgggctttcactacttagaggttaatctgaggcttcagcagtgctttaaatatcagctcattgagacagcctttgctgtgctggttcagtctgttctgcgcatatacagctcaaggatatgggataaaaccagcctggaatgtttgaaagtgttaacaggacacacaggctctgtcctctgtctgcagtatgatgagcgtgtcattgtaactggctcttcagattctacggtgag

SEQ ID NO: 4923 - DNA, 401 bp, Homo sapiens
  SIMILAR (283)..(399): 971254mologous to Xenopus laevis beta-transducin repeat containing protein-2,accession number U63921,Smith-Waterman Score= 204.
agaccaggtctcactttgtcacccaggcttgtgtttagcattttgaggaactgccaaactgttttccaaaggcgctgtaccattttacaatcctgccagtggtatatgagggtttcagcttgctcagaagaacctccttttcataaccagcactggatagcactcttatacctagccccacaaatcacgaagtgtgtagcatcaggctttgcattggatagctgggaagctaaacaactaggatttatatgcggcaacttactcccacagtcacaccaattggtctggagcacgagcacctgtgaatttgttcgtactctcaatgggcacaagcggggcattgcctgtctccagtacagggatcgcctggttgttagtggatcatcagataataccattag

SEQ ID NO: 4924 - DNA, 385 bp, Homo sapiens
  SIMILAR (260)..(382): 1001254mologous to Homo sapiens F-box and WD-repeats protein beta-TRCP2 isoform B,accession number AB033280,Smith-Waterman Score =213.
tttcgtgttcgctgctgcgcggggagagcgaggcggtttcgccggggccgtcatggagcccgactcggtgattgaggacaagaccatcgagctcatgttaccgaagtgcatgtttgggattttgttgaagaaagctggatacagtaaacggaaagaatcttggaagatgcttgactgctgtcttttctcagactagtctgaaagggaaaacccccattcattctggattggtggatctgaagtacaaaatattttccagaacacttcagttatggaagatcaaaatgaagatgagtccccaaagaaaaatactctttggcagataagtaatggaacatcatctgtgatcgtctccagaaagaggccatcagaaggaaactatcat

SEQ ID NO: 4925 - DNA, 1251 bp, Homo sapiens
  SIMILAR (664)..(1026): 851254mologous to Homo sapiens F-box and WD-repeats protein beta-TRCP2 isoform B,accession number AB033280,Smith-Waterman Score =544.
atggcgggctgcaggtcccgagccatgccccgcagggaggcagctaaggccggtgagaaatcgagcccagtgccggtgggcggcactgctctgagtacagggcctccacagccgctggccctggtgctaagcccctcattgcatggggccggcagggcctgccggctgctccgagtgcgggcccgccaagcccacgcacacctggagctccagctggcccggaagtgcccgcacagcccctgttcccgctcatgcctctccctccacacctccttgcaagctgagggagccagctccggccttggccagcccagaaaggggctcccacagtgcagcggtgggctgaagggctcctcaagtgctgccaaagtgggagcccaggcagaggaggtgccgagagcgagtgaggcctctgaggactgccagcatgctgtcacctctcactgggactacagttgctctctgatgttgctttctttcactctaaaggacttcctatggcgtttcttgaaaggcaaaactgttgtcacttccactgacagtgccataggtgtgggcatcacctgctacagcaaatccaggtccccaatccctgggctgcagaccagtaccagtctgtggactgctaggaaccgggccacatggcaggagccatgtggaactaacacttcagttctggaagatcaagatgaagataagtccccaaagaaaaatactccttggcagataagtaatggaacatcatttgtgatcatctccagaaagaggccatcagaaggaaactaccaaaaagaaaaagacttgtatattcaatattttaaccaggggtctgaatcagatcagttggaatttgtggaacatcttatttcacgaatgtgtcattatcaccatggacgtatcaactcttacctgaagcccatgttgcagcaggactttattactgctttacccgagcaaggcttagatcacatagcagaaaacattcttttgtacctggttaccaggtctctgtgtgcagcagagctggatgagcgtgtcattgtaactggctcttcggattctacggtgagagtgtgggaagtgaacacgggtgaagttcttaacacattaatccaccacaatgaggatgtactgcacttacgcttcagcagtggactgatggtgacctgttccaaggaccgctccattgctgtgtgggacatggcttctgcgaccgatatcactttacgtggtgtcctggttgtccactga

SEQ ID NO: 4926 - DNA, 4311 bp, Homo sapiens
  SIMILAR (1624)..(1653): 801254mologous to Homo sapiens F-box and WD-repeats protein beta-TRCP2 isoform C,accession number AB033281,Smith-Waterman Score =41.
  misc_feature (1)...(4311): n = a,t,c or g
gcgaggcggggccgccggggccgccatggagcccgactcggtgattgaggacaagaccatcgagctcatgtgttctgtgccaaggtctttgtggctaggctgcgccaacctggtagagagcatgtgcgcactgagttgcctgcagagcatgcccagtgtcagatgtctccagataagtaatggaacatcatctgtgatcgtctccagaaagaggccatcagaaggaaactatcaaaaagaaaaagacttgtgtattaaatattttgaccagtggtctgaatcagatcaagtggaatttgtggaacatcttatttcacgaatgtgtcattatcagcatggacatattaactcttacctgaagcccatgttgcagcgggactttattaccgctttaccagagcaaggcttagatcacatagcagaaaacattctttcgtacctggatgccaggtctctgtgtgcagcagagctggtatgtaaagaatggcagcgagtgatctcagaaggaatgctttggaagaagctgattgaacgaatggtacgcactgatcccctatggaaaggactttcagaaagaagagggtgggatcagtacctgtttaaaaacagacccacagatggccctccaaattcattttataggtcattatacccaaagattatccaggatatagagactatagaatctaactggcggtgtggacgacacaacttgcagaggattcagtgccgctctgaaaatagtaaaggtgtctactgtttacagtacgatgatgaaaaaattatcagtggcctacgagataattctattaagatatgggataaaaccagcctggaatgtttgaaagtgttaacaggacacacaggctctgtcctctgtctgcagtatgatgagcgtgtcattgtaactggctcttcagattctacggtgagagtgtgggatgtgaacacgggtgaagttcttaacacattgatccaccacaatgaggctgtattgcacttacgcttcagcaatggactgatggtgacctgttccaaggaccgctccattgctgtgtgggacatggcttctgcgaccgacatcactttacgccgtgtcctggttggccaccgggctgccgtcaatgtagtagactttgacgacaagtacatcgtgtctgcctctggtgacaggaccatcaaagtctggagcacgagcacctgtgaatttgttcgtactctcaatgggcacaagcggggcattgcctgtctccagtacagggatcgcctggttgttagtggatcatcagataataccattaggctctgggatattgaatgtggtgcctgtttaagagtcctagagggacatgaagaattggtccgatgcatccggtttgataacaagaggattgtcagtggggcctatgatgggaaaattaaagtttgggacttgcaagctgctcttgaccctcgagccccagcaagcacattgtgtttgcgcacattggtggaacattcatggacgtgtgtttcggctccagtttgatgagtttcagatcatcagcagctcccatgatgacactattttgatttgggatttcttaaatgtgcctcccagtgcccagaatgagacccattccccctccgggaacatacacttacatctctagataacagtctgcactttcactcgtttccgggttttcctagtcttgaactactgggctacgtgggctaccaaatgcctaaggggagtttcgtttcacagcttgagttatgaagctgggattgggtctaggacggtggggtaggatgcaaagcaggcctaaactcttcaagtcccgacattttctcacctctgatttccagctctactttgagaaggagaccttagcttcactgacttgaaagtaggcacaggaggcccttttccttccttcattaggtggaaaaatctaatggtttcaaatgtaaactgatcatagaaaaggaacatagaatctgttttacagaagtaaatcgaccgtcaggagaagacttggcctctaatttatattgctttgcactttggtttgatattaagaaacagcattcttcttcagtgaaattttggggtgccaaacacctacccagaatgtccagggctttcattttcaaaagttagcattctccttttgaccgtccaagtcattatgaattctgacttgttgtattaggaacatgttggacagtggaaaattttctctggattgttttagtaatatttttgggattatacttcctttctgtaccaatttcttttaatttaaagaactataagtcagttatattatctaccaacaggtaatatagctctttcttttattaactgttctctgtcccccaaccatctcctgatatttggtagagtaacacctttatacgtgtgcttgcctcctaatttaaaatactgtattcgcatgtagatataatgtacataacagtttaacctcaaagttgctgggagtcagggccccctgtgcttgagacactaatacagagtgtgttcgcacttagccatgggctggggctcaagaacctgatacctgggttgatgtggattacctagaacccttcctgcagtattcatacagtgtttttattttgttgttgtcattacgtgtgtgtggtttgtgtgtgtttttaatgagaatcttgttttaaaatgtaatttctaaggtttaacaccaaaatgttttatttgttgtgggagtatatattattacaataggaggaggtaccctaaacattttttgttcttattcctttttctcataagtactcctgagtacaagtgggtcacctcccatagtattcatttgggcttcgctgttcaaaaatcattattctgtgccagtcgtgggccccgggaagggggnaaataaggaaggccctgtttgacggggctgtcttggctctggaattcatgcatcctgcgccttgacaaggttctggcagggcctgctggtgtgccggaccctgcagggcaggtcaggctggttcaaaggcccatgctgaggggtgggtgctctgaaacggagtgaagcctcaagcccatgaatgccaccccagtcatctctggtgtcagctgctggtgtgggcccataaggtaatcaaagctcccaagtcctccctacgacacagcccaaatgtgtaaatggcactgttgccctgacagtgcatggaaaggacgttggcatccaattggcactccttctcccttattcaatattaggtttgatttgcccttcgccattgtttccaaagatcaaggaatgtcaataacattttaaaggaccaataaacagcctcctataaagtaaacctcttcccgtggaagcacactctactactaaagggaaggcccctgggctctgatttgtcctttgcattgagaacggtgtggggatcagtgtgtgtgtatgtgatttgtttattgagttggctttgcttttttagtttttcttttaaaaataaaatccttccttcccatgttactaaattaatttatgtttttgagagggtgagtctcaaagtgtaaacaataaacctccattcataaggaggatgttgtaagcttgatggtggttgtgaaagtgatttagctttgaccacttttcatcctacagcttcaatatcaaactggttaggaaagccccagggggaagggagggggcaggggaggaggcaattctgaatgaatgaatggattttttgttgttttttgcatgtttwaatatagaagttcccctcgtttccttkgggrgaatgaatggccytttgaatatgcaagcaaacctttgaaattgtgcctactaaattatragcaggggacctttggcacccaaggagttctgacctttctgggaattataatagtaaattccccagcccataactctgggactttattttgctaacccataactggaggcaaatgtaaattactgctatattaatgttttaaagcactgggatagtctaattctaacttgtaaattaattatgtttgccaattatctgtttgaaataaatttgtgtctgaaacagctattggaactggttaaattgtaccagatattattccatgacagctttgtactgtggaatgtgcttaataaaaaaacaaaaaagtttgacttttgtccagtaaattgctaagtaatgtcaataaatcgagtatgggtattatgcagtgcacctaatctggcttcatgcaattgttacttcagctactgattcaaagccaatactcttaataaagtgttgcaatactctgaaaaaaaaaaa

SEQ ID NO: 4927 - DNA, 328 bp, Homo sapiens
  misc_feature (1)...(328): n = a,t,c or g
aatttcaaaagatttcataaaactattgcaatcggaaacagcatcgtactggcctaaaacagacacatcaaccaaagaaacaagaaagcccagtaataaacccaactacttatggtcaactgattgttgacaaaggtgccaagaacacacaatgggggaaagacaactacttcaacnnnnnnnnnnnnnnnnnnnnnnnnnnnnnnnnnnnnnnnnnnnnnnnnnnnnnnnnnnnnnnnnnnnnnnnnnnnnnnnnnnnnnnnnnnnnnnnnnnnnnnnnnnnnnnnnnnnnnnnntagaacttttagaagaaaacagagagaaaaat

SEQ ID NO: 4928 - DNA, 415 bp, Homo sapiens
  SIMILAR (220)..(351): 521254mologous to Oryctolagus cuniculus rsc gene product,accession number U82163,Smith-Waterman Score=110.
  misc_feature (1)...(415): n = a,t,c or g
cgctgggccagtggtatgagcacggagccaggtggctcccgccactccctggggatccaagtgcggggtggctggggtgtaactgggggagaggaggagagcctcactgtccctgtcgctgacacctggcaggcggggagctttaaggtggccacccaggagaggaacccccagagagtccagatgaggctgcggaggcagaagaagggcaacaccaacaagaggagcaaggaggtccgagttctgcaggaaatgcagctgctccaagtggctgccatgaattacaggcttcggcctcttgagaaatttggcacctatttcacaagaatggagcagctcagtgacaaagagaggtgagggcctagcccatgggctgagggtgggagaaggctcctcattnnttttttttaacaag

SEQ ID NO: 4929 - DNA, 763 bp, Homo sapiens
  SIMILAR (144)..(491): 441254mologous to Mus musculus guanine nucleotide dissociation stimulator,accession number L07924,Smith-Waterman Score=201.
ctgggccagtggtatgagcacggtgccaggtggctcccgccactccctggggatccaagtgcggggtggctggggtgtaactgggggagaggaggagagcctcactgtccctgtcgctgacacctggcaggcggagaggctttaaggtggccacccaggagaggaacccccagagagcccagatgaggctgccggaggcagaagaagggtgtggtccccttctggggggattttctgactgagttacagaggggctggattcggccatcccgggacgaccctggatggcaacaccaaacaagaggagcaaggaggtccgagttctgcaggaaatgcagctgctccaagtggctgccatgaattacaggcttcggcctcttgagaaatttgtcacctatttcacaagaatggagcagctcagtgacaaagagagctacaagctgtcctgccagctggagcccgaaaaccagtaggctggcaacatcctgcagtggatgggaaacccaccgggatgctggccagaacaccggctctgcgccatccctcacccagaccgtagacaccagggaaccacatctaggaggctggcagctcagctgcatcttgccctggatcctcatcaccaactgctcctgctggccaggatcaggccatgggacttttgtgagtcgggcgggagaccattttatgtaatattttctttagtgtataagtaagggttttttcttaactttcgttaaaataaaattttaaaaaactattc

SEQ ID NO: 4930 - DNA, 450 bp, Homo sapiens
  SIMILAR (3)..(335): 1001254mologous to Homo sapiens MADSO1 protein,accession number AJ302079,Smith-Waterman Score=592.
actatggagggaaagaatactgggatacccgtcgcagcatggtgtttgccaggcacctgcgggaggtgggagacgagttcaggagcagacatctcaactccacggacgacgcagacaggatccccttccaggaggactggatgaagatgaaggtcaagctgggctccgcgctagggggcccctacctgggagtccacctgagaagaaaagatttcatctggggtcacagacaggatgtacccagtctggaaggggccgtgaggaagatccgcagcctcatgaagacccaccggctggacaaggtgtttgtggccacagatgccgtcagaaaggaaacagtgcctttttcatcagttgcattttccaggctgagagctgtataaaacattttggactgtgaccatgtaccttcctttttaagaaaaataaactgctttatggaagttaaaa

SEQ ID NO: 4931 - DNA, 691 bp, Homo sapiens
  SIMILAR (452)..(493): 1001254mologous to Homo sapiens succinate dehydrogenase flavoprotein subunit,accession number L21936,Smith-Waterman Score= 73.
atggaccaggacagcgccagcactaagacgtgccctggaactcacaggaagagcggaccaagaagccgggaacagcacggggcactgggagctgcaaacgcccacgatactgtgagagacggagaaaggtatgacaggtggagcggaccaagaagacgggaacagcacggcgcactgggagctgcaaatgcccccgataccgtaagagatggagaaaggcgcagtctgcgcagggactggcgggactgcgcggaggcgactgcagacgtatcgggggtccggagcctgtcgcggctgctaagcgctcggcgcctggcgctggcgctggccaaggcttggccaacagtgttgcaaacaggaacccgaggtgttcacttcactgttgatgggaacaagagggcatctgctaaagtttcagattccatttctgctcagtatccagtagtggatccatgaatttgatgcagtggtggtaggcgctggaggggcaggctttgcgagctgcatttggcctttccgaggcagagtttgatacagcatgtgttaccaagctgtttcctaccaggtcacacactgttgcagcgcagctagaaaattatggcatgccgtttagcagaactgaagatgggaagatttatcagcgtgcatttggtggacagagcctcaagtttggaaagggcaggcaggccca

SEQ ID NO: 4932 - DNA, 472 bp, Homo sapiens
  SIMILAR (1)..(105): 1001254mologous to Homo sapiens MADSO1 protein,accession number AJ302079,Smith-Waterman Score=196.
gtcctgcaaagttacgcagaggggtggaaagaagggacctgggaagagaaggtggacgagcggccgtgtattgatcagctcctgtactcccaggacaagcacgagtcctcactgagcagccactttccacatctgctagaggaacagtgacatggacacctgtgacagagagaggacagttaggagggacagacagctcttcctttcggagcctggctagtctaggacatcaccttgctgtgtcttctcaagcttttaaaattgaccctgaacgtgtgacagggtcctatggtgttactcaaagctgtgcagggtaaatgatgacatatttattctttttccatttgttctagaaacagtgcctttttcatcagttgcattttccaggctgagagctgtataaaacattttggactgtgaccatgtaccttcctttttaagaaaaataaactgctttatggaaaaaaaaaaa

SEQ ID NO: 4933 - DNA, 3062 bp, Homo sapiens
  SIMILAR (12)..(1151): 1001254mologous to Homo sapiens MADSO1 protein,accession number AJ302079,Smith-Waterman Score=2039.
cgcccggggccatggcgacactcagcttcgtcttcctgctgctgggggcagtgtcctggcctccggcttctgcctccggccaggagttctggcccggacaatcggcggccgatattctgtcgggggcggcttcccgcagacggtatcttctgtatgacgtcaaccccccggaaggcttcaacctgcgcagggatgtctatatccgaatcgcctctctcctgaagactctgctgaagacggaggagtgggtgcttgtcctgcctccatggggccgcctctatcactggcagagtcctgacatccaccaggtccggattccctggtctgagttttttgatcttccaagtctcaataaaaacatccccgtcatcgagtatgagcagttcatcgcagaatctggtgggccctttattgaccaggtttacgtcctgcaaagttacgcagaggggtggaaagaagggacctgggaagagaaggtggacgagcggccgtgtattgatcagctcctgtactcccaggacaagcacgagtactacagaggatggttttggggttatgaggagaccaggggtctaaacgtctcctgtctgtccgtccagggctcagcctccatcgtggcgcccctgctgctgagaaacacatcagcccggtccgtgatgttagacagagccgagaacctacttcacgaccactatggagggaaagaatactgggatacccgtcgcagcatggtgtttgccaggcacctgcgggaggtgggagacgagttcaggagcagacatctcaactccacggacgacgcagacaggatccccttccaggaggactggatgaagatgaaggtcaagctgggctccgcgctagggggcccctacctgggagtccacctgagaagaaaagatttcatctggggtcacagacaggatgtacccagtctggaaggggccgtgaggaagatccgcagcctcatgaagacccaccggctggacaaggtgtttgtggccacagatgccgtcagaaaggaatatgaagagctaaaaaagctgttacccgagatggtgaggtttgaacccacgtgggaggagctggagctctacaaggacggaggcgttgcgattattgaccagtggatctgcgcacacgccagttcatgaagtgccgctggagagccagagaccagctgcgcaggagccggaggaacgggcaggccgctgacctgaggtctggagaaacccctggagaagggtgtccccaccagcccatacagcgtgtgtgtggagggggccttgacctccgtgatgtctactgtgcctcaggataaggacccgccatgccctggctagacagtgtgtggttttttattggcacctcagtctcaacattttcttttcggattcatgaggaaagagaaatcctggggttggaccccaagacgacgtacaacaggttctgcggagaccaagagaaggcgtgtgagcaacccacccactggaagatcacctactgaggaggatcctccagggccgctccccggacccgacaggcgcgggtggatgcaggttctgtcgccgtggagtcaccgtctactgccagccgggagctgggcggacaggaccgtccctcgcagggtcccaggcccagaagaggccccacgcctctagagctgggctccgtcctcggcgttgccagccgccatggctgatgaagaggctccgctgctctcgggggtggcggttgttttcaggcagcgtctgtgaacccacagctcggttgccagcagtgcccgcgtggtgacccagaagcaggagtgtttgtcaggctcccgctctggcctttccagccacctttcatgtcttcatattttaagtgcattgaggatagatgcaggcgggtgagctgccctccgtcaggtggacccgggctgacatttccctgggagctggtgcaaggagaagcgtcattttaaatgtctgcagagcgaccaggggcctcatgaatctctccgttgccctccgcgcagcaggaggctgcctgtgtgtttcctcctgggatgcgtgcaaggcagacctggtgctgcaaaggaaagggcctgaggcctcagggagccccgtggagggatgacagttcaggccctactgctggcacgtcagagcactgggaagtttttcagtgacgtctctggggcactcagtggattgtctgtaggaaacttgcagctctgctcctcacaccaggcccggctggccacccaccctcgcccccactggccacccctccctcgccccgactgccccgccccaccctcaccccgactgccccgccctcgcccggctggccgtccctgccctcgccccggctggcaggtgcacatggggcctccaggtctgccattcgctattgagaactagaaatgaggaaggacagttacgctaactccaaaaggctgtctaggatgagctgctttatcagggagctccttgtacccattttacagaaatcatttttaggtctttgtgccaccaccacgaggggcatctgcaaagagggcaacgctagacacagaatccgtggaaggtgcagcagtgcctcaggggtcctcagggtcagggagcccccctcaccctcttggcccgttaccctttgtgactttccaccatggtgtcgtgtgaccctcagtcaggttggtgggggctgagtcctcactgagcagccactttccacatctgctagaggaacagtgacatggacacctgtgacagagagaggacagttaggagggacagacagctcttcctttcggagcctggctagtctaggacatcaccttgctgtgtcttctcaagcttttaaaattgaccctgaacgtgtgacagggtcctatggtgttactcaaagctgtgcagggtaaatgatgacatatttattctttttccatttgttctagaaacagtgcctttttcatcagttgcattttccaggctgagagctgtataaaacattttggactgtgaccatgtaccttcctttttaagaaaaataaactgctttatggaaaaaaaaaa

SEQ ID NO: 4934 - DNA, 350 bp, Homo sapiens
ttttttttttttttttttttttttgtagcccagaggtcctttattttttttttttaacacctattatgccatgaattcatagggaataggttccagcagctcagggagaactgagaggagcagctgagtgaaatgagttccacagttacatggaaccaacacggccgtcccccgagcacccaccagccggccgcccacttgctggcacccctcgctcaggtgccctcgacatcggcgccctgaggggctctgcctggtgctgcagccccatccacaccccacagtcagcagccgccacgctcctgtcccaccgcatgtccccctgggagcccgccgctccaacatcagaa

SEQ ID NO: 4935 - DNA, 1971 bp, Homo sapiens
  SIMILAR (1)..(381): 1001254mologous to Homo sapiens MADSO1 protein,accession number AJ302080,Smith-Waterman Score=677.
atggcgacactcagcttcgtcttcctgctgctgggggcagtgtcctggcctccggcttctgcctccggccaggagttctggcccggacaatcggcggccgatattctgtcgggggcggcttcccgcagacggtatcttctgtatgacgtcaaccccccggaaggcttcaacctgcgcagggatgtctatatccgaatcgcctctctcctgaagactctgctgaagacggaggagtgggtgcttgtcctgcctccatggggccgcctctatcactggcagagtcctgacatccaccaggtccggattccctggtctgagttttttgatcttccaagtctcaataaaaacatccccgtcatcgagtatgagcagttcatcgcaggagcacagtccctttcccacgctgcagtgagcttcccaaaatgtttctcggaaatggacctgaagtggatgagctttgtgccccctcagttagagccgcccttacaccctaagaaagcggccacccctgggtgttatagtgacaggactcggctccctgtgcgaaaggctgttttacgttcaggaagacgcactgcgtgtggagtatgcttcgtggtgtctcagtgcagcgccagggataaagaacttcacctgcgcgatgctccctcccgctttgttcctgccccagaatttcacctgcgcggtgctccctcccgctttgttcctgccccagaacttcacctgcgcggtgctccctcccgctttattcctgctgcctttgagcagatcttaattgctgacctcttgggcgtcacagtgccaccttcttggtgcgggtcgggccaatctggtgggccctttattgaccaggtttacgtcctgcaaagttacgcagaggggtggaaagaagggacctgggaagagaaggtggacgagcggccgtgtattgatcagctcctgtactcccaggacaagcacgagtactacaggtgcctgctgaggctgctccccctgccgcagggatggaggtcttgtcagtcccaagtgtcgattgccattaaaggctctgacactaccaggcctcctgtggaaaagctgtcagttaacagcctccatgtgtccagtgccagggcagctggctctaaagcatggcagggctcagcctccatcgtggcgcccctgctgctgagaaacacatcagcccgctttgaaaggtgggactattctctgcagcgggtcttttccgttggcgttgatttccgcattgatggggtgactttccatagccacccctggttctgtgacaggcctgctgacgtgttcaccagggcagcagcttgtaaagccggaacctgcctgcaggagacacagtccctgctcacgtgggactttgtgcagacccgtcgcagcatggtgtttgccaggcacctgcgggaggtgggagacgagttcaggagcagacatctcaactccacggacgacgcagacaggatccccttccaggaggactggatgaagatgaaggtcaagctgggctccgcgcttagggggcccctacctgggagtccacctgagaagaaaagatttcatctggggtcacagacaggatgtacccagtctggaaggggccgtgaggaagatccgcagcctcatgaagacccaccggctggacaaggtgtttgtggccacagatgccgtcagaaaggaatatgaagagctaaaaaagctgttacccgagatggtgaggtttgaacccacgtgggaggagctggagctctacaaggacggaaggcgttgcgattattgaccagtggatctgcgcacacgccaggttttttattggcacctcagtctcaacattttctttttcggattcatgagggaaagagaaattcctggggttggaccccaagacggacgtacaacaggttctgcggagaccaagagaaggcgtgtgagcaacccacccactggaagatcacctactga

SEQ ID NO: 4936 - DNA, 4850 bp, Homo sapiens
  SIMILAR (298)..(1284): 1001254mologous to Homo sapiens MADSO1 protein,accession number AJ302080,Smith-Waterman Score=1777.
cgcccggggccatggcgacactcagcttcgtcttcctgctgctgggggcagtgtcctggcctccggcttctgcctccggccaggagttctggcccggacaatcggcggccgatattctgtcgggggcggcttcccgcagacggtatcttctgtatgacgtcaaccccccggaaggcttcaacctgcgcagggatgtctatatccgaatcgcctctctcctgaagactctgctgaagacggaggagtgggtgcttgtcctgcctccatggggccgcctctatcactggcagagtccgtgacatccaccaggtccggattccctggtctgagttttttgatcttccaagtctcaataaaaacatccccgtcatcgagtatgagcagttcatcgcagaatctggtgggccctttattgaccaggtttacgtcctgcaaagttacgcagaggggtggaaagaagggacctgggaagagaaggtggacgagcggccgtgtattgatcagctcctgtactcccaggacaagcacgagtactacagaggatggttttggggttatgaggagaccaggggtctaaacgtctcctgtctgtccgtccagggctcagcctccatcgtggcgcccctgctgctgagaaacacatcagcccggtccgtgatgttagacagagccgagaacctacttcacgaccactatggagggaaagaatactgggatacccgtcgcagcatggtgtttgccaggcacctgcgggaggtgggagacgagttcaggagcagacatctcaactccacggacgacgcagacaggatccccttccaggaggactggatgaagatgaaggtcaagctgggctccgcgctagggggcccctacctgggagtccacctgagaagaaaagatttcatctggggtcacagacaggatgtacccagtctggaaggggccgtgaggaagatccgcagcctcatgaagacccaccggctggacaaggtgtttgtggccacagatgccgtcagaaaggaatatgaagagctaaaaaagctgttacccgagatggtgaggtttgaacccacgtgggaggagctggagctctacaaggacggaggcgttgcgattattgaccagtggatctgcgcacacgccaggtgcctgcccacgtcactgtcggccgagagcgggtcgggtggctttcaaaggttcttctgtcccaagtactcggtgtcagagcagatggtcgcctgtgttcacagtggtcatttccatactgtttgcctcctcgtctgagtctcctgtagcatctggttcagtgtttccctgggctgaagttaattgttcatcttgcccctttagttctcatgcacagaattcctccatagcaggctgttggcatagctggcctcgtctcagaacctcttcttgtgtcgcattttcccatcattcccggtttctgcccctgtctgccccctgccctgagagttgcccgtgccctggacttgggcatgtccttgttgctgtgttgttgagcatccgtgagcgtccccgaggccgggagcgtgggccctcgtgtgatcattctcgtggggctgccatgagcgtccccaaggctgggagcatgggccctcgtgtgatcgttcttgtggggctgccgtgagcgtccccgaggccgggagcgtgggccctcgtgtgatcattctcgtggggctgccgtgagcgtcccagaggccgggagcgtgggccctgcgtgcagtcattcctctggggttgctgtgggaggtacgcctgggcctctgttcctccaaagacctgcctgcccatctgcataggagatgaaggctggggttagggtgaaacggtttgagttaaatggaaaatgaaagtagagggaatgatcttccccgtggttagcactgtgcacacgcgtgcgtctctgtgggttagtctgtctctctcctgcccgaggaatgctgagcgccctgagccggtgcctcttcacacatctgctatttcctgtggtgttctgggcatggtgtgtaagacccacagaggctccgggtgatgctgtctgctgggtgtgggtccctttccctgttaagcagacaggatgcagcgctgacttcttaggtcagggcggaggtgtgcaggagcccagtcacgagctcacccctgcttctcaggtgtggccttgggattttgactgcgaccttggcggtgctgtctccgcagcccaggaagcctgctgtggggaggcttcgcactgagctctcagcctcctgccctcagctgcgcgaagcgctcggcccagctcactgaagctgccctgcctccgggccggcgcggcctgctctggcaggcccctgtgtgtggggtggtgagggtctccccaccagtgctgcaccccgcagcagcatacaggcctgtgtggcctgctggccctgtggctctgtgtacagcgctgtgcatgttacatttgctctggaaacatctctggggtttgcttgttcacgaagttcatgaagtgccgctggagagccagagaccagctgcgcaggagccggaggaacgggcaggccgctgacctgaggtctggagaaacccctggagaagggtgtccccaccagcccatacagcgtgtgtgtggagggggccttgacctccgtgatgtctactgtgcctcaggataaggacccgccatgccctggctagacagtgtgtggttagtaggaatctctcattgttcaccatgtgacccccaggaggtattcgacctgcactggcgtgcctggcctgggatttggtgacggagaggagggctcccagggggacatgcggtgggacaggagcgtggcggctgctgactgtggggtgtggatggggctgcagcaccaggcagagcccctcagggcgccgatgtcgagggcacctgagcgaggggtgccagcaagggggcggccggctggtgggtgctcgggggacggccgtgttggttccatgtaactgtggaactcatttcactcagctgctcctctcagttctccctgactctggaacctctgtgaccccagttctccctgactctggaacctctgtgatcctttgcaggtttttttattggcacctcagtctcaacattttcttttcggattcatgaggaaagagaaatcctggggttggaccccaagacgacgtacaacaggttctgcggagaccaagagaaggcgtgtgagcaacccacccactggaagatcacctactgaggaggatcctccagggccgctccccggacccgacaggcgcgggtggatgcaggttctgtcgccgtggagtcaccgtctactgccagccgggagctgggcggaacaggaccgtccctcgcagggttcccagggcccagaagaggccccacgcctctagagctgggctccgtcctcggcgttgccagccgccatggctgatgaagaggctccgctgctctcgggggtggcggttgttttcaggcagcgtctgtgaacccacagctcggttgccagcagtgcccgcgtggtgacccagaagcaggagtgtttgtcaggctcccgctctggcctttccagccacctttcatgtcttcatattttaagtgcattgaggatagatgcaggcgggtgagctgccctccgtcaggtggacccgggctgacatttccctgggagctggtgcaaggagaagcgtcattttaaatgtctgcagagcgaccaggggcctcatgaatctctccgttgccctccgcgcagcaggaggctgcctgtgtgtttcctcctgggatgcgtgcaaggcagacctggtgctgcaaaggaaagggcctgaggcctcagggagccccgtggagggatgacagttcaggccctactgctggcacgtcagagcactgggaagtttttcagtgacgtctctggggcactcagtggattgtctgtaggaaacttgcagctctgctcctcacaccaggcccggctggccacccaccctcgcccccactggccacccctccctcgccccgactgccccgccccaccctcaccccgactgccccgcccatcgcccggctggccgtccctgccctcgccccggctggcaggtgcacatggggcctccaggtctgccattcgctattgagaactagaaatgaggaaggacagttacgctaactccaaaaggctgtctaggatgagctgctttatcagggagctccttgtacccattttacagaaatcatttttaggtctttgtgccaccaccacgaggggcatctgcaaagagggcaacgctagacacagaatccgtggaaggtgcagcagtgcctcaggggtcctcagggtcagggaacccccctccaccctcttggccccgttacccttggtgactttccaccatggtgtccgtgtgacccctcagtccaggttggtgggggctgagtccttcattgagcagcccactttccacatctgctagaaggaacagttgacattggacaccttgtgacagagagagggacagttagtgaggagggacagacagctccttctttcggagccctgggctagtcctaggacatcaccttgctgtgtcttctcaagcttttaaaaattgaccctgaacgtgtgacagggtcctatggtgttactcaaagctgtgcagggtaaatgatgacatatttattctttttccatttgttctagaaacagtgcctttttcatcagttgccattttccaggctgaggagctgtattaaaacattttgggactgtgaccatgtaccttcctttttaagaaaaataaactgctttatggtaaaaaaaaaaaaaaaaaaa

SEQ ID NO: 4937 - DNA, 393 bp, Homo sapiens
  misc_feature (1)...(393): n = a,t,c or g
tcttattcatctggaaaggggnnnntaaatgtcatcataattctaatttatctttagtaaaaactcaccatttttgtaagtatttgcagcttctaagccctaacacatgtaaaaggtaaacatagccagaaggtgaaatacacagttctttaaaaatttaaggatgcnnnnnnnnnnnnnnnnnnnnnnnnnnnnnnnnnnnnnnnnnnnnnnnnnnnnnnnnnnnnnnnnnnnnnnnnnnnnnnnnnnnnnnnnnnnnnnnnnnnnnnnnnnnnnnnnnnnnnnnnnnnnnnnnnnnnnnnnnnnnnnnnnnnnnnnnnnnnnnnnnnnnnnnnnnnnnnnnnnnnnnnnnnnnnnnnnnnnnnnnnnnnnnnnnnnnnnnnnnnnnnnctg

SEQ ID NO: 4938 - DNA, 397 bp, Homo sapiens
  misc_feature (1)...(397): n = a,t,c or g
tgtcctttggacataagatttaccagctttgtgtnnnnnnnnnnnnnnnnnnnnnnnnnnnnnnnnnnnnnnnnnnnnnnnnnnnnnnnnnnnnnnnnnnnnnnnnnnnnnnnnnnnnnnnnnnnnnnnnnnnnnnnnnnnnnnnnnnnnnnnnnnnnnnnnnnnnnnnnnnnnnnnnnnnnngtcnnnnnnnnnnnnnnnnnnnnnnnnnnnnnnnnnnnnnnnnnnnnnnnnnnnnnnnnnnnnnnnnnnnnnnnnnnnnnnnnnnnnnncccctaataaattaatttaaaaagccccccaatctgtggtattttattatggcagccctagcaagctaatacagtggtttgagaggctgggagggttgaggggaagataaacttttaaaaagctc

SEQ ID NO: 4939 - DNA, 2978 bp, Homo sapiens
  SIMILAR (130)..(222): 671254mologous to Homo sapiens Human secreted protein sequence encoded by gene 112 SEQ ID NO:282,accession number AAB56188,Smith-Waterman Score=118.
  misc_feature (1)...(2978): n = a,t,c or g
tagatagatagatagatagataggtagatagatagcaaacacagtgacccaacctcatggcgtttcactcagacttttatcttgactctgagagactcaagattcaacttaaaaatggcatccttaattctttttttttatttttaagacagcatctcactctgttgtccaggctggagtgcagtggcgcagtctcagctcaatgcaacctccacctcctgggctcaaacaattctcgcacctcagcctcctgggtagctggattaaaggccacactgccacacccatctaatttttgtatttttagtagagacggggtttcaccatgttggctaggctggtctcaaactcctggcctccgacctcagccctccccaaagtgcctgggattaacagggtgtgaagccacctcgccctggccagcatcccttaaatttttaaagaactgtgtatttcaccttcctggctatgtttaccttttacatgtgttagggcctagaagctgcaaatacttacaaaaatggtgaaatcttactaaagataaattagaattatgatgaccattatgtggaacattccagatgaataagactgttcatctaagaattgagtttaaaaatgagggcttctgaatcaggccctcctagggatacctattgatgtgcaaaagcttctaaaaagatttcaaaaatgtttgtctctttaaaagagctcacgtagaaggcaaatgaaaagtttaagcaactagtttataagaaaattgaatctgccaatcttttcacttagttactgttttactccaaaggcaaaaagaaagctaggtaatatttataaaaattaggcccttgggtgaagcagatttgcattttcagaactatccatctgcatccagaaataggaaaccctttgtctgctctatttgctaatgggctctgccctgaactcagtaatctagttaagaaacagaagctaagttgaaaagaccgcctattgaattaaatcagtctccaaaatttgcgtttctggtatttagccagttattttgaaactctttgtaaaaacgtgtatctataaaggaaaatcagtagaaattcttacaataggtgagagcattagtccaaataaactcaccttcaaccattttgtctgaactgggcttcttagcatcaactttctgtcttggcaaataacaatatttaggcctgaaatgtaagttctctgcctttgagatgtaaattttctaccttgtgttacctaggaaccatccctttcaaaatgcaattcagggtagaaaatttttaaatggttattttaaaaagggatgaatagtggactgtgatgggtttaaaacaaagatttaatctactaatgattggatggatcagaggaactcattgctggtcccctaacattacaaagctcaaaaccagtcagctcaatttactccaatctggaaaaatttttaaagccagaaggcagagattccaatgggcagcctacactagacaatcacttagggcaataatcaagcaggtcagtccagaaaagcgcaaggtccccagtctcgatccccctgttgggataggtataattagcaaattcatattttaatgaccagaacccagagattgctgcctcacggtatgttctacctctaattttcccaaacctttaagaatgtcaaagaataaaatctcaacaaattatgtaaagatctaattgggcttttattagcgattcatgaactcgggtagcattcctgtctacaaaataaaacagaagtcttgtcaggtatgatagattggtctgcatttgtaaagcagcactatcatgaacaaggaaacatcatagtagacacagcagattggttaacatcaggttacttcaggttacgttcccttgtgtgggattaaagcagaggggggcttcctcatcataatcacgcttgctcacggttgactgggactccctttgatcagttgctgtggaatctcctggacttgttggaaactgtccctatttttaaggttcactttggattacatggggctccattcctggggatgggagagggtgaggatcttgggagantttccccccccatttccacataaatgtatttgttaaagttttttgttagaaggggcctggttaaatggttgggccctgggctaagtcccttcccatctctgatcctctgcttcctaacttgtaaaatacagattaaatgctcctaacattatggaatctaagggaatgtcaggattagctaaattgcttaatggcacaacaatattaggagtggaagcttgagaagcaaaattgttacactgagcaagtatttttaactggattgaaatgaaagataagagctttttaaaagtttatcttcccctcaaccctcccagcctctcaaaccactgtattagcttgctagggctgccataataaaataccacagattggggggctttttaaattaatttattaggggggtagagatagggtcttactatgttgtccaggctggccttgaactcctggcctcaagcaagtcctcctgcgtcggcctcccacagtggacggcttaacaacagaaatttatttctcactattctggagattagaagtcaaagatcaaggtgctggtgattttgtttcttctgaagcctctctctttgcttgcagataactgccttctcactgtgtcctctcctggtctttgttctgtgcacacattgctgggtatctcttatgtccaaaggacaccatgttggattagactaacagcctccttttgaacttaagtcacctctttaaaggcctcatctccgaacagtcacattcaaaagaaatgggagttaggacctcaacaaatgaattgggggatacacagttcagcccataccaatgacctattctaaggtttctgtttcaaaacactgtagccaaatgcatactcctagggagaaaattat

SEQ ID NO: 4940 - DNA, 348 bp, Homo sapiens
  SIMILAR (3)..(101): 961254mologous to Homo sapiens Human melanoma growth related factor-1 amino acid sequence,accession number AAB26793,Smith- Waterman Score=169.
gtcggaggccccgacagcgcccaactgaccagactcagtggttctccatccttccggacttcagcctggvtctccaagaggggccctctgtagagtcccagvccctactccgatcctcatatacccccggtggatcccacaactcatttgacctttaaccatctttctattgtttgtgttagccttaccctgtccctgccccaccttggttccccttgtctatggagccccgctcttgtgagccaggaagcagcgtctcatcaggacagaaggtaggatgaagacatgggrataatgtgagagagtagaacacccccgtacctaataaaaamtctttatttttttatt

SEQ ID NO: 4941 - DNA, 864 bp, Homo sapiens
  SIMILAR (1)..(861): 861254mologous to Homo sapiens Similar to retinoic acid induced 12,accession number BC002762,Smith-Waterman Score=1272.
atgttggactcgctgttggccttgggcggcctggtgctgcttcgggattccgtggagtgggaggggcgcagtctcttgaaggcgcttgtcaagaaatctgcactgtgtggggagcaagtgcatatcctgggctgtgaagtgagcgaggaagagtttcgtgaaggttttgactctgatatcaacaatcggctggtttaccatgacttcttcagagaccctctcaactggtcaaaaactgaggaggcctttcctggggggccgctgggagccttgagagccatgtgcaagaggacagatcctgttcctgtcaccattgctctcgattcactcagctggctgctacttcgccttccctgcaccacactctgccaggtcctgcatgctgtgagccatcaggactcttgtcctggtgacagctcctcagtggggaaagtgagtgtgctgggcttgctacatgaagagcttcatggaccaggccctgtgggagctctcagcagccttgctcagactgaggtgaccctgggcggtaccatgggccaggcctcggcccacatcctgtgtcggaggccccgacagtcgacccaactgaccagactcagtggttctccattccttccggactttcagccgggatctccaagaggggccctctgtagagtcccagccctaattccgattcctcatatacccccgaaagagagagaagccagagatagcctgatcctgcccttccagttcagttctgaaaaacagcaggctctcctgcggcctaggccagggcaggctaccagccacatcttctatgagccagatgcttatgatgacctggaccaagaagacccagatgacgacctggatatttga

SEQ ID NO: 4942 - DNA, 458 bp, Homo sapiens
  SIMILAR (394)..(453): 851254mologous to Homo sapiens PRO2822,accession number AF119900,Smith-Waterman Score=91.
attgttgaggccattgtcagaggaaataatctaaaggttttgtgaattcctgtactcattctgggctgttctcctcaaggtcattcctgcattaacaggaggaagatgatagggagaagggagatctcagttcagtgatgtggcctttgtgaccaagccaagccacttaatcaggggggaaatggccttagtgcccacatcaatatttgctacccgtggaggctagttttcccacttagggcatgagaagaattggtgtagtcagtatcagagttgccaaacctgttttccaaaaataatggtaaatctatatttttcttttgaactgcatttttttaattattattattatttattttgagacggagtcttgctctgttgcccaggctggatggagtgcagtggcacgatctcggctcactgcaagctctgcctcctgggttcacaccattcttctg

SEQ ID NO: 4943 - DNA, 825 bp, Homo sapiens
  SIMILAR (348)..(491): 751254mologous to Homo sapiens Similar to retinoic acid induced 12,accession number BC002762,Smith-Waterman Score=175.
gctgggcttgctacatgaagagcttcatggaccaggccctgtgggagctctcatcagccttgctcagactgaggtgaccctgggcggtaccatgggccaggcctcggcccacatcctgtgtcggaggccccgacagcgcccaactgaccagactcagagggtctccatccttccggacttcagcctggatctccaagaggggccctctgtagagtcccagccctactccgatcctcatatacccccggtatctaagaatgccaaggccagaacaaggaaatgtagtttagtatctggtcacgggagagaaaataaaagctgcagaggttgggggtggggtcagggattctagggatggggcagagtggcagcatcctttgtacctacaggtggatcccacaactcatttgacctttaaccttcacctgtccaagaaagagagagaagccagagatagcctgatcctgcccttccagttcagttctgaaaagtaaggttgggacctgggtacgtggatccctgagtagatcccagcatctgggccatggagaggttggggcaacaggttattgattaacctgactttatagggactgaagtccacctccagagacaagtccaagttcttgatccacccattccccctataatggcagaggacccttatgtctcttttctctcccttatacccttggatcacagctccagttgtccccagagcaccctgggcctgggctgagccagaccagacccttgggaggtggccctatccctatgcagaggtgctaggaggacagaaggctatatgggcgtggcagaggctgg

SEQ ID NO: 4944 - DNA, 939 bp, Homo sapiens
  SIMILAR (1)..(483): 711254mologous to Homo sapiens Similar to retinoic acid induced 12,accession number BC002762,Smith-Waterman Score=552.
  misc_feature (1)...(939): n = a,t,c or g
gtgcggaaagtgagtgtgctgggcttgctacatgaagagcttcatggaccaggccctgtgggagctctcagcagccttgctcagactgaggcgaccctgggcgggtaccatggggccaggcctcggcccacatgctgtggtcggaggccccgacagcgcccaactgaccagactcagtggttctccatccttccggacttcagcctggatctcaaagaggggccctctgtagagtcccagccctactccgatcctcatataccccgggtggatcccaacaactcatttgacctttaaccttcacctgctccaagaaagagagagaagccagagatagcctgatcctgcccttccagttcagttctgaaaaacagcaggcttctcctgcggcctaggccagggcaggctaccagccacatcttctatgagccagatgcttatgatgacctggaccaagaagacccagatgacgacctgaatattttgcctggccagatttgattagattgtaattggagggggcgcgggaagactttgggcccagaaccatctttctattgtttgtgttagccttaccctgtccctgccccaccttggttccccttgtctatggagccccgccttgtgagccaggaagcagcgtctcatcaggacagaaggtaggatgaagacatggggtaatgtgagagagtagaaaaaaccccgtccctaataaaaatctttatttttttattnnnnnnnnnnnnnnnnnnnnnnnaaaggggggcccctttaaaagaacccttgggggggccaaagttaaccggggcaggcaaggaaaaaacttttccctaaaaggggggcgaaaaaaaaccaacctgggaatttttgaaaaaaaacctaactttgggggggggaaaaattggaccaacccccccacaaaaattaaaggcccaaggg

SEQ ID NO: 4945 - DNA, 439 bp, Homo sapiens
  SIMILAR (15)..(308): 681254mologous to Homo sapiens EDRF,accession number AF208865,Smith-Waterman Score=331.
ggcacgagaggcagatggctcttcttaaggccaataaggatctcattcccgacggaatgacagagctcacccctctgctgcaaccactgggcttcgaggaccctgtcgtatgtgaacaagacgtggtgactgcaggacaagactgggtaacctactacgaccgcgattacgggcagcaggtgacaggggagccccaagagcgagacaaggctctgcaggagcttcggcaagagctgaacactctggccaaccctttcctggccaagtacagggacttcctgaagtctccatgagctcccgagtcacccaccgccctcctcctagctcagggacccagcccctcctctctgagaaactctgaccttcatgtccttaggctgtgctcctgccactctaccctgacacctcaataaagaccagtgctggttttgttggaaaa

SEQ ID NO: 4946 - DNA, 304 bp, Homo sapiens
tcatgacgttgcccaggctggtctcaaacagctggctcaaacaatcctcccatcttggcctcttaaagcactgggattacatgagtgaggcaccacacctggccaagaatttccttaaagcctatgaagtggtgagcctttcatttcatgtggaaggttctggtggctgcaggatggcagtttggcacaggtccggagaggaagaggagggctccaaggtgtgctcaaggttccactgggacagtggtgtcctccccaaaccaatgaccaattagtgaggggtgcagtcatgcccgtgggcctt

SEQ ID NO: 4947 - DNA, 785 bp, Homo sapiens
  misc_feature (1)...(785): n = a,t,c or g
tttttttttgtggagatggggtctcatgacgttgcccaggctggtctcaaacagctggctcaaacaatcctcccatcttggcctcttaaagcactgggattacatgagtgaggcaccacacctggccaagaatttccttaaagcctatgaagtggtgagcctttcatttcatgtggaaggttctggtggctgcaggatggcctgaaatgagagagcaagtgatcctttagagaaatggtttccttttatccagtctgaagctgatgggggtgaaatctggagtggcagaagtaaggctggaaaggaggagctagatcggaggagaaacatcagcaggacttggctgaaatgtgttgggtttgttcattcgttttattttacctncagcagatacacagggagtgctcgctgtgtgcttggcactgtggtcaaggaactgagtatgcaccaaagaagagaacacatacagtccttgctctgtgccactcacagtttggcacaggtccggagaggaagaggagggctccaaggtgtgctcaaaggtacctctggatcagtggtgtcctccccaaaccaatgaccaccttagtgaggggtgcagtcatgtccgtgggccttcatcagcattttacttgacaaaagcccgttctgccgggccccagggagctgaaaaggggcttgggaatggggtcttgaggaggggctggccggaatgtacagcacaagcacagcttgaccggccggcgcgggtgagcttgtctcatagaccacgcaacttccggctc

SEQ ID NO: 4948 - DNA, 456 bp, Homo sapiens
  SIMILAR (455)..(207): 931254mologous to Homo sapiens Human secreted protein encoded by gene 4 clone HLDON23,accession number AAY41311,Smith-Waterman Score=436.
tagagaaaattatttaatagagaaacaatgaatgatactcttcacactcagcctcctgcagggaggacagacagctcttgcccaaggaagcatttaagggcagaagggctacaaatcaccaacacccgctgattatttaaaagaaactctcaaatacattcttttccaggttaaattcactttgtcctcataagtgcccatgctgtgggctgtgaaggtatactgtggggagggtggtccctgaggggtgttggagtgccccattccagtgcaaagaggagctgagttggaataaggggtcccgggaagggcaggccaggggcacagctgcctgctggcagggcgagggcaagcacagaagtaccctgcgggggccccttgccctcttctcggagccaaaaatgatagagggctgcatgccccaaaacggacaggcacaggacccagtaaccaccg

SEQ ID NO: 4949 - DNA, 534 bp, Homo sapiens
  SIMILAR (532)..(389): 951254mologous to Homo sapiens A protein involved in eliciting a signal in HH-PTC,accession number AAY23755,Smith- Waterman Score=221.
ttttttttttttttagagaaaataatttaatagagaaacaatgaatgatactctttacactcagcctcctgcagggaggacagacagctcttgcccaaggaagcatttaagggcagaagggctacaaatcaccaacacccgctgattatttaaaagaaactctcaaatacattcttttccaggttaaattcactttgtcctcataagtgcccatgctgtgggctgtgaaggtatcagccccattgaagagatgggggtctcagcactgtccatccaagaagcctgctcgccagggctgcagtgggccacttcattcttggcgtcagcctgggttagtgcccctctgctccagatggctcacatctgtccaatcattcttctagggtcactgaagggtgcaagagctacgaacagattccgacagtccctctttgtccagggtgtcagcttcccagcgagattccctcatcttgacctgctccttcaagtattcagctcgggccatgaggttctgaacctcagtgtgaagcagct

SEQ ID NO: 4950 - DNA, 578 bp, Homo sapiens
  SIMILAR (4)..(576): 971254mologous to Homo sapiens Novel protein kinase, SEQ ID NO: 219,accession number AAB65691,Smith-Waterman Score=971.
  misc_feature (1)...(578): n = a,t,c or g
cggcatgaacggaatatctctcacctggatctgaagccacagaacattctactgagctccttggagaagccccacctaaaactggcagactttggtttcgcacaacacatgtccccgtgggatgagaagcacgtgctccgtggctcccccctctacatggcccccgagatggtgtgccagcggcagtatgacgcccgcgtggacctctggtccatgggggtcatcctgtatgaagccctcttcgggcagcccccctttgcctccaggtcgttctcggagctggaagagaagatccgtagcaaccgggtcatcgagctccccttgcggcccctgctctcccgagactgccgggacctactgcagcggctcctggagcgggaccccagccgttgcatctccttccaggacttttttgcgcacccctgggtggacctggagcacatgcccagtggggagagtctggggcgagcaaccgccctggtggtgcaggctgtgaagaaagaccaggagggggattcagcagccgacttatcactctactgncaggctcttgacttctttgtacctgccctgcacta

SEQ ID NO: 4951 - DNA, 3007 bp, Homo sapiens
  SIMILAR (718)..(858): 591254mologous to Homo sapiens Novel protein kinase, SEQ ID NO: 219,accession number AAB65691,Smith-Waterman Score=135.
gcggggcctccgtatccccacgtgggccctgcaggaactggcggggcgcgtgacccggcgaggcccagagacaggggaggggcgccgggagccgggcggatccgcgtccccgatgcgcgctgcatttccggcgggcggcgctgggggcagcgtggagccacccagtgctcggcccgccccgcaacccgccggaaccgccgcccgcagcgaggaagcgcccgcgcgggcgcaggcggccggaatggcggggcccggctggggtcccccgcgcctggacggcttcatcctcaccgagcgcctgggcagcggcacgtacgccacggtgtacaaggcctacgccaagaaggacactcgtgaagtggtagccataaagtgtgtagccaagaaaagtctgaacaaggcatcggtggagaacctcctcacggagattgagatcctcaagggcattcgacatccccacattgtgcagctgaaagactttcagtgggacagtgacaatatctacctcatcatggagttttgcgcagggggcgacctgtctcgcttcatccatacccgcaggattctgcctgagaaggtggcgcgtgtcttcatgcagcaattagctagcgccctgcaattcctgcatgaacggaatatctctcacctggatctgaagccacagaacaatcttactgagctccttggagaagccccacctaaaactggcagactttgggtttcgcacaacacatgtccccgtgggattgagaagcacgtgctccgtgggctcccccctctacatggcccccgagatggtgtgccagcggcagttatgacgcccgcgtggacctctggtccatgggggtcatcctgtatggggagacctcttttccctgcttctcaccctgaggcctacagtttcctcaggcaaggcctctctgggccacttctgaagggttctgatgaaaactgactgctggcccagggcccctgctgaggggcgtcaggccaggcttgacccattccctcccagcctccgctctgcctcccttccacagaagccctcttcgggcagcccccctttgcctccaggtcgttctcggagctggaagagaagatccgtagcaaccgggtcatcgagctccccttgcggcccctgctctcccgagactgccgggacctactgcagcggctcctggagcgggaccccagccgtcgcatctccttccaggacttttttgcgcacccctgggtggacctggagcacatgcccagtggggagagtctggggcgagcaaccgccctggtggtgcaggctgtgaagaaagaccaggagggggattcagcagctgccttatcactctactgcaaggctctggacttctttgtacctgccctgcactatgaagtggatgcccagcggaaggaggcaattaaggcaaaggtggggcagtacgtgtcccgggctgaggagctcaaggccatcgtctcctcttccaatcaggccctgctgaggcaggggacctctgcccgagacctgctcagagagatggcccgggacaagccacgcctcctagctgccctggaagtggcttcagctgccatggccaaggaggaggccgccggcggggagcaggatgccctgggacctgtaccagcacagcctgggggagctactgctgttgctgggcagcggagcccccgggccggaggcgggagctgcttcacactgaggttcagaacctcatggcccgagctgaatacttgaaggagcaggtcaagatgagggaatctcgctgggaagcttgacaccctgggacaaagagggactgtcggaatctgttcgtaacttcttgcacccttcagtgaccctagaagaatgattggacagatgtgagccatctggagcagaggggcactaacccaggctgacgccaagaatgaagtggcccactgcagcccctggcgagcaggcttcttggatggacagtgctgagacccccatatcccagagtccccagcctccctcaggttactctgcaccccacagatggtttgatggctgtgctgtatactggaggggagggcaggactctggggagaacagcacttctttcatgagacctttgttactcggtggttactgggtcctgttgcctgtccgttttttggggcatgcagccctctattcattttttgggttccgagaagaggggcaaggggcccccgcagggtacattctgtgcttgccctcgccctgccagcaggcagctgtgcccctggcctgcccttcccgggaccccttattccaactcagctcctctttgcactggaatggggcactccaacacccctcagggacgcaccctccccacagtatgcactcagccccacagaacccaccagtctttctgggaactcacacctgcccgccatcttggtactttaggttaatccctcaagcatgaaagctggatcttttggggtttaagaagcccaagccttgttcctgccctggcgctacggagcactctcgagggacccttggacctcatctctcccacctccgtgccctctgggcccaacactatccacagagcgggccttgagctggagattgagcctggggacagggagagggaggcttggagacagtctgaccccagtgccttcctaggccaacccacttcctaaggccctgcccctgaccgcccgtggaagcccctgggcaagctctttccccctttactgggccctgggtctccccatctcttcaatggggctgatacccttcacaagcccacaagcatgggcacttatgagggacaaagtgaatttaacctgggaaaagaatgtattttgagagtttcttttaaataatcagcgggtgttggtgatttgtagcccttctgccctaaaatgcttccttggacaaaagctgtctgtccctccctgcaggaggctgagtgtgaagagtatcattcattgtttctctattaaattattttctgctaaaaaaaaaaaa

SEQ ID NO: 4952 - DNA, 401 bp, Homo sapiens
  misc_feature (1)...(401): n = a,t,c or g
tttggaaggcctatcaatcacaggtgcgctaattcgggagcaggtgcacgcctgtgcntactcgctaccacgcgtcttctgggaggaagtgaatgagccggttatcttctcagggagggttagtgctggccactgtgcactgccgctgccagcacgcccggtcacagccagtgtctatgggcgactggcgcggctgcgaggctgtctagaggactcctacccttctgctctgagtgcgcaagtcttcctggactctccggctgtgggctgtggtttggaaacgaggttgttcatagaggctgctctggggccaccatgcagggcaacggtgacgtccagaggccacctgcttgacatctccatcaccaaatctacaggaagaccctgtttcctatgtgagg

SEQ ID NO: 4953 - DNA, 358 bp, Homo sapiens
ggcacgaggccccaggcacctgcttatgacaacaagctttgggtagagcttacttacacccttggtttctccagtccctgcctgcccatgcccctcaaagagtgaggtgtctgttccacaagagcacccgctcccctgcaggcctttgtttagggtttggagaaacaggcagagcaggggctgccctcagggagtagagcattatggagctggtgcctggggccttctccctccagtgtggaaatcctgcccaccagccaaaacctgctgcaaatggggactgccagcccaccctgtgggcgcagctgcctgcacagcggatggagcagctctgtgccttctgtgtggtgggagtgcg

SEQ ID NO: 4954 - DNA, 405 bp, Homo sapiens
gaacagtgtacactttccgttcagccatcgtcacagcacgtgctgtgtgggtgcggccacgtatggatcgcagagccgacctcagctcagcgacgcagagtgcttctgctgaaaaatttggagggagggttagtgctggccactgtgcactgccgctgccagcacgcccggtcacagccagtgtctatgggcgactggcgcggctgcgaggctgtctagaggactcctacccttctgctctgagtgcgcaagtcttcctggactctccggctgtgggctgtggtttggaaacgaggttgttcatagaggctgctctggggccaccatgcagggcaacggtgacgtccagaggccacctgcttgacatctccatcaccaaatctccaggaagaccctgtttcctat

SEQ ID NO: 4955 - DNA, 408 bp, Homo sapiens
ggagggttagtgctggccactgtgcactgccgctgccagcacgcccggtcacagccagtgtctatgggcgactggcgcggctgcgaggctgtctagaggactcctacccttctgctctgagtgcgcaagtcttcctggactctccggctgtgggctgtggtttggaaacgaggttgttcatagaggctgctctggggccaccatgcagggcaacggtgacgtccagaggccacctgcttgacatctccatcaccaaatctccaggaagaccctgtttcctatctgtgtgcctccatggcagtgaccagcaaaagcgcaagggtgccgcagccacggcgaaaagaaagtccaagggtggaggggtgaacgtggagggacgtctgtgcacctggccccctgaagacccac

SEQ ID NO: 4956 - DNA, 1193 bp, Homo sapiens
  SIMILAR (49)..(528): 991254mologous to Homo sapiens 17.3K myelin basic protein,accession number M30047,Smith-Waterman Score=858.
cagaccatccaagaagacagtgcagccacctccgagatccttgatgtgatggcgtcacagaagagaccctcccagaggcacggatccaagtacctggccacagcaagtaccatggaccatgccaggcatggcttcctcccaaggcacagagacacgggcatccttgactccatcgggcgcttctttggcggtgacaggggtgcgcccaagcggggctctggcaaggactcacaccacccggcaagaactgctcactacggctccctgccccagaagtcacacggccggacccaagatgaaaaccccgtagtccacttcttcaagaacattgtgacgcctcgcacaccacccccgtcgcagggaaagggggccgaaggccacagaccaggatttggctacggaggcagagcgtccgactataaatcggctcacaagggattcaagggagtcgatgcccagggcacgctttccaaaatttttaagctgggaggaagagatagtcgctctggatcacccatggctagacgctgaaaacccacctggttccggaatcctgtcctcagcttcttaatataaccgccttaaaactttaatcccacttgccccctggtacctaattagaacagatgaaccccttccctaatgcccggggagttggggcccgtaattaagggtcaggccacggcagcctaccggcaatttccggccaacagttaaatgagaacatgaaaacagaaaacggttaaaactgtccctttctgtgtgaagatcacgttccttcccccgcaatgtgcccccagacgcacgtgggtcttcagggggccaggtgcacagacgtccctccacgttcacccctccacccttggactttcttttcgccgtggctgcggcacccttgcgcttttgctggtcactgccatggaggcacacagctgcagagacagagaggacgtgggcggcagagaggactgttgacatccaagcttcctttgtttttttttcctgtccttctctcacctcctaaagtagacttcatttttcctaacaggattagacagtcaaggagtggcttactacatgtgggagcttttggtatgtgacatgcgggctgggcagtgttagagtccaacgtggggcagcacagagagggggccacctccccaggccgtggctgcccacacaccccaattagc

SEQ ID NO: 4957 - DNA, 2240 bp, Homo sapiens
  SIMILAR (216)..(314): 631254mologous to Mus musculus alternate,accession number L07507,Smith-Waterman Score=108.
cgcgccagagagaagcagcctccggccccggcggcccctgtctcccgaccccggaaggcgaagcaggctgcccggggaccccgcgcgtgggcgcttgaagccgagaccagcctgcccgggcctgggcaggcggagcagggccttggaccccgcggcgcccctcggcctcggagcaacgagcgcagcgccgcctctgaagagccaatccattcaggatgggaaaccacgcaggcaaacgagaattaaatgccgagaaggccagtacgaatagtgaaactaacagaggagaatctgaaaaaaaagagaaacctgggtgaactttcacggacaacctcagaggacaacgaagtgttcggagaggcagatgcgaaccagaacaatgggacctcctctcaggacacagcggtgactgactccaagcgcacagcggacccgaagaatgcctggcaggatgcccacccagctgacccagggagccgcccccacttgatccgcctcttttcccgagatgccccggggagggaggacaacaccttcaaagacaggccctctgagtccgacgagctccagaccatccaagaagacagtgcagccacctccgagagcctggatgtgatggcgtcacagaagagaccctcccagaggcacggatccaagtacctggccacagcaagtaccatggaccatgccaggcatggcttcctcccaaggcacagagacacgggcatccttgactccatcgggcgcttctttggcggtgacaggggtgcgcccaagcggggctctggcaaggtaccctggctaaagccgggccggagccctctgccctctcatgcccgcagccagcctgggctgtgcaacatgtacaaggactcacaccacccggcaagaactgctcactacggctccctgccccagaagtcacacggccggacccaagatgaaaaccccgtagtccacttcttcaagaacattgtgacgcctcgcacaccacccccgtcgcagggaaagggggccgaaggccagagaccaggatttggctacggaggcagagcgtccgactataaatcggctcacaagggattcaagggagtcgatgcccagggcacgctttccaaaatttttaagctgggaggaagagatagtcgctctggatcacccatggctagacgctgaaaacccacctggttccggaatcctgtcctcagcttcttaatataactgccttaaaactttaatcccacttgcccctgttacctaattagagcagatgacccctcccctaatgcctgcggagttgtgcacgtagtagggtcaggccacggcagcctaccggcaatttccggccaacagttaaatgagaacatgaaaacagaaaacggttaaaactgtccctttctgtgtgaagatcacgttccttcccccgcaatgtgcccccagacgcacgtgggtcttcagggggccaggtgcacagacgtccctccacgttcacccctccacccttggactttcttttcgccgtggctgcggcacccttgcgcttttgctggtcactgccatggaggcacacagctgcagagacagagaggacgtgggcggcagagaggactgttgacatccaagcttcctttgtttttttttcctgtccttctctcacctcctaaagtagacttcatttttcctaacaggattagacagtcaaggagtggcttactacatgtgggagcttttggtatgtgacatgcgggctgggcagctgttagagtccaacgtggggcagcacagagaaagggaacacctccccaggccgtggctgcccacacaccccaattagctgaattcgcggtgggcagagggaggaaaaggaggcaaacgtgggctgggcaatggcctcacatatacactggctgtgaccgggcgtgctggcagcggcagtgcacagtggccagcactaaccctccctgagaagataaccggctcattcacttcctcccagaagacgcgtggtagcgagtaggcacaggcgtgcacctgctcccgaattactcaccgagacacacgggctgagcagacggccccgtggatggagacaaagagctcttctgaccatatccttcttaacacccgctggcatctcctttcgcgcctccctccctaacctactgacccaccttttgattttagcgcacctgtgattgataggccttccaaagagtcccacgctggcatcaccctccccg

SEQ ID NO: 4958 - DNA, 2921 bp, Homo sapiens
  SIMILAR (882)..(923): 1001254mologous to Mus musculus alternate,accession number L07507,Smith-Waterman Score=72.
atgggaaaccacgcaggcaaacgagaattaaatgccgagaaggccagtacgaatagtgaaactaacagaggagaatctgaaaaaaagagaaacctgggtgaactttcacggacaacctcagaggacaacgaagtgttcggagaggcagatgcgaaccagaacaatgggacctcctctcaggacacagcggtgactgactccaagcgcacagcggacccgaagaatgcctggcaggatgcccacccagctgacccagggagccgcccccacttgatccgcctcttttcccgagatgccccggggagggaggacaacaccttcaaagacaggccctctgagtccgacgagctccagaccatccaagaagacagtgcagccacctccgagagcctggatgtgatggcgtcacagaagagaccctcccagaggcacggatccaagtacctggccacagcaaggtaccatggaccatgccaggcatggcttcctcccaaggcacagagacacgggcatccttgactccatcgggcgcttctttggcggtgacaggggtgcgcccaagcggggctctggcaagagactcacaccacccggcaagaactgctcactacgggtccctgccccagaagtcacacggccggacccaagatgaaaaccccgtagtccacttttttcaagaacattgtgacggcttcgcacaccacccccgttcgcaggggaaaggggagaggattgtccctgaggcagattttagctggggggcccaaaggccagagaccaggattttggctacggaagcaaaagcgtccgactataaatcggctcacaagggattcaagggagtcgatgcccagggcacgctttccaaaattttcaagctgggaggaagagatagtcgctctggatcacccatggctagacgctgaaaacccacctggttccggaatcctgtcctcagcttcttaatataaccgccttaaaactttaatcccacttgcccctgttacctaattagagcagatgacccctcccctaatgcctgcggagttgttgcaagtagtaggggtcaggccacgggcagcctaccggcaattttccgggccaacagtttaaatgagaacatgaaaacagaaaacgggttaaaactgttcccttttctgtgtgaagatcaagttccttcccccgcaatgttgcccccagacggcacgtggggtctttcagggggccaggtgcacagacgtccctccacgttcacccctccacccttggactttcttttcgccgtggctgcggcacccttgcgcttttgctggtcactgccatggaggcacacagctgcagagacagagaggacgtgggcggcagagaggactgttgacatccaagcttcctttgttttttttttcctgtccttctcttcacctccttaaagtaagacttcattttttcctaaacaggatttagacagttcaaggagtggcttactacatgtgggggagcttttggtatgtggacatgcgggctgggcagctgttagagtcccacgtgggggcagcacagagagggggccaacttcccagggccgtggctgcccaaaaaacccaatttagcttgaattcgcgtgtggcagagggaggaaaaggaggcaaacgtgggctgggcaatggcctcacataggaaacagggtcttcctggagatttggtgatggagatgtcaagcaggtggcctctggacgtcaccgttgccctgcatggtggccccagagcagcctctatgaacaacctcgtttccaaaccacagcccacagccggagagtccaggaagacttgcgcactcagagcagaagggtaggagtcctctagacagcctcgcagccgcgccagtcgcccatagacacttggctgtgaccgggcgtgctggcagcggcagtgcacagtggccagcacttaaccctccctgagaagataaccggctcattcacttcctcccagaaggacgcgtggttagcgagttagggcacaggcgtgcaacctgctcccgaattactcaccgagacacacggcttgaagcagacggccccgtggatggagacaaagagctccttctgacccaaaacccttccttaaaaaaccggctgggcatcctccctttcgcgccctcccctcccctaaccctactgaccccacccttttgaatttttagccgccaccctgtgaattgaataggcccttcccaaaagagtcccccacggctggcatcgcccctcccccgaggacggagatgaggaagtaagtcagccgtgatgcccaaaacgccgtccttccttaatcccaattcctaattcctgaatgtttcgtgtgggcttaataccatgtcctattaatatatagcctcgatgatgagagggttacaaagaacaaaactccagacacaaacctccaaatttttcagcagaagcactctgcgtcgctgagctgaggtcggctctgcgatccatacgtgggccgcacccacacacgcacgtgctgtgaacgatgggcttgaacggaaagtgttacactgttcctgaatatttgaaattaaaacaataaacttttaaaaaaaaaaaaaaaaaaaaagggacatgaggaattttgatacaagcatgtaatgcttattaatcacatcatggaacacagggtatccatcccctcaagcgtttatcctttatattataaacaatctaattctacccttttcattattttaaagtacacaattaagttattattaactatagttaccctgttgtgctatcaaatactaggtaaatttgatcctattttcttgtacccattagccatcaccctcttcctccaagcaccccactacccttcctagcttctgatgactgtgcttctattctctatgtccatgagtt

SEQ ID NO: 4959 - DNA, 208 bp, Homo sapiens
  SIMILAR (3)..(149): 911254mologous to Mus musculus zuotin related factor,accession number U53208,Smith-Waterman Score=241.
cttatgaaatgttatctgatccagtgaaaagacgagcatttaacagtgtagatcctacttttgataactcagttccttctaaaagtgaagcaaaggataatttcttcgaagtgtttaccccagtgtttgaaaggaattccaggtataattttgattcttggagagaattttcttatttagatgaagaagaaaaagaaaaagcagaatg

SEQ ID NO: 4960 - DNA, 394 bp, Homo sapiens
  SIMILAR (192)..(386): 931254mologous to Homo sapiens M-phase phosphoprotein 11,accession number X98260,Smith-Waterman Score=318.
ccggttcctgggcgtcttaaagccaaggcgcgaggctcggagtgagaggtagagctggaggggaccctaagcgccctccgcccgggacgtgagccgctgcgcccaccgggctagacccggcgccatcatgctgcttctgccaagcgccgcggacggccggggcaccgccatcacccacgctctgacctctggaactggaggataagaaagagttatccgaggaatcagaagatgaagaattgcagttggaagagtttcccatgctgaaaacacttgatcccaaagactggaagaaccaagatcattatgcagttcttggacttggccatgtgagatacaaggctacacagagacagatcaaagcagctcgtaagtacttagttattttgaaata

SEQ ID NO: 4961 - DNA, 2019 bp, Homo sapiens
  SIMILAR (161)..(316): 821254mologous to Homo sapiens M-phase phosphoprotein 11,accession number X98260,Smith-Waterman Score=210.
cgtaccggacttcccgggtcgacgatttcgtacgaaagatccatcccggaagtgcttactggtcgtctccatgcgccggttcctgggcgtcttaaagccaaggcgcgaggctcggagtgagaggtaaagctggaggggaccctaagcgccctccgcccgggacgtgagccgctgcgcccaccgggctagacccggcgccatcatgctgcttctgccaagcgccgcggacggccggggcaccgccatcacccacgctctgacctctgcctctacactctgtcaaggtggaacctgtgggaagatggtttgaagcttttgttaagaggagaaacagaaatgcttctgcctcttttcaggaactggaggataagaaagagttatccgaggaatcacaagatgaagaattgcagttggaagagtttgccatgctgaaaacacttgatcccagagactggaagaaccaagatcattatgcagttcttggacttggccatgtgagatacaaggctacacagagacagatcaaagcagctcataaagcaatggttttaaaacatcacccagacaaacggaaagcagctggtgaaccaataaaagaaggagataatgactacttcacttgcataactaaagcttatgaaatgttatctgatccagtgaaaagacgagcatttaacagtgtagatcctacttttgataactcagttccttctaaaagtgaagcaaaggataatttcttcgaagtgtttaccccagtgtttgaaaggaattccagatggtcaaataaaaaaaatgttcctaaacttggtgatatgaattcatcatttgaagatgtagatatattttattctttctggtataattttgattcttggagagaattttcttatttagatgaagaagaaaaagaaaaagcagaatgtcgtgatgagaggagatggattgaaaagcagaacggagcaacaagagcacaaagaaaaaaagaagaaatgaacagaataagaacattagttgacaatgcatacagctgtgatccaaggataaaaaagttcaaggaagaagaaaaagccaagaaagaagcagaaaagaaagcaaaagcagaagctaaacggaaggagcaagaagctaaagaaaaacaaagacaagctgaattagaagctgctcggttagctaaggagaaagaagaggaggaagtcagacagcaagcattgctggcaaagaaggaaaaagatatccagaaaaaagccattaagaaggaaaggcaaaaacttcgaaactcatgcaagatagaagaaataaatgagcaaatcagaaaagagaaagaggaagctgaggctcgtatgcgacaagcatctaagaacacagagaaatcaactggtggaggtggaaatggaagtaaaaattggtcagaagatgatctacaattactaattaaagctgtgaatctgttccctgctagaacaaattcaagatgggaagttattgctaattacatgaacatacattcttcctctggagtcaaaagaactgccaaagatgttattggcaaagcaaagagtctccaaaaacttgaccctcatcaaaaagatgacataaataaaaaggcatttgataagttcaaaaaagaacatggagtggtacctcaagcagacaacgcaacgccttcagaacgatttgaaggtccatatacagacttcaccccttggacaacagaagaacagaagcttttggaacaagctttgaaaacatacccagtaaatacacctgaaagatgggaaaaaatagcagaagcggtgcctggcaggacaaagaaggactgcatgaaacgatacaaggaacttgtcgagatggtaaaagcaaagaaagctgctcaagaacaagtgctgaatgcaagtagagccaagaaatgacaatctttgttgtgtgtgcatttttataataaaactgaaaatactgtaaacattttcattcttaaaattatactcatggtaataatttgaaagtaaaaaaaaaaaaaaa

SEQ ID NO: 4962 - DNA, 1910 bp, Homo sapiens
  SIMILAR (699)..(1907): 1001254mologous to Homo sapiens similar to murine cell cycle regulator MIDA1; similar to A57591 (PID:g2137417),accession number AC004668,Smith-Waterman Score=2077.
gacgtgagccgctgcgcccaccgggctagacccggcgccatcatgctgcttctgccaagcgccgcggacggccggggcaccgccatcacccacgctctgacctctgcctctacactctgtcaagttgaacctgtgggaagatggtttgaagcttttgttaagaggagaaacagaaatgcttctgcctcttttcaggaactggaggataagaaagagttatccgaggaatcagaagatgaagaattgcagttggaagagtttcccatgctgaaaacacttgatcccaaagactggaagaaccaagatcattatgcagttcttggacttggccatgtgagatacaaggctacacagagacagatcaaagcagctcataaagcaatggttttaaaacatcacccagacaaacggaaagcagcttggtgaaccaataaaagaaggagataatgactacttcacttgcataactaaagcttatgaaatgttatctgatccagtgaaaagacgagcatttaacagtgtagatcctacttttgataactcagttccttctaaaagtgaagcaaaggataatttcttcgaagtgtttaccccagtgtttgaaaggaattccagatggtcaaataaaaaaaatgttcctaaacttggtgatatgaattcatcatttgaagatgtagatatattttattctttctgggtataattttgattcttggagagaattttcttatttagatgaagaagaaaaagaaaaagcagaatgtcgtgatgagaggagatggattgaaaagcagaacagagcaacaagagcacaaagaaaaaaagaagaaatgaacagaataagaacattagttgacaatgcatacagctgtgatccaaggataaaaaagttcaaggaagaagaaaaagccaagaaagaagcagaaaagaaagcaaaagcagaagctaaacggaaggagcaagaagctaaagaaaaacaaagacaagctgaattagaagctgctcggttagctaaggagaaagaagaggaggaagtcagacagcaagcattgctggcaaagaaggaaaaagatatccagaaaaaagccattaagaaggaaaggcaaaaacttcgaaactcatgcaagacctggaatcatttttctgataatgaggcagagcgggttaaaatgatggaagaagtggaaaaactttgtgatcggcttgaactggcaagcttacagtgcttgaatgaaacactcacatcatgcacaaaagaagtaggaaaggctgctttggaaaaacagatagaagaaataaatgagcaaatcagaaaagagaaagaggaagctgaggctcgtatgcgacaagcatctaagaacacagagaaatcaactggtggaggtggaaatggaagtaaaaattggtcagaagatgatctacaattactaattaaagctgtgaatctgttccctgctggaacaaattcaagatgggaagttattgctaattacatgaacatacattcttcctctggagtcaaaagaactgccaaagatgttattggcaaagcaaagagtctccaaaaacttgaccctcatcaaaaagatgacataaataaaaaggcatttgataagttcaaaaaagaacatggagtggtacctcaagcagacaacgcaacgccttcagaacgatttgaaggtccatatacagacttcaccccttggacaacagaagaacagaagcttttggaacaagctttgaaaacatacccagtaaatacacctgaaagatgggaaaaaatagcagaagcggtgcctggcaggacaaagaaggactgcatgaaacgatacaaggaacttgtcgagatggtaaaagcaaagaaagctgctcaagaacaagtgctgaatgcaagtagagccaagaaatga

SEQ ID NO: 4963 - DNA, 1667 bp, Homo sapiens
  SIMILAR (832)..(1131): 631254mologous to Homo sapiens Human gene 31-encoded protein fragment, SEQ ID NO:342,accession number AAY86427,Smith-Waterman Score=266.
cctcgtgccatgttattttttttaaatgactttttagtttagaaagttctgatgagcaaataaatacatctatctacatgttggaagtccatctgccagcacacctgcttaaagtgaaatgaaagcacataaccaggctctgaatgggttatattttatcatggtgctcccagaatcctttgacctcactctgctttctagtctgcttgtgacactggacagtcctttcttacagagctattatatgttctaggctacgaagggttaaataatcccaaaaatgaggtatgtcatacccacacgtctttatctctagaagctgtgatgtatgtgaaacagcactgttattcttaacactagtgtgtaaaataaggattagtacagtacgtctcattactttttaattcagggcaccctgagtgaaaacaaatacaaaaaaaaatccctaactctgagctctatctctgattcctcttcctccttcccctcttcctcctcttcctctcctcctgttttgctacattctcctcagtggcaaaaagtttcactctacctctgacagcatgtatattgcaccagtagctaacaaaaactggtctagtcaaaccaaatgggcacaaaagaaccaggataccaaaagttaagctcatacagctgcaaaccatatcacttcttggtaacaatgcagacctcataaacctaaagaagagaaagaaaagaaaacttttgttactttccttttttgcttgtcacttatatacaggctatgtgagaatataatttgtaggtataacacattaagaaaaagttatcttcattggatagaattgaatggtggtcgctgataggaatagggcgtcctctagctcttatctctgtctcttactcttttctctttctctttttctctgtcatgagactgtgtgtgacagggccacctgtctttttttttttcttaaattttttttttttttttatgtgtaggtgcatgtcttggggatttaaaaatttcaaggctggttttaccttatgcaaagccatgcctacgtctggaatacttagggaaagaaagcgactccatgttgtccgaaattcctcaagggaccagaaaaaaaattggagactgttgaaaatgccagatttgaagtaatttttttaaaatattattttgggttctgcgacattgtgaaaaattaaagttgttgtgcaatacttaattcagacatgtacccacaagttaatggtagactaacactggggggtggggtcctaggcatcatgcttttgttcagcatactcttgagcttttaagtctactatgtctgaactgtgggtttcttgtttatccttttttccttagttggactgtaatgtatgggtctgtcaaccttgtgaatcttttaaagtatggatttcagggtattgttgtattctattactgtgtaataaaaaagttgaaaaaaatctggatcctctgtctccctcgtccccggtgtgccatggttgcccaccagtgaccccagcctgaggagtccatcctccatggtgctgaatcaaatctgtagagtttattcagctacaaagcgtggctctgtaacagggagttgggcttatccatgcgtgttgagtaggggaatgatgtcagaactttgcaaaagtcgagctca

SEQ ID NO: 4964 - DNA, 1218 bp, Homo sapiens
  SIMILAR (6)..(89): 751254mologous to Homo sapiens X-linked retinopathy protein {C-terminal, clone XEH.8c},accession number S58722,Smith-Waterman Score=123.
tttctttctttgagacggagtcttgctctgtggctcatcctggagcacagtggtgcgatatcagctcactaccacctccgcctcctgggttcaagcgactgtcctgcctcagcctcccgagtggctgggattacaggcacacatcaccacgcctggccaatttttgtatttgtagtagagacagggtttcactgcctgcctcagcctcccatagtgctgggattacaggcatgagcctccgtgcccggtgcatccctaatcttgagcatgatctcagtcggcaaatgaggccatctgttttcagcctgtttgaaaataagatgtgggggagggccatgatgggaaataggcacgttggggttaaacataactggcagatgtgggagcgatggtggggcatgccattcaaaccaggtcccaaaatgggtgcaacaaggtatagcacatctaccactcgctaacttgactgacttggagaaatgactacacttttgcctgtttcctcagttggaaaatagccatattaacacctctttcattggcttgctgtcagggtactgggatggggggaggtgcatgggttggggtggccaccaggtggtgctgtgccacagcgggcagcccctctggaaatgactggcatcataaaatctgtcttcatacccgaggtagtgttttttgtttttttaagatctctaccttttaaaagcgtggcatacagtgtgcttggtattgtgttaggcatttagacgtgctcaggttgtaaggttgaagtgccagtctttgaatattctgtaaggattgtgagggtgtgaggtggttttgagtctggtcacgggtcttgtttcctccggtttaggttgggtacaccagccctcaggcccaggtgcggcactgtgggcggctttcagcctttcccgttctgtaagcattgcagattcccaaggaaaagcgagcctttaccatgtgggttttctttgttcccagcacatcgtccagagtttcatcccagctcctatgagacaggccttgcaggggtgtgtccagccttgtctagagaaggccgcctttcatgcagtgcttcccagccctggcttgggactcagtcatctggggcacttaggcagttcactgtgggggccagggctgactggagattgcgaatgcggtggtctggggcataagtgtgttttcaagctctcaggtgggcctctgctt

SEQ ID NO: 4965 - DNA, 770 bp, Homo sapiens
  SIMILAR (151)..(249): 691254mologous to Homo sapiens Human secreted protein, SEQ ID NO: 7339,accession number AAG03258,Smith-Waterman Score=133.
gcgtcgacgtcttgctttgtcaccagctggagtgcactggcatggtctcggctcactgcaacctccacctccctggttcgagcgattctcctgcctcggcctcctgagtggctgggactgcaggcgtgcaccaccacgcccagctagtttttttgtatttctagtagagacagggtttcgccatgttggcaaggatggtctcgatttcttgacttcgtgatccgcccgccttggcctcccaaggtgcctgggattgcaggtgtcagcccaccgcacccggcctcaaatacattttttttaatgggccttgtctttcctggttttaggcccttttccacaatttctgatggaaatacagaaaccttgccatcattcttactgctggtttgcatctcatttatggtgtatctgggatttcttctcatgaacagaaagattcgagtggctgttatatgccttgtcaatttaatgtattgccctatcctctttttgatcaaagatagagactaagactggggaattatgacagaaaaagtccatatttttcctttaaaatggattttggaaatgttaaaataggccaatatgagtcaaagtgcaaattttttggtgagtaggttgacaaaaaaaaaaaaaattccgggaaaaaaggggcaattttttatgggcccaaattttttggttggcctaaggaagggtcccctctatttaatggttttaatatgctacaaagccccattttctgcagttatggaaccaggggggctgta

SEQ ID NO: 4966 - DNA, 290 bp, Homo sapiens
aaacccatctctttcattaaaccacctcattttggttcagaaacaagactgccatgtatgtatttaatgcttattatgtgccaagcactattccaggtactaagatacagtgatggacaaaacaagatcccttctcctctatctcaggacttattaatttgggcattttcattttccaatataggatcttttagtactggtataggattcctgaaggaattcctgaaatataattatttttctgctagagcaaatcaattttggtttttggtttttttttgagatggaga

SEQ ID NO: 4967 - DNA, 947 bp, Homo sapiens
  SIMILAR (12)..(209): 651254mologous to Homo sapiens PRO1902,accession number AF118082,Smith-Waterman Score=229.
cactgcaacttccccctcccagttcaagcaattcttggttctagcaattctcgtgcctcagcttcccgagtagctgggactacaggtgcactccaacacatgcagctaattttttgtattttagtagagacggggtttcaccgtgttgcccaggctggtctcgatcttctgagctctgacaatccatccgcctcgtcctcccaaagtgctaggactacaggcgtgacgaccccacctgaccaatttcttgttcttttaaaagtacagtaattatttttaagttccagtaataaattaatgggtagtctgtcaaatagctactggattttatatcaggagggctttctacatgtatgtatacccaaaaatgacattaagacctttttacatacactcactgtagagatacatcccaaaacaaggtaaggaatataaatgatgtttaccttcttttcaaaccaacagttcctttatacaaaaacaccatgatgatacaaaacatatttttttaaaagtacaaagttccatacagaataaaataaacactttatggttattcctaagaataagtagtgacaaaaagtctttgcaattgggtaataaaatttcagcttctaggaatatgtttccctcttccttgtccttttgagagctgccactatcacacaattcacagcatctcttcaaccacagaaaattagcgtctcttcaagcacagagaccatatattaattatctttgtgtctcctgcataggattaactcagtgtttgttataactaagttaaactccaagacaggagcttcaaatcacctcaggcccaatccaaaactgaaaaaaagacgcttctcagagtttgagaacaaaaagatactgacaaagaacaaagccatagatacttgtgcgacattagctcccacgcgtccgcggacgcgtgggtcgagccg

SEQ ID NO: 4968 - DNA, 713 bp, Homo sapiens
  SIMILAR (31)..(270): 491254mologous to Homo sapiens PRO0113,accession number AF090894,Smith-Waterman Score=136.
aactggaaatcttttttttttttttttcatttacttttttttgagatggggtctcactatgtttatcaggctggtcttgaacttctggcctcaaatgatcctcctgcctctgcctctgcctcccaaagtgctgggattacaggcttgagccactgtgtctgtcctctttttggaattaattagggcttgttaatttttttaaattatatgttttgtgataaaacatttagaagtccatgttttttattctgtactgtgtagcttaagaaatgtcaaaaccagggagtacaggcttattgggcacactagaaacaagagtggggaaagggttaattcacagacctgggccagtctcctcctgtctttcaagggcgatgatttaccctgtgattctcagacttcacatgtaccagaaatctttgggggcaacgtgctaacgtgcaggttctcagtccctttccccagcgattttgatttcgtggaatttcagttgatcattcaggacacagtataaagttcttatgcagagagaagctgacttgaactatccctatatgactgaggtgcttttaccaggaaggggcttttatagtttcagtcatatatggatgaaaaaggtgctgtattctttttctatgaactactttgtgtattttataagcagtatatatgtactgatacttgtttatcagacattgtgcggtgcatggtgt

SEQ ID NO: 4969 - DNA, 827 bp, Homo sapiens
  SIMILAR (2)..(307): 821254mologous to Mus musculus skeletal and cardiac muscle- specific gene,accession number AJ005621,Smith-Waterman Score=408.
  misc_feature (1)...(827): n = a,t,c or g
cagtgtgaccctgactgggcccgggccctggggcttccgtctgcaggggggcaaggacttcaacatgcccctcactatctcccggatcacaccaggcagcaaggcagcccagtcccagctcagccagggtgacctcgtggtggccattgacggcgtcaacacagacaccatgacccacctggaagcccagaacaagatcaagtctgccagctacaacttgagcctcaccctgcagaagtagatcaaagcgtcccattcccatctccacgacagcacctccagtccagaccccttgccgggtgatccctcaccagaaggagcctccctattaaggacttttgccgtagacagcgctcttcccgtctacanngctgtgaattaagagccagaacaagccagagatgagtgnnacgagtggaaccgccggtcctcacccctggcagctcgcttctttcgcatctggcccaatgacggggaccgaaatcatgagaccctgttggagaactcttcggaaaggcagcccctatgagcggncnnccccgtgtgaccaccaagcaccacccgctgtggcncgctttgcagcaactgtgtgcttttccaaggcgggtttgcaccctgcacaagtgtgccacactggctngcttcgctcacacacgtgnnttaagctggcgcaggcaaggccggcctcttccgggccgcatgccgcctttagactggcaccacgntcaaagaggggccggcgccttgaccaccggggtgtannactggcgcatcgccttgtgtatcaacagggctggatctacctacgccgtccagggggcaattca

SEQ ID NO: 4970 - DNA, 408 bp, Homo sapiens
  SIMILAR (313)..(14): 1001254mologous to Homo sapiens smallest subunit of TFIIA,accession number X81713,Smith-Waterman Score=505.
agtgtggtggaattccatcacaggctacaattttcactttatccactttaataagttctgtcacctctctgaattcaacatcattcagtacaaaagtccacacattatcgcagaatctgtacgtatttagagagcccctgaaattgactctgttcctgaccctctgagccagtgctgcatttatagccttatcaaactgaagtagaacttgaagggcaagttggggggtgatctgttgagactgtatgagctcatctaggctctcctgaagactgtttcccaaagtagtatttctgtataactgatatgccatggcttaggaggaagaatttgtttttctacatttcagagcaagtgtagattctgagggactcctatttgccaaaaagacaaaactagcaaaaaaaa

SEQ ID NO: 4971 - DNA, 4795 bp, Homo sapiens
  SIMILAR (22)..(2208): 841254mologous to Mus musculus cypher1,accession number AF114378,Smith-Waterman Score=3208.
gcggccgctgacagcaccagcatgtcttacagtgtgaccctgactgggcccgggccctggggcttccgtctgcaggggggcaaggacttcaacatgcccctcactatctcccggatcacaccaggcagcaaggcagcccagtcccagctcagccagggtgacctcgtggtggccattgacggcgtcaacacagacaccatgacccacctggaagcccagaacaagatcaagtctgccagctacaacttgagcctcaccctgcagaaatcaaagcgtcccattcccatctccacgacagcacctccagtccagacccctctgccggtgatccctcaccagaaggaccccgctctggacacgaacggcagcctggtggcacccagccccagccctgaggcgagggccagcccaggcaccccaggcaccccggagctcaggcccacctttagccctgccttctcccggccctccgccttctcctcactcgccgaggcctctgaccctggccctccgcgggccagcctgagggccaagaccagcccagagggggcccgggacctactcggcccaaaagccctgccgggctcgagccagccgaggcaatataacaaccccattggcctgtactcggcagagaccctgagggagatggctcagatgtaccagatgagcctccgagggaaggcctcgggtgtcggactcccaggagggagcctccctattaaggaccttgccgtagacagcgcctctcccgtctaccaggctgtgattaagagccagaacaagccagaagatgaggctgacgagtgggcacgccgttcctccaacctgcagtctcgctccttccgcatcctggcccagatgacggggacagaattcatgcaagaccctgatgaagaagctctgcgaaggtcaagcacccctattgagcatgcgccggtgtgcaccagccaggccaccaccccgctgctgcccgcttctgcccagccacctgctgctgcctctcccagtgcggcttcgccacccctggccacagctgctgcccacactgccatcgcctccgcctccaccacagcccctgcttcaagtcctgccgacagcccaaggccccaggcctcttcctacagccccgcagtggccgcctcttcagcacctgccacccacaccagctacagtgagggccccgccgcccctgcacccaagccccgggttgtcaccactgccagcatccggccttctgtctaccagccagtgcctgcatctacctacagcccgtccccaggggccaattacagtcccactccctacaccccctcccctgcccctgcctacaccccctcccctgcccctgcctacaccccctcacctgtccccacctacactccatccccagcaccagcctataccccctcacctgcccccaactataaccctgcaccctcggtggcctacagcgggggccctgcggagcctgccagccgtccaccctgggtgacagatgatagcttctcccagaagtttgccccgggcaagagcaccacctccatcagcaagcagaccctgccccggggaggcccagcctacaccccagcgggtcctcaggtgccaccacttgccagggggaccgtccagagggctgagcgattcccagccagcagccggactccactctgcggtcactgcaacaatgtcatccggggcccatttctggtagccatgggccgttcttggcaccctgaagagttcacctgtgcctactgcaagacttccctggcagatgtgtgctttgtggaagagcagaacaacgtttactgtgagcgatgttatgagcaattctttgccccgctgtgtgccaagtgcaacaccaaaattatgggggaagtaatgcatgccttgagacagacatggcacaccacctgcttcgtctgtgcggcctgcaagaagccttttgggaacagcctctttacacatggaagacgggggagccctactgcgagaaagactacatcaatctgttcagcaccaagtgccattgctgccatttgccccgtggaggctggcgacaaggttatcgaagccctgggccacacttggcacgacacctgcttcattttgcgcagtcttgccatgtgaatctgtgaggggcagccgttctactccaagaaggacagacccctgtgcaagaagcacgcacacaccatcaacttgtaggcggccaaggccgcctgtgctgacgaggcccggagctgctcctgctgctggcaacaaaggattcgggaggctgatgtttcttctgaggggaatggggagagagaggaagcgactgagccctttggaagtataattttaggttttttcttctgtacacagatcgtgcatttgcatagttcagactaggagccaaatgaagactcaaaaccaagctagttattaatccaagactggaattgtacttcagacatttagagcagaattccaagaactcaaaagtgaaaagcaacaagcagctttcccaaagccgatacacttgctttggtcaccagagggaggaccagagctttagagccagctgttggagaatcctggaagcatttctgccggagttccttaagcgctcccctggcaaacaaattgaagtgccaaacagcactcgctgcagggtatttttagagtcatagctgagagcttgttagctaagacccattgggctttcctcaccaaaaaaggaagtgttattccattactagcgtcatggagctacctctgcgcatcagacttcagaccttgaacaaacttaaaaccttcttgggagcccggacgtccaaagagatgtcttctgggagccactgggcaattgccagggctccaggaagggctctggctcaggttgcagacagctgagaaaagatggccctgtcagccaccctctctcagtctgaaacatccaacatccccagaaggcttagctcctttttgaattgtgatgggaaagtagagttgggtttttccagttttgctctgtggtgtgtgagagatttttttaaaggctttgggttgtctttggcctttgtttagctttaagggttcgttagcatgagtgtccagtcgtgtgcatgaatttcaccccaacttgtgactgctcacttatgacgtctcccccagtaccctccatctcaaataggcttggtggcctgtggaaaagaagagagacagagagacagtgtctgaaacaggatggcagaataggctcacatgcccaaactctgggtggggaagaggaaacttactttctgccaccctcagtaagaacacacgaggaggcaggacctcccaccttcaggtctgcatcatccttttcaaatgttcctttaaatgcagcacactgagtttgtacaattgtgttaactgctggaagggacagatgcactgatatatatgcatttgctgttttggccaatattttgaaaatgtatgagctgagttgatctagctattatttaagtatttattgaagtagaggggccttcaaactactttatactagtgatagtttgagttaggtaagcatcttaaagctgtttggtgataaagaaggcagcttagattctgtggttggaaacagtgtagtcgcttccctttttaggaagccctgttaatatgctcattgaaaacatggcattgaagcaggcacttgcgtggatgtttctcacttgagcacgatatttaggctctcttccaactcactctattctgtcctcactccctgttttggattttttctcttggcatgtttgaaaatgttttatgggaatgtattagaaactctttttcttcttaagggactgagactttccaggggattgcccatctttacctgtctcttctcccatgagggagaaggaaagcagcttagcttatgtcccttagctgcaggaagcccctattttttcccaagcacgaagccaccaagtcttccccaagggagcaatcagggaagggacatgggatgtgcttccttccacagggcccgttcctacctttggatctgtgaagaaggtgaatacaaagcagcaggcagagtaaaatctgctgggactgcctggagatttgtcaggagctgcagacaagtaccttggagcattctagttatttttggaaagttcaaatatgcagggacaaggaggttgctgactgtacttgacaggctctaagtcattttctccaaaaactatctattcaattatcaggggctggtcttgaggaaggaaaaaaataaaaaaaaacgttcccaagaattcagtttccaaaatctctttttaaagggtttacacacacacacacacacacacacacacacacacacacacacacacacgatcgattaaaaagtgtatgctctttaagaagaaaagtaaaatatctcaaaggacggtttcaccaccgtccttttattgaatcaatttttctacatttcagagcaagtgtagattctgagggactcctatttgccaaaaagacaaaactagcaaaaaaaaaaacaaaaaaacaaaaaaaaaaccacttaaaagggaaccagaaaaaaaaggaacttttaaagggggttcactcagtgtctgtgagtctggtgtagtgtcaggagtaaggccgtgtctagctcaagtttacatttggatgtcctacaaccctaaccaaaattttcaaaaacccaggggggggagcacacttggaacctacatttttggccccctaatgggggactttaataaaccttttatgggccaggcccaggggctaa

SEQ ID NO: 4972 - DNA, 2925 bp, Homo sapiens
  SIMILAR (4)..(537): 661254mologous to Homo sapiens bA802N13.1.1 (chloride intracellular channel 5, isoform 1),accession number AL357057,Smith -Waterman Score=540.
  misc_feature (1)...(2925): n = a,t,c or g
cggacgcgtgggggggacgtgaagactgaccttaataacatcgaggagttcctggaggagaccttgacccctgaaaagtaccccatactggctgcaaaacaccgggaatacaacacagaggacatcgacatcttttacaagttttctgcctacatcaaaaataccaagcagcagaacaatgctgctcttgaaagaggcctaaccaaggctctaaagaaagtggatgactacctgaacacccctctaccacaggagagagacgcctacacttgtggggaagacaaggggacccggcgcaagttcctgggatggggatgagcttgaccctggcttgactgcaatctgtttgcccaagctccatgtggttcaagattgtgggcaagaaataccgcaactatcatatcccagctgatatgacaggcctgtggcggtacctcaagaacgcctatgcccgtgaatgagttcaccaacacctgtgcagctgacagtgagatcgagttggcctacgctgatgtcgccaaacgcctcagccgatcctgagcacagccattttgccccatccccgctgcagaaggactcaaccactcccctaagactccagcttcatagactcctctgtatcactgccttgaggcgcactttttataatcaagcctcatcttgctggtatcatgggaactccagcctgctatctttcatgaagtttcatctcctaaaaagcttacccagcctgagcttggggacctgtgcagaggaaactaagaaaaatgcactcatcaactccttctcccagtgaacgcccgagatctttctccagatgcttcagcctgtctggccttcttatcatatgtgcagcacatcatgtctcagcaacagtgtggtgaggtccttaggtgtcccaagaacaactcagggagcacgggagggtctgcagttgggaccccacaactatacagctatagggtaggaggcttccttttcattggtcctgaatgaatacaaatcgctcagaaagcattttggtggcacagaaaggggatgtatttgtgttgagatcttattttattttgtatttatttatcttctttgacttgcacagcactattgggggtgggggaagcagggtagtgggagacgaaggcagaagcaagagtcaaactcagaatgactgagttgaattcactgtctagtcagcaatgcctgcttctgagtttggcccagagagaaggtattgagtaagattttaataactgtaaaaagtaagctggataagtaaaatcatgatggatccaaagcacagtttcttcatctcctgataaagaaagtcaaatgcttgataaattcagagtcacagatgtgagcatagctatattcttttaaacgagaggtagagtgacctagcactaagcaaatgagctgaaatgtcggaaacagagtccatcagcttatttggccacacgatcccaaacttgttttattcttggggaaatggccctgttcctcagcattcccttcttgttgctggtggggccagtggaagtcttgatcttattcaggtaaagggccacaccaagtgcgagttttcccagggttgactttccagggcccttatcaaatgaaacaacagaagctctttcacagttctgttgccccttggccacttccacagacagacaataccaagcatcttagaactgtcataagataggtcatgcctgaaatagatcttgaccatatgagagtcccagaaatcagcaaggcctggacaaatagaactaagagagaggcagaggcaggaagctgcggagtctatcttgtaaagagtttagcatcactgtgagaagtgtgtgtccaaaattaaattaaactagaagcagcaggtgagtatttggtaagtacttctgtgactcgcctcaattcccactggccaggggccatctcaactgcacggtgaatcaagatgctggtgtcatcctccttggaaaaaggaaatgttaactcatggttaaaactaagtacaatgattcccaagggatcactttcttatttttttaaatgacattaaggagaatcttaagaaagcatcagagaaagacatgtgcatgtgaagcaccctgattctgatgttagggaaaacttaaggcgaacaggacctgctggcacacagccccattgtcttctatccattttctctttatcctttcaaatccaggcaacatgtgccctcctcatcaacacacatttttcccctttgtcagtatgcatctcccagcttagtgtcaggatcctttcgattcataattatgtatgatccaaagtgtgcataatttcatttaccgttaaagaaatagatccaattcctttcttgcaaccaaaaataaataaaatacgttgcctcaatataaggtttgggctattctgtgtttctatagaagcaatctgtttttggtaaaatgtacttttaaggatccagtcatcctgaagtattttatgtagagttagagatttcacaatattgacctatacatatattgtaaaaataataaattaccccaggctgatgtttgaatttgcccttaccttcccccggccaccctcgttgcccctattttataagctggggagttaacctagccttaacaaaagatgcttagcttttgtaaaagaacaagtgtttcattttacaaagacactccaaatgatagttacttgattttctcgagacctttaactatggtgatgaataacaggacttgctttcaacgccttaataaatnggtaaaatcgccttttaatgaagataacagctgagtgttttcctcatgaatctgaaccaattaccaatttgtgttccagtcttgattggtattgactgattcaaataaagttggtttattttcaaatattaaaaaaaaaaaaaaaaaa

SEQ ID NO: 4973 - DNA, 788 bp, Homo sapiens
  SIMILAR (4)..(207): 861254mologous to Homo sapiens muscle specific ring finger protein (MURF-1),accession number AJ291713,Smith-Waterman Score= 303.
tgggaggggcccacctgctctatgtgcaaggtgattggcatccacaacgcctgcgaagaggccccattgcacagtgtctttcacggacaaaagactgaactgaataactgtatctccatgctggtggcggcgaatgaccgcgtgcacaccatcatcactcagctggaggactcccgtcgagtgaccaaggagaacagtcaccacgtaaatagaagagctgagccagaagtttgacacgttgtatgccatcctggatgaaaagaaaagtgagttgctgctgcggatctcgcaagagcaggaaaagaagcttatcttcatcgaggccctcatccagcagtaccaggagcagctggacaagtccacaaagctggtggaaactgccatccagtccctggacgagcctgggggagccacctttctcttgactgccaagcaactcatcaaaagcattgtggaagcttccaagggctgccagctggggaagacagagcagggctttgagaacatggacttctttactttggatttagagcacatagcagacgccctgagagccattgactttgggacagatgaggaagaggaagaattcattgaagaagaagatcaggaagaggaagagtccacagaagggaaggaagaaggacaccagtaaggagctggatgaatgagaggcccccagatgcagagagactggagagggtggggaggggcccagcggccttggtgacaggcccagggtgtgaggggtcggggcccctggaggggccctggggaggtgctgcttc

SEQ ID NO: 4974 - DNA, 696 bp, Homo sapiens
  SIMILAR (373)..(525): 981254mologous to Homo sapiens Secreted protein AR260,accession number AAW27654,Smith-Waterman Score=272.
agggatcccaccccttctctgtgttttcactctgaagctctacaaactttacacctgaatgaacgccaaacctctatggatatataaaggggagcttgaggaggaatttcacagttacagtgcagaagcagaggcaagaataattaaccggctcttcagaacggcaaatcctctactcaccatgcttcctcctgccattcatttctatctccttccccttgcatgcatactaatgaaaagctgcttggcttttaaaaatgatgccacagaaatcctttattcacatgtgattaaacctgttccagcacaccccagcaccaacagcacgtttgaatcaagccagaaatggaggcaggcatttcagtaacactgggactggatcggaacactcgggttcaagtgggttgccgggaactgcgttccaccaaatacatctctggatgggccagttgcaccagcattcagccctctggaagggagctgggtgtgtggtgggcgagtgctttgcccctgccagtggttccctaactggattggaggaggctatggaacaaagtactggagcaggaggagctcccagggagtgggcggtgtgttcaatggacaaaacccgttacccagaggattcccagttgcagtgccaagatggcagcacacgcacctacaaaatcacagttagttcattgcctgcaagtt

SEQ ID NO: 4975 - DNA, 778 bp, Homo sapiens
  SIMILAR (168)..(446): 401254mologous to Homo sapiens Similar to Wiskott-Aldrich syndrome protein interacting protein,accession number BC002914,Smith-Waterman Score=157.
aactggaagaatggtgatgctgttcaagtaataaggacaaaggggaaccaggcactgtgagcctctgtggggtgtgttactcttttagctcatgtgtttcaagtcattctaccccttgccgtctccacatccaaacctaactactttggattttaattgcagctcctccacccccaccacctgtgatccgaaatggtgccaggggatgctccccctcccccaccaccataccgaatgcatggggtcaggaacccccgaggccgagggaaaggcccccacctccaccctcaagggacgccagctggggccaccccttccttccttccaccgcccctgaggaatggccacagagattctattcaccactgttccggtctttcttggatgattttgagtcaaagtattccttccatccagtagaagactttcctgctccagaagaatataaacacttttcagaggatatatcccagcaaaacaaaccgagctgcccgtgggagccccacctctgccacccattcttcaggtgaagcctggcttggtcccgttcctcatcaaaaggatggaccttctcttcttctcatatggtcccttacattcctctgaactcctgcatgatagctcctaacatgcttctccaatgcatccaatccctatactccaaatgacctaccagcatacctccatctttacatctcatctatcaattagaccatcatactcaatctctacacctactcccctatcacctacttcacgactatcctcataatatcct

SEQ ID NO: 4976 - DNA, 409 bp, Homo sapiens
  SIMILAR (2)..(148): 971254mologous to Homo sapiens acid sphingomyelinase-like phosphodiesterase,accession number Y08134,Smith-Waterman Score=258.
  misc_feature (1)...(409): n = a,t,c or g
ggtctgcgacgaggcctgcagcatgcagcacgtgtgtgccatgcgccaggtggacattgacgcttacaccacctgtctgtatgcctctggcaccacgcccgtgccccagctcccgctgctgctgatggccctgctgggcctgtgcacgctcgtgctgtgacctgccaggctcaccttcttcctggtaacgggtaacgggggcagcgcccaggatcacccagagctgggccttccaccatttcctccgcgcctgaggagtgaactgaaataggacaaccgaatcaggaagcgaagccccannnnnnnnnnnnnnnnnnnnnnnnnnnnnnnnnnnnnnnnnnnnnnnnnnnnnnnnnnnnnnnnnnnnnnnnnnnnnnnnnnnnnnnnnnnnntgacgacccagtgtatt

SEQ ID NO: 4977 - DNA, 1937 bp, Homo sapiens
  SIMILAR (322)..(531): 701254mologous to Homo sapiens acid sphingomyelinase-like phosphodiesterase,accession number Y08134,Smith-Waterman Score=221.
  misc_feature (1)...(1937): n = a,t,c or g
aatagtagccgtggacaggccctgagttaccgcgtcgacgatttcgtccctgctgggcaaaggaggaagagccagaggatccagacgctttggaggacttggaacacctgtaacaggacaaggagtcctgctccggcacgtggccacagaaaactacttaggaagcctgtggtgagaacaacaacagtgcctggagaatcccacggctctggggaagtgagccccgaggatgaggctgctcgcctggctgattttcctggctaacctggggaggtgccagggctgaaccagggaagttctggcacatcgctgacctgcaccttgacccctgactacaaggtatccaaagaccccttccaaggtgtgccaatcagctggatcccagccacgtggcccgacgcaggccccctggggtgactacctctgtgattctccgctgggccctcaatcaactcctccatctatgccatgaaggagattgagccagagccagacttcattctctggactggtgatgacacgcctcatgttgcccgaatgagaaactgggagaggcagctgtactggaaattgtggaacgcctgaccaagctcatcagagaggtctttccagatactaaagtctatgctgctttgggaaatcatgattttcaccccaaaaaccagttcccagctggaagtaacaacatctacaatcagatagcagaactatggaaaccctggcttagtaatgagtccatcgctctcttcaaaaaaggtgccttctactgtgagaagctgccgggtcccagcggagctgggcgaattgtggtcctcaacaccaatctgtactataccagcaatgcgctgacagcagacatggcggaccctggccagcagttccagtggctggaagatgtgctgaccgatgcatccaaagctggggacatggtgtacattgtcggccacgtgcccccggggttctttgagaagacgcaaaacaaggcatggttccgggagggcttcaatgaaaaatacctgaaggtggtccggaagcatcatcgcgtcatagcagggcagttcttcgggcaccaccacaccgacagctttccgaatgctctatgattatgcaggtgtctcaataagcgccatgttcatcacacctggagtcacgccatggagaaccacattacctggagtggtcaatggggccaacaatccagccatcgcgtgtcttcgaatatgaccgagccacactgagcctgaaggacatggtgacctacttcatgaacctgagccaggcgaatgctcaggggacgccgcggctgggagctcgagtaccagctgaccgaggcccaatggggtcccgcacgccaccgcccactcaatgcacacagtgctgggccgcattcgttggggacaagagcacactgcagcgctactaccgtctataactcaagtcagctactctgctggggtctgcgacgaggcctgccagcatgcagcacgtgtgtgccatgcgccaggtggacattgacgctacaaccacctgtctgtatgcctctggcaccacggccgtgccccagctcccgctgctgctgatggccctgctgggccctgtgcacgactcgtgctgtgacctgccaggctcaccattcttcctggtaacgggtaacgggggcagcgcccaggatcacccagagctgggccttccaccatttcctccgcgcctgaggagtgaactgaaaataggacaaccgaatcaggaagcgaagcccccaggagctgcagncccatcccgtgatctgcgccactgcactccagcctgggcgacaaagccagactctctccaaaaacaaaccagaaacagaaaagaaatgacgacccaagacccccctacaagcatacttcttttgcgtattatgttttactcacaaaacaaagctcatcatgcgtttg

SEQ ID NO: 4978 - DNA, 534 bp, Homo sapiens
  SIMILAR (3)..(26): 871254mologous to Homo sapiens ribosomal protein L34,accession number L38941,Smith-Waterman Score=38.
gggcctatggtgattccatgtgtgcttaaatgtgttagtgacaggatcaagcatgctttctttatcaaggagcagaaaatcattgtgaaagtgttgaaagcacaagcagggagtcagaaagctaaataaaagatgaagcttttttgagtaataaaaattaaaagactttttaaaaaaattagaaggcaggaacccagatgggaagtgtcttcctaatgctcttggccttggagggtcctttctgtgtgttcaattgacaaaatctaaaaatgcgctagcttggcaaagagaaatgtttatagggtctagctctagtatcagaaaggaaagcagaggaagggtggatttggaactgatagacaataaattgataattggcacttaaagagtagtgtaggccaggcgcagtggctcacgcctgtcatccccgcttcccaagctcctactcgccaaattatctttaagaactctgatcctcaaatgctcagggagactaatttgtgtaataataaaactctggtctcccccaaaaaa

SEQ ID NO: 4979 - DNA, 490 bp, Homo sapiens
tttttttttttttttgtgggagaccagagttttattattacacaaattagtctccctgagcatttgaggatcagagttcttaaagataatttggcgagtaggagcttgggaagcggggagtgctgattggtcaggttgaagacggaatcacagggagtcaaagtgaggttttcttgctgttttctgttcctgggtggaatggcagaactgattgagccaggttactggtctaggtagtcagctgatccaatgagtgcagggtctgcaaaacatctcaagcactaatcttaggttttacaatagttatgttattcctaaaagcaatttggggaggttcagactcttggagccgagaggctgcatgtcccctaaactgtaatttgtaatcttgtagctaatttgttagtcctgtaaagacagactgggtccccaggcaagaagggggtcttttcgggaaggggctattatcaattttgtttcaaaccataaa

SEQ ID NO: 4980 - DNA, 1434 bp, Homo sapiens
  SIMILAR (826)..(1134): 511254mologous to Rattus rattus ribosomal protein L34,accession number X14401,Smith-Waterman Score=188.
  misc_feature (1)...(1434): n = a,t,c or g
gacaccagcctttgcagagtcctcaacagccaatttatgctccaacaagcatcactaatgctatcactaacaggaggcatcaggcttctgccctgggaccagacaacgaaaatggaaggaataagaaacgtgttacaaatgagcagaccatcaacaaatatactcaggtgataggaattagcattgtgaatgttgtagcttttttctcttcttatccaacgttttcactacaatttttgtttgctttaattacggcttctgaggcgacaggacagtgtcagtcttcagccactaagccaagaaggagtcagagagccttgggccagagttccaggggctctgggagtggctgccagcgatttccaatagatttctgcgtggccttgacacagacagctagtgtgaatccccgcccacagaggggcggcacgttggttgccgtacaacgtggtggttccctgcatctctgcccacgtcggagaggtgcgtcggcttccgtacaacacggatactctctctctgacgcaacttcctgtcctgcgcaattctatttgacctttgaactggcaaaggcttttttcttcctcttccggggacgttgtctgcaggtatggatgttgttctcttttccctgtctttatttccttaccaatcggctgccatccgaggagctgaggaagcctagagctctcagaagcagtcctttgagctggtgtaggggtaaggggcacaacagggaggttggtggtgaggaagttccttactttgatctttggaaatcccttgttcctggtggcacctccaaagccgcactcagaatggtcccagcgtttgacatacccgacgtaggccttccccctacaatacagccctctaacaaaaactaggcatcggtcccacaaccaaatacctcctagaattgtttaccttttatacccaagaaggttgggaaagcaccccaatntctgcatgtggtgtgtgccccaggcaagaattcgagggggttcgtgctgtaagaccttaaagtttcttatgagattgtccaaaacaaagaaacatgtcagcagggcctatggtggttccaatgtgtgcttaaatgtgttccgtgacaggatcaagcgtgctttccttatccgaggagcagaaaatccgttgtgaaagtgttgaaggcacaagcacagagtcagaaagctaaataaaaaaaatgaaactttttttgagtaattaaaaatgaaaagacgctgtcccaataggaaaaagttgggtgtgctgggagctacctcacctcagcttgagagagccagttgtgtgcatctctttccagttttgcatccagtgacgtctgcttggcatcttgagattgttatggtgagagtatttacacctcagcaaatgctgcaaaatcctgttttcccccagagagctggagggtag

SEQ ID NO: 4981 - DNA, 369 bp, Homo sapiens
caccggggctatttattgtttaatttatttgttgaggttatttcctctgagcagtctgtcctggccccgcctgtcagaagatgaacatgtatagtggctaacttaaggggagtgggtgaccctgacacttccaggcactgtgcccagggtttgggttttaaattattgactttgtacagtctgcttgtgggctctgaaagctggggtggggccagagcctgagcgtttaatttattcagtacctgtgtttgtgtgaatgcggtgtgtgcaggcatcgcagatgggggttctttcagttcaaaagtgagatgtctggagatcatatttttttatacaggtatttcaattaaaatgtttttgtacatagtg

SEQ ID NO: 4982 - DNA, 312 bp, Homo sapiens
tatttattgtttaatttatttgttgaggttatttcctctgagcagtctgcctctcccaagcccctgacacttccaggcactgtgcccagggtttgggttttaaattattgactttgtacagtctgcttgtgggctctgaaagctggggtggggccagagcctgagcgtttaatttattcagtacctgtgtttgtgtgaatgcggtgtgtgcaggcatcgcagatgggggttctttcagttcaaaagtgagatgtctggagatcatatttttttatacaggtatttcaattaaaatgtttttgtacataaaaa

SEQ ID NO: 4983 - DNA, 435 bp, Homo sapiens; identical to SEQ ID NO: 3858
  misc_feature (1)...(435): n = a,t,c or g

SEQ ID NO: 4984 - DNA, 422 bp, Homo sapiens
  SIMILAR (1)..(174): 1001254mologous to Mus musculus putative,accession number AK002405,Smith-Waterman Score=298.
  misc_feature (1)...(422): n = a,t,c or g
agaatcactacaagaaaaactccttgtggtgaaggttctaagacgtgggatcgtttccagatgagaattcacaagcgactcattgacttgcacagtccttctgagattgttaagcagattacttccatcagtattgagccaggagttgaggtggaagtcaccattgcagatgcttaagtcaactattttaataaattgatgaccagttgttnnnnnnnnnnnnnnnnnnnnnnnnnnnggggggggccgttttaaaggatccttgggggggccaaagtttacgggggctgggaaggtaatatttttttccttttggggggccgtattaaaacctacctgggaattttgggaaaggacccttattttgggggggggacttattgggccaacctccctacagaattttaaggctttagggaaaa

SEQ ID NO: 4985 - DNA, 382 bp, Homo sapiens
  SIMILAR (300)..(380): 961254mologous to Homo sapiens unnamed protein product,accession number AK025215,Smith-Waterman Score=160.
ctgccttcagtcttcctgctagtgagaggagtctggactcccacccagatttccagatcctaaaatgaatgttccttttgctacactgcagtttgcaatttccatcttccaaatccaggagtattttgggaaggttttgtttttctgacgtctgttccacaagagcagagctcatgaatggccatgatttaattccccaagtctctgctggagccttcccagctgtcatgaggttgagtatggctttatcatcatgaaacaagtcatcagagtctttgaatcctccggtatgcttggcagagtttgtgaagcggctccggtactgcgaatacctagggaagtatttctgtgactgctgccactcatatgcagagtcgtgcat

SEQ ID NO: 4986 - DNA, 418 bp, Homo sapiens
  misc_feature (1)...(418): n = a,t,c or g
cccagccgccagcctatgccggtagttttaccccttataccccttaaaattttattttttccctaaagcctttaatttctgtagggaggttgtcccaatatgtccccccccaaaagtaagggtcctttcccaagattcccaggtaggttttaaatcggccccctataaggaaaaaacttttacgttgccagcccgggtaaagtttggcccccccagggatcctttaaaacggcccccccnnnnnnnnnnnnnnnnnnnnnnnnnnnnnnnnnnnnnnnnnnnnnnnnnnnnnnnnnnnnnnnnnnnnnnnnnnnnnnnnnnnnnnnnnnnnnnnnnnnnnnnnnnnnnnnnnnnnnnnnnnnnnnnnnnnnnnnnnnnnngacttcaaatcctgtgttgaatagaagtagtgagatcg

SEQ ID NO: 4987 - DNA, 412 bp, Homo sapiens
  misc_feature (1)...(412): n = a,t,c or g
ccccgggnnnnnnnnnnntgtgtggnngnnngnnccaacttttcaaacagcgagcgtatggaggttgttttaccccttatacccttaaaaannnnnnnnnnnccctagagccttaaatttctggagggaggttggcccaatatgtcccccccccaaagtaagggtcctttcccaaaattcccaggtaggttttaattcggccccctataaggaaaaaactattcncttgcaagcccgggtaaacttgggcccccccaggggttctttaaaacggccgccccnnnnnnnnnnnnnnnnngnnnnnnnnnnnnnnnnnnnnnnnnnnnnnnnnnnnnnnnnnnnnnnnnnnnnnnnnnnnnnnnnnnnnnnnnnnnnnnnnnnnnnnnnnnnnnnnnnnnnnccctcgcgtccg

SEQ ID NO: 4988 - DNA, 398 bp, Homo sapiens
  misc_feature (1)...(398): n = a,t,c or g
cccacgcgtncgcccacgcgtccgggctctgaaagctggggtggggccagagcctgagcgtttaatttattcagtacctgtgtttgtgtgaatgcggtgtgtgcaggcatcgcagatgggggttctttcagttcaaaagtgagatgtctggagatcatatttttttatacaggtatttcaattaaaatgtttttgtccctnnnnnnnnnnnnnnnnnnnnnnnnnnnnnnnnnnnnnnnnnnnngggggggggcccttttaaaagatccctgggggggcccaaattttccnnnnnnnnnnaaaaannnnnnnnnnnnnnnnggggggggctataaaaacccccctggggatttttgggaaaacccccttttttgggggggggaaaaaaagggacaaac

SEQ ID NO: 4989 - DNA, 1981 bp, Homo sapiens
  SIMILAR (3)..(728): 831254mologous to Homo sapiens Human serine/threonine kinase HKID-1,accession number AAB29788,Smith-Waterman Score=992.
  misc_feature (1)...(1981): n = a,t,c or g
cgaccgtgcccctggaggtggtgctgctgcgcaaggtgggcgcggcgggcggcgcgcgcggcgtcatccgcctgctggactggttcgagcggcccgacggcttcctgctggtgctggagcggcccgagccggcgcaggacctcttcgactttatcacggagcgcggcgccctggacgagccgctggcgcgccgcttcttcgcgcaggtgctggccgccgtgcgccactgccacagctgcggtgtcgtgcaccgcgacattaaggacgaaaatctgcttgcggtcctgcgctccggagagctcaagctcatcgacttcggctcgggtgcgctgctcatggacacggtctacaccgacttcgacggcacccgagtgtacagccccccggagtggatccgctaccaccgctaccacgggcgctcggacaccgtgtggtcgctgggcgtgcttctctacgatatggtgtgtggggacatccccttcgagcaggacgaggagatcctccgaggccgcctgctcttccgggagaggggtctctccagagtgccagcagctgatccggtggtgcctgtccctgcggccctcagagcggccgtcgctggatcagattgcggcccatccctggatgctgggggctgacgggggcgccccggaanaagctgtgacctgcggctgtgcaccctcgaccctgatgacgtggccagcaccacgtccagcagcgagactttgttgaggagcttgcacctgactgggagctaggggaccacctgccttggccagacctgggacgcccccagaccctgactttctcctgcgtgggccgtctcctcctgcggaagattggacctcttgacccctgggtgaccttcgctttgagtgcctttttgaaacgttggttcccgcgggaatttggttttgttcaagctctgtctgttccaaagacgtttcggttcgaggtcccgcctgccctggggtggatacttgaaccccagacgcccctctgtgctgctgtgtccggaggcggccttcccatcttgccttgcccacccggagctcttttccgccggcgcagggtcccaagcccacctcccgccctcagtcctgcggtgtgcgtctgggcacgtcctgcacacacaatgcaagtcctggcctccgcgcccgcccgcccacgcgagccgtacccgccgccaactctgttatttatggtgtgaccccctggaggtgccctcggcccaccggggcctatttattgtttaaatttatttggttgagggttaattcccctctgagccagtctgccttctccccaagcccccaggggacaagtggggagggcaggggagggggtgggctgtggtcccagggaccccccaggccctgatttcctgtcccctggcgtctgtccctggccccgcctgtcagaagatgaacatgtatagtggctaacttaaggggagtgggtgacccctgaaacttcccaggcactgtgccccagggtttgggttttaaaatattgactttgtacagtctgccttgtgggctctgaaagctggggtggggccagagcctgagcgtttaatttattcagtacctgtgtttgtgtgaatgcggtgtgtgcaggcatcgcagatcgggggttctttcagttcaaaagtgagatgtctggagatcatatttttttatacaggtatttcaactaaaatgtttttgtacatagtgnnnnnnnnnnnnnnnggggcggccgttttaaagaacccctcgggggccccaactttacccgggcatgcaacgtaatagttttttccttatagggggcccaataaaaacctacctggggatctttgggaaggaacccttacttttggggggggaccatattgggccaacctccctacagaaatttaaggctctagggaaaaaataaaattttaaagggtataaggggtaaaacaacctgcatatccttgctgtttgaaaaattg

SEQ ID NO: 4990 - DNA, 422 bp, Homo sapiens
  SIMILAR (1)..(393): 1001254mologous to Homo sapiens 1,2-alpha-mannosidase IC,accession number AF261655,Smith-Waterman Score=700.
atcgcccttggcgccgaggatgccaaggaagaaaagagggcccactaccgagagctcgcagcccagatcaccaagacgtgtcacgagtcatacgcccgctcagacaccaaacttgggcctgaggccttctggtttaactccggcagagaggccgtggccacccagctgagcgagagctactacatcctccggccagaggtggtggagagctacatgtacctgtggcgacagacccacaaccccatctacagggagtggggctgggaggtggtgctggccttggagaaatactgtcggacagaagccggtttctctgggatccaagacgtgtacagtagcacccccaaccacgacaacaagcagcagagcttttttctagcggagacactaaaggatgccttgccttttcaggatttgagact

SEQ ID NO: 4991 - DNA, 435 bp, Homo sapiens
  SIMILAR (292)..(429): 1001254mologous to Homo sapiens 1,2-alpha-mannosidase IC,accession number AF261655,Smith-Waterman Score=249.
catcttggcggagtttggatccctgcacttggaattcttacacctcactgaactctctggcaaccaggtcttcgctgaaaaggtcaggaacatccgcaaggtcctcaggaagatcgaaaagccctttggcctctaccccaacttcctcagcccagtgagtgggaactgggtgcaacaccatgtctcagttggaggactcggggacagtttttatgaatatttgatcaaatcctggttgatgtcgggcaagacagatatggaggctaaaaatatgtactacgaagccttggagacaccaaacttgggcctgaggccttctggtttaactccggcagagaggccgtggccacccagctgagcgagagctactacatcctccggccagaggtggtggagagctacatgtacctgtggcgacagacccacaacacgaaa

SEQ ID NO: 4992 - DNA, 840 bp, Homo sapiens
  SIMILAR (475)..(699): 961254mologous to Homo sapiens Human prostate cancer antigen protein sequence SEQ ID NO:1565,accession number AAB56987,Smith- Waterman Score=370.
atgcccctggtgatgaaggctggggaaaaccagagaagacaaggagacagaggcctcagcggggcaacagtcattgactccctcgataccctctacctcatggagctgaaggaggagttccaggaggccaaggcctgggtgggagagagcttccacctgaacgtgagcggagaagcatccttgtttgaggtgaacatccgctacatcgggggactcctctcagccttctacctgacaggagaagagaacaggaaaatgacagaaggagcagaaaaagcatctgtgttcttcagggcatatgcccagccttcctacttggccgtggtcagtggagatggcctgcaggaaggaagaggggaggacacagctcagggctctcggggcggtttggggatgaagcttcagagggagaccccctgctgggtaggccagtcctaccgagagccagtgcccatgggagtaactcgtataaccacagctgcacacgtgttccgaataaaggccatcaggctgggagagaagctcctgccggcgttcaacacccccacgggaatcccaaagggcgtggtgagcttcaaaagtgggaactggggctgggccacagccggcagcagcagcatcttggcggagtttggatccctgcacttggaattcttacacctcactgaactctctggcaaccaggtcttcgctgaaaaggcaagtctcctccccacccttcttcctgcggagcagagggatgagcgtgcggctgccacagggttttcagaggcgagtgggtcctccctcatggatcagcaggagggcagtggggagcccgggagcccaagctaccactaa

SEQ ID NO: 4993 - DNA, 665 bp, Homo sapiens
  SIMILAR (312)..(413): 971254mologous to Homo sapiens 1,2-alpha-mannosidase IC,accession number AF261655,Smith-Waterman Score=179.
accaaacttgggcctgaggccttctggtttaactccggcagagaggccgtggccacccagctgagcgagagctactacatcctccggccagaggtggtggagagctacatgtacctgtggcgacagacccacaaccccatctacaggggagtggggctgggaggtggtgctggccttggagaaatactgtcggacagaagccggtttctctgggatccaagacgtgtacagtagcacccccaaccacgacaacaagcagcagagcttctttctagcggagacactaaagtatctctatcttctgttctctggaagatgacttgctctccctggaagactgggtgttcaacaccgaggcccacccactcccggtgaaccactcagacagctccggcagagctgggggaagacactgaccccatctcctgccgccgccctggggccgccgcagggatgccttgccttttcaggatttgagacttgttctcaaagggattgggaacgaaggccccatcttcgggcagacccccagcaagattttgtcggacaaagcaacttttttttcccctgtgaggaggacaagactttgaggactcagcgatgttcaggccagggccatggccacactggcccacacatttcctttctacagaggatttctatgg

SEQ ID NO: 4994 - DNA, 1187 bp, Homo sapiens
  SIMILAR (266)..(895): 761254mologous to Homo sapiens 1,2-alpha-mannosidase IC,accession number AF261655,Smith-Waterman Score=780.
gagagcttccacctgaacgtgagcggagaagcatccttgtttgaggtgaacatccgctacatcgggggactcctctcagccttctacctgacaggagaagaggtgttccgaataaaggccatcaggctgggagagaagctcctgccggcgttcaacacccccacgggaatcccaaagggcgtggtgagcttcaaaagtgggaactggggctgggccacagccggcagcagcagcatcttggcggagtttggatccctgcacttgggaattcttacacctcactgaactctctggcaaccaggtcttcgctgaaaaggtcaggaacatccgcaaggttcctcaggtaagtttcgaaaagccctttggcctctaccccaacttcctcagcccagtgagtgggaactgggtgcaacaccatgtctcatttggaggactcggggacagtttttatgaatatttgatcaaatcctggttgatgtcggccaagacagatattggaggctaaaaatatgtactacggaggcctttggaggcgatagagacctacttgctgaatgtctctcccggggggctgacctacattgccgagtggcgaggggggattctggaccacaagatggggcacctggcctgtttctccgggggcatgatcgcccttggcgccgaggatgccaaggaagaaaagagggcccactaccgagagctcgcagtccagatcaccaagacgtgttacgagtcatacgcccgcttcagacaccaaacttgggcctgaggccttctggtttaactccggcagagaggccgtggccacccagctgagcgaagagttacttacatcctccggccagaggtggtggagagctacatgtacctgtgggcgacagacccacaaccccatcttacagggagtggggctgggaggtggtgctggccttggagaaatactgtcggacagaagccggtttttctggggattccaagacgtgttacagtaggcacccccaaccacggacaacaagcaggcagagcttctttctagcggagacactaaacagatgcttggtgagtgcctgcaacggaccagacactgggctagaggccagggacaccgctgagagtgagacagtcataagccctgcagtcaaggggtcaagaggggagaaagcgatggtaagggaaactgacaa

SEQ ID NO: 4995 - DNA, 1918 bp, Homo sapiens
  SIMILAR (232)..(1278): 551254mologous to Mus musculus putative,accession number AK014605,Smith-Waterman Score=1008.
  misc_feature (1)...(1918): n = a,t,c or g
atgatatttgtggttataattctaatggttgttctctccccagagggtggttctgggctggactccagccccttcctgtcggaggccaatgccgagcggattgtgcagaccttatgtacagttcgaggggccgccctcaagccctacccaccaacaggccccaacttcagatactcacacggggtccctcctcacctcttcgcttacttcccccctggttccactgtctcccaagacaacagcttcatcagccctcagctgcagcacatctttgagcgggtccgccagagcgccgacttcatgccccgctggcagatgctgagagttcttgaagaggagctcggcagggactggcaggccaaggtggcctccttggaggaggtgccctttgccgctgcctcaattgggcaggtgcaccagggcctgctgagggacgggacggaggtggccgtgaagatccagtaccccggcatagcccagagcattcagagcgatgtccagaacctgctggcggtactcaagatgagcgcggccctgcccgcgggcctgtttgccgagcagagcctgcaggccttgcagcaggagctggcttgggagtgtgactaccgtcgtgaggcggcttgtgcccagaatttcaggcagctgctggcaaatgaccccttcttccgggtcccagccgtggttaaggagctgtgcacgacacgggtgctgggcatggagctggctggaggggtccccctggaccagtgccagggcctaagccaggacctgcggaaccagatttgcttccagctcctgacgctgtgtctgcgggagctgtttgagttccgattcatgcagactgaccccaactgggccaacttcctgtatgatgcctccagccaccaggtgaccctgctggactttggtgcaagccgggagtttgggacagagttcacagaccattacatcgaggtggtgaaggctgcagctgatggagacagagactgtgtcctgcagaagtccagggacctcaaattcctcacaggctttgaaaccaaggcattctccgacgcccacgtggaggcagtgatgatcctgggggagcctttcgccacccagggcccttatgactttgggtcgggggaaacggcccgccgcattacaggacctcatcccggtgctgctgcggcaccggcttgtgtcccccacccgagggagacctatggccctggcaccgcaagctgggcaggggctttcctggcctgtgcccacctccgagaccacatcgcctgcagggaccataaaccaggacacctaccaccgctactgggccagtcgccagccagacgcagccactgccggcagcctccccaccaaagggggactcctgggtggatccctcatgacagcctccatgggggattcagtccccagagcaggccgtaccctgctgtagtgcctcttatcccttccccgtctgccctgggtcagaggagcccccttgggcttcccagtcttgcctggctctcctccttggccccaaaaactcaggaatccctggggctggggaactccccaanttcgtgccctagatcctgcacctcccccactcgaaagtgaggtatccgaaaactaagccaggggaagcggttaacttatctttgccaaaattttgagggagccttgggccgctgcatgtcgttatgcagatcagactcatcagggggaagccctcacctctgcctcaagcctcccgtggaaggcgaagatggtcctggaggcagtcctcacctcttgcctccctcgctcctccaacaagctggcttctcccgggttccagcctctcagtgtgttggaaaggtatgggtgcggggtgggggggagctgaatcttcaatcgggaataaaagcagccctccccttcaaaaaaaaaaaaa

SEQ ID NO: 4996 - DNA, 1832 bp, Homo sapiens
  SIMILAR (1640)..(1708): 601254mologous to Homo sapiens unnamed protein product,accession number AK025215,Smith-Waterman Score=56.
ctacaggttaccccacagggcttcccggtcccatgctccagcacgcagactccttgagggaaggagcacaccctgcatactgttgatgttcagcacagctttctcatatttgcccaacttgccttcatagccactgtatgaagaagtagaagacccagactcttgctttatgttggtatcaaaagtcatttcagagtcaggctgatcactcccaagtaacccactgacttctttactccagctttctgtctgctgttgactcagaatgttacacttcattatctccattgctgatataatcatatctacaacataaaagtgggcattttccttttctacatcaacaggcagcacaaatacctctggtgagaaggaattcgaagaaatggttcttctactgacttgaacagcaccttcatcagcagcagatgtcagatgggaaggctcaaaaaaagcactgtcagtctcaggatatggggaggtggccaaaatcctagggcttgtgggcagagacacccgatgagagtatcctgggcggaccatgtgtacctctgttgaggacagagagaagctgctactcttttcactcgagccatggggagaagcgctgccaacggagtctgtggtatcctcagacaacgttgtctctgccagggagtccccgaggcacgaaggtgaagggcctgagggagaggcagcatctgtcacaaaatgggtcccactgttccctgctgctggcacctgagattgcaagtcctgcggctgttgctgcacatcctgggggttaatccagacagctttgtgcctcatgagcctgatgtctaattggcaaggaggatggtcagtgttcaggaagtctgggcgatccatcaataatgccagagtgatcgctgatcccttcccagggctccacaggagaatcctgcctgactgtagattgtggcaccatctttccaggcttgtggctggtgtgaatccattcaaaacagataggagttccctgattgctggtactacttgatttgggccctgaactcaccacatggccagctgggggtctggagagctattcaggagtatgaatttctcgaagaggcagattgacacagaggagaaagtaatgattggaagccatcaaagtccatgcagtagtgacaggaggtcaatatccccattttttattttatccagccaaacccgagcggtggaacgctgcgctgggtaaacgccgcgcgtcgggtcctccctcgcgcggctccgggcagcgttccgtggccaccgcgctcccggtaacagcagaaaggggagggaggagagctgccttcagtcttcctgctagtgagaggagtctggactcccacccagatttccagatcctaaaatgaatgttccttttgctacactgcagtttgcaatttccatcttccaaatccaggagtattttgggaaggttttgtttttctgacgtctgttccacaagagcagagctcatgaatggccatgatttaattccccaagtctctgctggagccttcccagctgtcatgaggttgagtatggctttatcatcatgaaacaagtcatcagagtctttgaatcttgcgtaggaattggaagtcggggtataccaggataggttttcagcaccaggtgtggcactcaccctccggtatgcttggcagagtttgtgaagcggctccggtactgcggaatacctagggaagtatttctgtgactgctgccactcatatgcagagtcgtgcatccctgcccgaatcctgatgatgtgggacttcaagaagtactacgtcagcaatttctccaaaacagct

SEQ ID NO: 4997 - DNA, 1674 bp, Homo sapiens
  SIMILAR (1200)..(1529): 561254mologous to Homo sapiens MCT,accession number U59299,Smith-Waterman Score=278.
atgccccaggccctggagcgtgcagatggcagctgggcctgggtggtgctgctggccaccatggtgacccagggcctcaccctgggcttccccacgtgtatcggcatcttcttcactgaactgcaatgggagttccaggccagcaacagcgagacctcttggttcccctccatcctcacggctgtgctccacatggcagggcccctgtgcagcatcctggtgggacgcttcggctgccgagtgaccgtgatgctggggggcgtgctggccagcctgggcatggtggccagctccttctctcacaacctcagccagctctacttcacagcaggattcatcacaggcctgggcatgtgcttcagcttccagtcaagcatcacggtgctgggcttctactttgtccgccggcgggtgctggccaacgcgctggcctcgatgggcgtctccctgggcatcaccctctggccgctgctctcccgttaccttctggagaacctgggctggaggggtaccttccttgtcttcggcgggatctttctccactgctgcatctgcggggccatcataaggcctgtggccaccagtgtggcccctgagaccaaagaatgtcccccgccacctcccgagacacctgcacttggctgcctggctgcatgcggccggaccatccagcgccacctggccttcgacatcctgcggcacaacacaggctactgcgtgtacatactgggtgtgatgtggtccgtcctgggcttcccactgccacaagtcttcctggtgccatatgccatgtggcacagcgtggacgagcagcaggcagccctcctcatctccatcatcggcttcagcaacatcttcctgaggcccctagccgggctgatggcaggacggccggcctttgctagccaccgcaagtacctgttcagcctggcactcctgctcaatgggctcactaacctggtgtgtgcggcatcaggtgacttctgggtgctcgtgggctactgcctggcgtacagcgtgtccatgagtggcatcggcgccctcatcttccaggttctcatggacatcgtccccatggatcagttccccagagccctgggactcttcactgtcctggacggccttgctttcctcatctccccaccactggccgggttgctcctggacgccaccaacaacttttaggatgtttttcaacaatgtcccagtttctttccctaatctaaagctcccctcttaaagggtggcagctttcctccgcccccgcagaagaaggagcaaggcaagcaggctgtcgcggcggatgcccctggagcgggatctttttcttgaaagccaaagacggtcctgggaagcaacggtccccctgagatcatgtgccagtctttcccgccagccacgtccatgctggcgtcaataagcatctttggggatgtcctgcctcctccaggaccagccatgagtggctcttctggccaaaggcggtactgcaggccaagcaaacggctctgggctggaatagccctacctgagtgccctgtttgactccgccactatctgccatgtgagttgggcaaattgttgaccacctctgagccttgaaaaagtaggaggttactttgttagagcaaaataataaaatttaattttaaaaaggaaaaaaaaaaaaaaaaa

SEQ ID NO: 4998 - DNA, 1392 bp, Homo sapiens
aggccctccggacttttttccttgggttccagtttactcggggcccaggaacctgggtctgagccctgctcaagtttgtcccagccggctcagcgcagctggctgtgtgttgctgctcctacagctcaatgcactggaccttctcgtccagcctggatgcctctatcatttctctttgtctttctctggcctccataccgttctgaagagctcaccttcctctaggttcctcctgccctgctcttcccaagagacccagccctcacctgtagggcagccaaggctggtggtgcagctgcccccagtgaaagtcattgagcctcgcactgggcaatgcagaggtccaggctgaagagttgagtggcgcgcccatcctggcgcctgtgcaaagaacgggaggggggcccctggcttggatcctagaatcggtgaagtctgagggcccccctgcagtctcagcaggacctgctctatcaaggggcttcctccttcctttccccaccctgtctccttggcggggaggattagtgccaggtgggggaagccagacatttgactgacgggagaggaaggcttgccaggcagcccgaagactgttgtgaaaatggggctgcttttgcaagggaagctcttttactccccattcctgtcctccagaggccccccttttccctgccgtgttattggtgtcaaccctggggtaagtggctggctggactcacccctgctccccgtacacctgtgcctgtgactggcggtccaagctccccacacacacatcttgctggtgcctttccctgaagtcaccacccaggggctggctgtcatcagcccattcttgtcccagcagggtaccgagggaatgataaaacagaatgtgtttgaattacacacaaaaatcgttccctgcagcaggtcataaactctgtgaactaatgaagctgacaaacagagctgggagtacgtttccccttcacccttcctttcctcctaggttcagcaagggggtgctcaggtttcagggtgttgtttgttgatttcagggttcaaccagggttccgcaaggaaaaccttattcagggagatttatttttcatgaacaggtgccagtcttcccgccagccacgtcccagctggcgtcaataagcatctttggggaatgtcctgccctcctccagggacccagccatgaagtggctcttatggccaaaggcggtactgcaggccaaagcaaacggctctgggctggaatagcccctacctggagtgccctgtttgactccgccactatctgccatgtgagttggggcaaattgttgaccacctctgaagccttgaaaaagtaggaggttactttgttagagcaaaataataaaatttaattttaaaaag

SEQ ID NO: 4999 - DNA, 919 bp, Homo sapiens
  SIMILAR (1)..(39): 691254mologous to Homo sapiens Human secreted protein, SEQ ID NO: 4609,accession number AAG00528,Smith-Waterman Score=44.
cagagtcttgctctgtcactcaggctggagtgcactggtgaatcttggctcactgcaaccttcgccttccggattcaagcgattctccttcctcagtctcccgagtagctgggatcacaggcatgtgccaccacgcccagctaatttttgtatttgtagtagagacagggtttcaccatggtgaggctggtctctgccttcgcctcccaaagtgctgggattataggtgtgagccaccgcgcctgcacttgggcctccaattaaactttacttacaaggacaggtgcttggcctgatttgggtccatgggcatagtttgacaaacagtggtttgaacaaatgggacctaggggacttcagcagtaatccagtcctgaactaaggcaatactataccatttttttgtatagcttttatatttatacatgaagtgtaatatcacataacgttagctctgatctagtctgcctggctgtaagtcctggcatctcctggttattgacagtgtgacattgggcaaattaacttctctttgcgtcagttttttaattttaatctttaaaatggggataatagtacttcttacaaagggttgtaaggagtaaatgagttaaagcacataagtgtagtgcttgtacatataataaaagctcaatatgtgttaacttaatattttaaaaattattcctcatatacattattaaaggcagatctgagagatgttttaaggtagaatttactggcttaatgcatctctagctacggaggaaagacagtatccaacacttcaaggcaagggccgttcacatagaggtaatatggaagtcataaaagtaaattaagggagagagggagggtaggaaatggaggattaaggactgattttgatgggatgcacaggagagaaagtggggagagt

SEQ ID NO: 5000 - DNA, 880 bp, Homo sapiens
  SIMILAR (211)..(879): 671254mologous to Homo sapiens regulator of nonsense transcripts 2,accession number AF301013,Smith-Waterman Score=740.
atggcacttcatatgagccctttcccccggacccgccaccccagagtcaagctgagggcatcggcatgccccagggaagacgatcaggactgtttttaatcgggcagtcgcgcggatggccttttccctctcgcctccttccgccccgcccccactctcagcccggccgcgctgattgtcctgggtcacataatgccaagctgagcgtaaaaaagccaagcaagtatggaagaaaaagactctttaccaaacaacaaggaaaaagactgcagtgaaaggcggacagcgagcagcatggagaggccaaaagacgatattcaagctcacttgccaagaaggaggtcagcaaggcccctgaagacaagaagaagagactggaagatgataagagaaaaaaggaagacaaggaacgcaagaaaaaagacgaagaaaaggtgaaggcagaggaagaatcaaagaaaaaagaagaggaagaaaaaaagaaacatcaagaggaagagagaaagaagcaagaagagcaggccaaacgtcagcaagaaaaaagaagcagctgctcacatgaaagaaaaagaagaatccattcagcttcatcaggaagcttgggaacgccatcatttaaaaaaggaactttgtagcaaaaaccaaaatgctccgggcagccgaccaaaggaaaactttttcagccgccttgactcaagtttgaaaaaaaatactgcttttgtcaagaaactaaaaactattccagaacaacaaagagactccttgtcccatgattttaatggcctaaatttaagcaaatacattgcagaagctgtagcttccatcgtggaagcaaaactaaaaatctctgatgtgaactgtgctgtgcacctctgctctc

SEQ ID NO: 5001 - DNA, 994 bp, Homo sapiens
  SIMILAR (264)..(326): 471254mologous to Bos taurus 32 kd accessory protein,accession number J04204,Smith-Waterman Score=54.
actagatctagatctctttaatgccattctgatcgtaacgtctttagctccattcttccaagactgcatgtctgaaaatgctctacatgaactgaatattgaattgctacgcaataaactatacaagtcttaccttgaggcattctataaattctgtaagaatcatggtgatgtcacagcagaagttatgtgtcccattcttgagtttgaggccgacagacgtgcttttatcatcactcttaactcctttggcacggaattgggccaagaaggaccgggagaccctttatcccaacctcgggcaactcttatctgaggggtttgcgctttgtggctcaggcagaagactttgaccagatgaagaacgtagcggatcattacggagtatacaaacctttatttgaagctgtaggtggcattgggggaaagacattggaggacgtgttttacgagcgtgaggtacaaatgaatgtgctggcattcaacagacagttccactacggtgtgttttatgcatatgtaaagctgaaggaacaggaaattagaaatattgtgtggatagcagaatgtatttcacagaggcatcgaactaaaatcaacagttacattccaattttataacccaagtaaggttctcaaatgtagaaaattataaatgttaaaaggaagttatttgagagaaaataaaagaaattatgttatattatctagactacacaaaagtaagccacactatatcttcatgagttgcaaatccatggaaacacagtaaaccagccctgaaacaaagcatttccttgttttcagtggtattagatcttgtttccacatgtctgtctcattcttcactgggccttacaggttagttttaattaactctatggtatttttcttattcttgtttgatcatgttaaaaattggacctaataaaagtattttattcttgcttttccatgcttctctacaggtccaaatactgaatgtctcctttac

SEQ ID NO: 5002 - DNA, 2736 bp, Homo sapiens
  SIMILAR (2735)..(2292): 651254mologous to Homo sapiens mitochondrial aconitase,accession number U80040,Smith-Waterman Score=441.
cggatcggatccactgatggcacacgtggagctgaacttgacgccagcggcggggcggggaggcactgccctcactgttgcagttccttcattctgttgagggcactgccagcgcggaaccactcaatctgcgtcggccagtgcaggaggggaaacaaggtggctgcccctcaccccaccacctcagggggacccgggcccctaaccttgccaggggtgaagtccttcaggccctgaatggtcagcttgtccacaggcacgggcagggagagtgaccttgatcactagggatgggatgaggatggcctgggtacagactccagctcaccgtggatcctggcaaagctcttggtgatgatggcccggcccccaaggtggcgaggctccagacctccctgcacctgccttgcaggccccttcaggagtgaccactggcattgcccctatcaactctgacccaccttgtagtagcgggcagtgtcagggacggggccaaactcctgagtgacggcattgcgcacggagttggccttgccgttttcaatgttgatggcaccaatgagcaggttgttggagatgttatggacgtgccaggtgtggagcctgctgtgcaatcacacacactgtcccagcccagcctgagctgtactcacctgcccacacccagaagggggacgctggactgcgttgcgataccctctctgctctgcagccaaacctcccttccatctcccacctgcgtcttgactgtgctcacttcctccaggttcatggcccttcccgatgctcaggggacggggggccctggcagggtggggctgtcctgccgtccccatgctgctgaccttgatgaggatctgcaggtcctccaggtccttgccatcccacttgtcaaaaggctccaggagctgcaggcgctggctggtggggggtgctgtgaggttgagaaggaagtgacgtggccacacagcaaccagcaagcagggggcgtgggcgctcacccctttgggaagctcatctgcatccggagcctccagcctgaacttcttgccatgcctcctcctctgacccgccagggacccccagaggccatcccaggcttgtgcgcagctgggcagtctcacctctggggacgtgacaaaggcatgggtctcggggtttgcgttccccctccaacttctggggctctgtaccctgtgcacaaggggctgtcttgtcaaaagatacgcctcttacctggggcttgtgccgcctggaggcattactcagcatggggtgggggagatgggcagggggatatgggcactcacatagccgtcccgctcaatggtggcgcggatctgctcggaacctggagtgatggtgaactgggacttgcacttgaggccatgggccaggattgtctacagccctgggcagagccactggccctgagacctgctaaacagatggggtggaaggtgctcacccactcggatgtccagaggccatccttccttctctagaggccaacgactttctcttgactgaaacctcatcacagggaagaactgagcagttggctctgcacacacccgctcccgggctccctccagccctgcaatttaggcaggacccgccctgctccccactactctcagaaacttcttgaacccagttaattgtctcctcacctcactgaggttaatttcaatcatagctctgtcttggggaggagcgggcatgtgactgttccacccacacgggcctgcccctgccagctcaccttcccggccggtcttgctcaggtacttcttcattctactcccaactggagacccatcaggcccagcacagggtaggggccacgtcgcctggccgccttcctcaccagtgcaggagatggagtctacaccaggcccgtggtattccacgattgcacctgtgccacctttcaccgtgaggatgcctaccgtctcccgttcatccccaccaaccaccaccccacagccagcccagaatgagtccctccccaccctcaccttggggcacttcagctcccaggggatcccagccatgacatccacagcatcggcacccccaactccaatgcagatgcccccaaggccggtggatgtaaatggacacaaactaggtcagtggtccctaacagtgcccttggaagaaagggaagcacccacctccccaggatatacacgttcacacttgcacttccagagacaaaactgtccaactgtccaccaaaagctccccccataggcctggaacatacttctctggcttgggcccttgggacggcagactgagcccagctttacctggtgaatgattccagatccatccagtgtgagggtgaggcctctcgcccagtcttgcccacttgcccacccccaaagccaccttctgctcaccttggcccggcgcaggtctttctcgcccccaacctgggcttcaatcagatggtcacagtggatggtggatggcacagccaccttggacagcccgctgctgatgaactggagcatggccatctgggccgtcgcatcctgcatggccacacggtccggccgcagccgcaggtacgacttgcctcgctcaacttctctgcctgacgggcaggcagcagacgcaatgcccttgacagtcacagcctcccatctgcagccttaccgtttgcgaacaatgttaatgttcttctctagcaggtcataatggatgtactcgttgggctcaaag

SEQ ID NO: 5003 - DNA, 471 bp, Homo sapiens
  SIMILAR (2)..(283): 551254mologous to Homo sapiens mitochondrial aconitase,accession number U80040,Smith-Waterman Score=209.
tggcaagaagttcaggctggaggctccggatgcagatgagcttcccaaaggggtgagcgcccacgccccctgcttgctggttgctgtgtggccacgtcacttccttctcaacctcacagcaccccccaccagccagcgcctgcagctcctggagccttttgacaagtgggatggcaaggacctggaggacctgcagatcctcatcaaggtcagcagcatggggacggcaggacagccccaccctgccagggccccccgtcccctgagcatcgggaagggccatgaacctggaggaagtgagcacagtcaagacgcaggtgggagatggaagggaggtttggctgcagagcagagagggtatcgcaacgcagtccagcgtcccccttctgggtgtgggcaggtgagtacagctcaggctgggctgggacagtgtgtgtgattgcacagcaggctccacacctggcacgtcca

SEQ ID NO: 5004 - DNA, 489 bp, Homo sapiens
  SIMILAR (488)..(45): 651254mologous to Homo sapiens dJ347H13.1 (aconitase 2, mitochondrial (Aconitate Hydratase, EC 4.2.1.3, Citrate Hydrolyase)),accession number AL023553,Smith-Waterman Score=449.
ctccccccataggcctggaacatacttctctggcttgggcccttgggacggcagactgagcccagctttacctggtgaatgattccagatccatccagtgtgagggtgaggcctctcgcccagtcttgcccacttgcccacccccaaagccaccttctgctcaccttggcccggcgcaggtctttctcgcccccaacctgggcttcaatcagatggtcacagtggatggtggatggcacagccaccttggacagcccgctgctgatgaactggagcatggccatctgggccgtcgcatcctgcatggccacacggtccggccgcagccgcaggtacgacttgcctcgctcaacttctctgcctgacgggcaggcagcagacgcaatgcccttgacagtcacagcctcccatctgcagccttaccgtttgcgaacaatgttaatgttcttctctagcaggtcataatggatgtactcgttgggctcaaag

SEQ ID NO: 5005 - DNA, 604 bp, Homo sapiens
  SIMILAR (585)..(190): 991254mologous to Homo sapiens aconitate hydratase,accession number U87939,Smith-Waterman Score=707.
ttagatgggagtcttgtcatcaaaaataaatacagttgcatggagctgcttaagatctgaaccaaactcaaaataggaagacgggggctaaaaagttattttaagaacccccccaccacaaccacagtcactccgtgggctaagcggggagcaggaagcatgtctggtcacaccatcttggaataggaagccatgtttcttgtagtagcgggcagtgtcagggacggggccaaactcctgagtgacggcattgcgcacggagttggccttgccgttttcaatgttgatggcaccaatgagcaggttgttggagatgttatccaagtgcccacggaacttgagccaggggccagcagctgagatgtggtcagtggtacacttccctttgaccttgatgaggatctgcaggtcctccaggtccttgccatcccacttgtcaaaaggctccaggagctgcaggcgctggctggtggggctcacgtccacatgctgcccgctgctgtccttgggtgggtgctggtaggtgtcatgccctgggtcaaactcccctttgggaagctcatctgcatccggagcctccagcctggaattccaccacactgcc

SEQ ID NO: 5006 - DNA, 920 bp, Homo sapiens
  SIMILAR (518)..(132): 991254mologous to Homo sapiens aconitate hydratase,accession number U87939,Smith-Waterman Score=689.
agatgggagtcttgtcatcaaaaataaatacagttgcatggagctgcttaagatctgaaccaaactcaaaataggaagacgggggctaaaaagttattttaagaacccccccaccacaaccacagtcactccgtggggctcacgtccacatgctgcccgctgctgtccttgggtgggtgctggtaggtgtcctgccctgggtcaaactcccctttgggaagctcatctgcatccggagcctccagcctgaacttcttgccatccgtgcccgtcaggtagtcggtctctgggttgaacttgagggttcccgcaatggccagggctgtgacaatctctggggacgtgacaaaggcatgggtctcggggtttgcgtcgttgcggcccgtgaagttcctgttgtaggaggtgacgattgtgttcttctcccccttcttgatgtccttcctgttccactggccaatgcaggggccacaagcattggccaggacaatgccacccagatccctcaagatctgtgcctgccagggagagaggaagacagaatgtcaagggtgggtgagagtctgatgggaaggggtgatgtggtggctgcaggacgaagtgctgtactggaaccccagggcagccactgggacctgccccagccccggcccaacaggcctctgggcttgtgccgcctggaggcattactcagcatggggtgggggagatgggcagggggatatgggcactcacatagccgtcccgctcaatggtggcgcggatctgctcggaacctggagtgatggtgaactgggacttgcacttgaggccatgggccagtgcctgcttggccacagctgctgagcgccccatatcttcatagcttgaattggtgcagctaccaattagacctggtgcattgtgggtggtggggttaa

SEQ ID NO: 5007 - DNA, 2559 bp, Homo sapiens
  SIMILAR (1748)..(1843): 341254mologous to synthetic construct Fusion protein encoded by pURLP1.9,accession number A11178,Smith-Waterman Score=44.
atgaaaaggtcaatgacactgacaatatttcactcagaaagaatcatccttagaaaccgtcaacctcctccaaaagaaagttgggaagatatagaggatttcggggaaacacatctcgatttcttgaagcaatatggtgattttgaaaatggtattcctgttcacgatactattgccagagttgtatcctgtatcagtcctgcaaaatttcacgagtgctttattaactggatgcgtgattgccattcatcaaatgataaagacgtcattgcaattgatggaaaaacgctccggcactcttatgacaagagtcgccgcaggggagcgattcatgtcattagtgcgttctcaacaatgcacagtctggtcatcgggcagatcaagacggataagaaatccaatgagatcacagctatccctgaacttcttaacatgctggatattaaaggaaaaatcatcacaactgatgcgatggtaaactgcatcgtcaaagtcacgggcgtcttcgccatcaatggtgaccagcgggtggcggagcctgactccggagcattgtgccaggtccggtatccgggcaaccatcggaatgaccagcgatacctgttccgtcatagcgatagcgagctcctgcactggatggtggctctggatgccgctgtcaagcgggtgaagtgcctctggatgtcgctccacaaggtatacagttgtattgaactgcctgaactaccgcagccggagagcgccgggcaactctggctcacagtacgcgtagtgcaaccgaacgcgaccgcatggtcagaagccgggcacatcagcgcctggcagcagtggcgtctggcggattacctcagtgtgacgctcccggccgcgtcccacgccatcccgcatctgaccaccagcgaaatggatttttgcatcgagctgggtaataagcgttggcaatttaaccgccagtcaggctttctttcacagatgtggattggcgataaaaaacaactgctgacgccgctgcgcgatcagttcacccgtgcaccgctggataacgacattggcgtaagtgaagcgacccgcattgaccctaacgcctgggtcgaacgctggaaggcggcgggccattaccaggccgaagcagcgttgttgcagtgcacggcagatacacttgctgatgcggtgctgattacgaccgctcacgcgtggcagcatcaggggaaaaccttatttatcagccggaaaacctaccggattgatggtagtggtcaaatggcgattaccgttgatgttgaagcccgattgcgacaccagatagcccaccaattgacgcgcatcaccaccggtggcagccgcctggttaatcacacaggcgtgggtaacggcttgttcgacatccggcagcgcctgcatcacgcgatcgatttcgcccagttcgataataccaacgaagcccgcgcactggtcggcattttccttaacgatcaatatgtaaaaggcaaagcgaagaaactcaccaaagacgttgaaaccccgaaacaggccgcggtgctgggtgcaggcattatggcaaatgcggaatacagtgtgacggatgccagcggaaagatgtttaccatcaactgcacgggaaatccggaccagaacggtatttaccagcactcggtttttctgatcctcgccggggataaaacggtcagctcgcatgatgacagtaccggcatcacagtggtgatggaccataagcaatatgccattccctcaacccttggctggcgtaacggagataatgcctggttcagcttcatcatggatatccgtaaggcccggcagttcgacgtctacgtcaatgaccagaaagttggatcgtttaaccctgatgttcggaatgcacaaaaggacaagggagggttacgcaatcgtgctcggtacccggtagcccgggagcaggcacgtgacgatttcggtgaaaccgtaggtgccatactcgatacgtggcccgcgctgtctgggatttcttcttctgagtgtttaattctgccctattattctccgagccctgtcgcaagtgcggcagggctttctttatttgttttacccatactgaggagtctgcttatgacccgtctggcttcgcgctttggcgctgcaaatcttattcgccgtgaccgtccgttaacccgtgaagagttatttcgcgtggtgcccagcgtattcagtgaggataaacacgaatcccgcagtgaacgctacacgtatatacccacaatttccctgctggacagcctgcagcgggaaggcttccagccattctttgcctgtcagacacgggtacgtgacccccgtcgtcgtgagcatactaagcatatgctgcgcctacgtcgggaggggcaaattaccggtaaacaggttccggaaattatcctgcttaactctcacgatggcaccagttcgtaccagatgctgccgggcatgttcagggcggtgtgccagaacggtctggtctgcggcgagtcgtatggcgagggtgcgggtagcacacaagggggatgtggtgagtcaggttattga

SEQ ID NO: 5008 - DNA, 888 bp, Homo sapiens
  SIMILAR (169)..(522): 741254mologous to Homo sapiens dJ347H13.1 (aconitase 2, mitochondrial (Aconitate Hydratase, EC 4.2.1.3, Citrate Hydrolyase)),accession number AL023553,Smith-Waterman Score=430.
gcctggcctgaagcccatgtggccctttagggtggaaagcacccaggaccacagaacacgtgtctgaagacttgcctgcctctcacccctctgtcacccctcctgggccccggggcctgctgcctgcctctggagggcttgtcatccacccctccagggccatgccttgacctctgtcctctctacttaccacccaaggtcaaagggaagtgtaccactgaccacatctcagctgctggcccctggctcaagttccgtgggcacttggataacatctccaacaacctgctcattggtgccatcaacattgaaaacggcaaggccaactccgtgcgcaatgccgtcactcaggagtttggccccgtccctgacactgcccgctactacaaggtgggtcagagttgataggggcaatgccagtggtcactcctgaaggggcctgcaaggcaggtgcagggaggtctggagcctcgccaccttgggggccgggccatcatcaccaagagctttgccaggatccacggtgagctggagtctgtacccaggccatcctcatcccatccatagtgatcaaggtcactctccctgcccgtggctgagttgggcctggttctaggctgtgtccactgcagcccacaggcccgtcagcctcttgccccttcttaggctcacacagtgcacatccgacgctcagcttcccggcttcccgcaggccctgcttccaggcttgtagatctgagccactgagatctaggacatgtgccagggggttctttctgatcatgaatgtgcagcaggaaggcctcgcagacctcagcaccagcgcacacttgctaggggcacccctagtgaaagggagcagaccgcacgcgtgggcggacgcgtggg

SEQ ID NO: 5009 - DNA, 1164 bp, Homo sapiens
  SIMILAR (4)..(135): 841254mologous to Homo sapiens dJ347H13.5 (novel protein similar to yeast DNA-directed RNA Polymerase III 25 kD Polypeptide),accession number AL023553,Smith-Waterman Score=180.
  misc_feature (1)...(1164): n = a,t,c or g
gggttggtggacgagagctttgttgacacgtcccccacagggcccagctcagcagatgccaccacttcagtgagagctgcaaagaagagggctccgtacacgcttgtgggatccatcagtgagccaggcctgggctctcatctcctggtggaccagcaactagccctggggctggacagtggaccctaaccagcctgcgggaaaggtggtaatggcccggctgtgaaagaacaaacagcaagctgaaggcccgaatgcctaaggaagaatagtgtcctcgaagctggaanaagtgaaggccaaaggccccaggaagtgccccacccagcttgcccccgctccctcccacccatctaggccctgctccctcccttcactgcagtgatggatcccatctgtggctgtggctgttgggcctcccactgacccttgactgaaaagacccttccctggaccctggacttgacaacaaacggcacagacaccaatcactcacagaacagtcactggttttggattcttgttttccttgcaagaacaaaaggttctctagaatccttcagccaccaatgaaatgatcatggcatggagaaaaactttagatgggagtcttgtccatccaaaaataaatacagttgcatggagctgcttaagaatctgaaccaaacttcaaaatagggaagacgggggctaaaaagttattttaaggaacccccccaccacaaccacagtcactccgtggggctaagcgggggagcagggaaggcatgtctgggtcacaccatcttgggaatagggaaggccattggctgggacggatcggatccactgatgggcacacgtgggagcttgaactttgacgccagcggggtgtcggggggagggcactgccctncacatgttgcagttccttcattctgttgagggcactgcctagcngcggaaaccactcaatctgcgtcttggtaaaggggggtggttcagggagggatggttctcctggggtcccctgtggggtggcttgatggatgcactttcaggggcttgccaggggtgaagtccttcaggcccctgaatggtcagcttgtgcacagggtgaatcttgttgtagtcaacccggtcagcgaaggtcagaggccacaagcccctgttcttcaggttggt

SEQ ID NO: 5010 - DNA, 426 bp, Homo sapiens
  SIMILAR (128)..(409): 711254mologous to Homo sapiens b55C20.2 (Spinal Muscular Atrophy SMA3 LIKE protein),accession number AL021368,Smith-Waterman Score=353.
  misc_feature (1)...(426): n = a,t,c or g
naagggggtgtcgctgtggctggttctgcggtgtgcggccagccatggagcgctctgggcccagcgaagtgacaggctcagacgcatcgggaccggacccgcagcttgtggtcaccatgggcttcacggggttcggggttcggtaaaaaagctcacacatttgacttggaagcaatgtttgaacaaactcaaagaacagctgtggaaagaagtcacaaaacactgggatggtgattgctcacaccaaagccttggacccctcccagcctgtgacctttgtgaccaacgtcacctatgcagcagacaagggggctctgtatgtggatgtgatccgtgtgaacagctactactcttggtatcgcaactacgggcacctggagttgattcagctgcagctggccacccagtttgagaattggtgtaaga

SEQ ID NO: 5011 - DNA, 1152 bp, Homo sapiens
  SIMILAR (445)..(717): 841254mologous to Homo sapiens beta-glucuronidase precursor (EC 3.2.1.31),accession number M15182,Smith-Waterman Score=426.
atgcataactctgatggaattgaagtcatgaggcagcagaaagctgaaataggcagagtgggagggttagagggaattcagttgggagtaacagaagtaatagttaacggagccagaatgcttgagtcatataattgcaaagcagagttaggagcaacagggctagtgaattaccagatctccgtcaagtgcagtaaccagttcaagttggaagtgtatcttttgaatgcagaaaacaaggtcgtggacaaccaggctgggacccagggccagctgaaggtgctgggtaccaacctctggtggccgtacctgatgcacgaacaccccgcctacctgtactcgtgggagggcaggccagatggggctcaggctgtcggggcgctcacacctggcactttggctgtcgtaggtgtggctgactgcacagaagtcactggggcctttgacttctacacactccctgtggggctccgcactgtggccgtcaccgagagccagttcctcatcagtgggaaacctttctatttccacggcgtcaacaagcatgaggatgcggacatccaagggaagggcttcaactgtccgctgctggtgaaggacttcaacctgctttgctggcttggcgccaacaccttctgcaccagccactatccctacacggaggagatgctgcagatatgttaccggtatgggattgtggtcatcgatgagtgtcctgctccctcgggccacaccgtgaccctctgtcccttccctcctggcccgctggcaactcttcaacaacgtgtctatgcatcaccatatgtgggtggtggaggaaccggtgctcagagacaagaaccaccccgccatggtgatgtggtccttggccaaagagcctgcgtccttcctggaatctgccggctactccttcaagagcctgacaatggagcaaactgcacgggttctggatctggacactggagaagctgtgttgcagtacagaagcctgccaagaggagcacacaagactcttggaaagaagaggaaaatctcctcttacaatgtcgatctaacatcatgccaactagcaaaggaaaaatgtttaaagggtccaagttcatttttgcagagcagacaggaaaggatgaattcagagctgagagacaataa

SEQ ID NO: 5012 - DNA, 1101 bp, Homo sapiens
  SIMILAR (250)..(618): 831254mologous to Homo sapiens b55C20.2 (Spinal Muscular Atrophy SMA3 LIKE protein),accession number AL021368,Smith-Waterman Score=550.
agatccctgcggaaccgctccggaatttccgggtcgacgatctcgtctgcggtgtgcggccagccatggagcgctctgggcccagcgaagtgacaggctgggacgcatcgggaccggacccgcagcttgtggtcaccatgggcttcacggggttcgggggtcggtaaaaaagctcacacacttgacttggaagcaatgtttgaacaaactcaaagaacagctgtggaaagaagtcacaaaacactggggctggtgaattaccagatctccatcaagtgcagtaaccagttcaagttggaagtgtgtcttttgaatgcagaaaacaaagtcgtggacaaccaggctgggacccagggccagctgaaggtgctgggtgccaacctctggtggccgtacctgatgcacgaacaccccgcctacctggactcgtgggaggatggtgattgctcacaccaaagccttggacccctcccagcctgtgacctttgtgaccaacgtcacctatgcagcagacaagggggctctgtatgtggatgtgaccccgtgtgaacagctactactctgggtatcgcaactacgggcacctgggagttgattccagctgcagctggccgccccagtttgagaattggtgtaagacatcacaatcccattattcagagcgcgtatggagtggaaacgctttgtagggttttcaccaggatccacctctgatgttccagtgaagaggacccggaaaagtcctgctagagcagtaccatctgggtctggatcaaaaacgcagaaaatacggtggttggagagctcatctggaattttgccgatttcatgactaaccagtgtgtcagtttcttggtcgggaatgaaaatagtgccaacctgtgataccttcactctaattttactttctgaggaagttttctgtaatagttatttggtgataattattaatactggtgagaaaatcaatgtaaaagaggagaaataacccacacaaccacatacaactaggaaatgatagatggatctgaaaaaaaggatatgcactcttaacaagttcaacacccaagtactattgcaagtaccagctgtatttcatgg

SEQ ID NO: 5013 - DNA, 2341 bp, Homo sapiens
  SIMILAR (266)..(490): 661254mologous to Homo sapiens beta-glucuronidase precursor (EC 3.2.1.31),accession number M15182,Smith-Waterman Score=242.
atgcacgaaaggtggccccgaaaagtggacattgctataaagaccccgaaaatgggaaacagctttggaactgaactcaagctccatgaggagatgtttcattgtcgagagcagtcatgatggcctgcactccacacaatgcaacagagtgaaagagcaggttctgcttctttggtgtagtcctgaagcttcctaagaaacttcacatcaggtgatggataggagcaaccctgtaaaaccagccttagactattttttaaacaggctggtgaattaccaaatctccgtcaagtgcagtaaccagttcaagttggaagtgtgtcttttgaatgcagaaaacaaagtcgtggacaaccaggctgggacccagggccagctgaaggtgctgggtgccaacctctggtggccgtacctgatgcacgaacaccccgcctccctgtactcgtgggagggcaggccagatggggctcaggctgtcggggcgctcacacctggcgctttggctgtcgtaggtgcggctgactgcacagaagtcactggggcctttgacttctacacactccctgtggggctccgcactgtgcccgtcaccgagagccagtgggctctgtatgtggatgtgatccgtgtgaacagctactactcttggtatcgcaactacgggcacctggagttgattcagctgcagctgcccgcccagtttgagaattggtgtaagacatcacaatcccattattcagagcgcgtatggagtggaaacgcttatagggtttcaccaggcggagggaaccttccccatgctctgccctgttgcagccagaacctggctctcccaacattctcgccaggcactgttgttatttctttggctctctctttgatcggactgtgggctcaggagacaggagtcctatttattgttgtttcccaggatccacctctgatgttcagtgaagagtaccagaaaagtctgctagagcagtaccatctgggtctggatcaaaaacgcagaaaatacgtggttggagagctcatctggaattttgccgatttcatgactaaccagtgtaagtggcagtttagcgcatgggataatgtacccgtcctcattttttcaggttgccttgcccattctggacattttggctgtaagaatattggaaacaaagggggaaagctggtttaatccatgtagattgtgttgagaatttcctaggaaaagtaacgttgtgcttaggaagtaggaaagcagacaggcccccgcttcccacatacgggcaaaaagcaaacatgatagtctgctatactgagatggaaatggctagcttgcctttttcttggctatttcatagccaaggatgaaggaaaaactggacctcattatggatttacttttgggatacactcattattccagaggagggtaaaaggctgagaagcttaaggtatttcaggctgttttatgctactcatttgcgaccaagcaggctcatcgaatacaggagagtgtgagagcgtgttgaatatggcagcatttaaaagtcttcagaccaggcatggtggctcatgccttgtcatcccaaaaactttgggaggccaaggggggaggattgcttgaggccaggagttcgagaccagcctgttcagcatggcaggacccccatctctacaaaaactaaacagattagctaggtgtggtggtgtgtgcctgtggtcctagctgcttgggaggctgaggcaggcggatagctcgagcacacggagttggaggctgcagtgagccatgattacaccactgcacttgagcctgggcagcagagtgagacctgtctttaaaaaaaaaaaggagctgggcacggtggctcatgcctgtaatccccagcactttgggaggccgaggtgggtggatcacgaggttaggagatggagaccatccctggctaacacggtgaaaccccgtcttctactaaaaataatacaaaaaaaatcagccgggcgtggtggcgggtgcctgtagtcccagctgctcgggaggctgaggcaggagaatggcatgaacccaggagttggagcttggcagtgagccgagattgtgccactgcactccagcctgggccacggccacagagcgagactccatcttaaaaaaaaaaaaaaaaaaaatttattaagggaaactatggcctggtttttaaacttcaattctgatttaagggcaaaattgtatcaatcccctaatgccaaaaattactacttggcactaacacatttttatttatttttccttcaacggggccaggggactctggttcaatttaattttttgaaatttaacgggctg

SEQ ID NO: 5014 - DNA, 660 bp, Homo sapiens
  SIMILAR (73)..(657): 921254mologous to Homo sapiens CUA001,accession number AF248964,Smith-Waterman Score=940.
atggcagattttgggatctctgctggccagtttgtggcagtggtctgggataagtcatccccagtggaggctctgaaaggtctggtggatgagcttcaagtgaaagagctgcagcgggagcccctaacccctgaggaaatacagtctgttcgagaacaccttggtcatgaaagtgacagcctgctgtttgttcagatcacaggcaaaaaacaaaactttgaagtgggttcttctagtcagcttaagttttccatcaccaagaagtcttctccttcagtgaagcctgcagtggaccctgctgctgccaagctgtggaccctctcagccaacgatatggaggacgacagcatggatctcattgactcagatgagctgctggatccagaagatttgaagaagccagatccggcttccctgcaggctgcttcttgtggggaagggaaaaagaggaaggcctgtaagaactgcacctgtggccttgccaaagaactggaaaaagagaagtcaagggaacagatgagctcccagcccaagtcggcttgtggaaactgctacctgggtgatgccttccgctgtgccagctgcccctaccttgggatgccagccttcaaacctggggaaaaggcacttctgagcaatagcaatcttcacgatgcctag

SEQ ID NO: 5015 - DNA, 614 bp, Homo sapiens
  SIMILAR (263)..(613): 641254mologous to Homo sapiens CUA001,accession number AF248964,Smith-Waterman Score=326.
  misc_feature (1)...(614): n = a,t,c or g
gagtcgacggctggagagaagccgggagcgagcccaggcgncagtcttgattcccttttggccagcagtttttaggtctgtcagtactgcactgcaagaatggcagattttgggatctctgctggccagtttgtggcagtggtctgggataagtcatccccagtggaggctctgaaaggtctggtggataagcttcaagcgttaaccggcaatgagggccgcgtgtctgtggaaaacatcaagcagctgttgcaatgtttaagtcccaggaagcaccactcctgcacagtgcctgagattttggcctgaaatcgcccggatccttcggcctggtggaatgtctttttctgaaggagccagtagagacagctgtagataacaatagcaaagtgaagacagcatctaagctgtggttcagccctgactctttcctggtcttgtggaagtgaaagagctgcagcgggagcccctaacccctgaggaagtacagtctgttcgagaacaccttggtcatgaaagtgacaacctgctgtttgttcagatcacaggcaaaaaaccaaactttgaagtgggttcttctatgcagcttaagctttctatcaccaagaagtctt

SEQ ID NO: 5016 - DNA, 1294 bp, Homo sapiens
  SIMILAR (985)..(1257): 981254mologous to Homo sapiens CUA001,accession number AF248964,Smith-Waterman Score=489.
ctctgacgaatgacgactgcatgaattctgcacgagtggctctatgttgccaagcgagctcatgcggcagtcttgattcctttttgtccagcagtttttaggcctgtcagtactgcactgcgagaattgtagattttgagatctctgctggccagtttgtggcataggtctgggataagtcatccccagtggaggctctgaaaggtctggtggataagcttcaagcgtttaaccgggcaatgagggccgcgtgtctgtgggaaaacatcaaggcagctgttgcaattctgcccacaaagaatccagctttggacattattttgttcaggtttagtcccagggaaggcaccactctggcacagtgcttgagatttttgggctggaaatccgcccggattccttcggcctgggtggatgttctttttcctgaaggagccagtagagacagctgttagataacaataggcaaagtggaagacagcatctaagctgtgttcagccctgactctttctggtcttgtgggaagttgaaagagctgcagcgggagcccctaacccctgaggaagtacagtctgttcgagaacaccttggtcatgaaagtgacaacctgctgtttgttcagatcacaggcaaaaaaccaaactttgaagtgggttcttctaggcagcttaagctttccatcaccaagaagtcttctccttcagtgaaacctgctgtggaccctgctgctgccaagctggtggaccctctcagccaacgatatggaggacgacagcatgtgcatcttctgtggatgtagtttaactcaccgttggcctcttgagcatgtggtcaggttgaacatgatgatcaaccaaaaggaggacagggtggacaccttctttaccctggactccaagtttcctctcgaagcctgcagtcactttagcttttcattagcagagaccacgactgtatcactcattgctttgaacactctccaggatctcattgactcagatgagctgctggatccagaagatttgaagaagccagatccagcttccctgcgggctgcttcttgtggggaagggaaaaagaggaaggcctgtaagaactgcacctgtggccttgctgaagaactggaaaaagagaagtcaagggaacagatgagctcccaacccaagtcagcttgtggaaactgctacctgggcgatgccttccgctgtgccagctgcccctaccttgggatgccagccttcaaacctgggggaaaaggtgcttctgagtgatagcaatcttcatgatgcctag

SEQ ID NO: 5017 - DNA, 1807 bp, Homo sapiens
  SIMILAR (576)..(743): 661254mologous to Homo sapiens CUA001,accession number AF248964,Smith-Waterman Score=186.
atggggtttcgctatgttgcccaggctggtctcgaactcctgagctcagatccctccattcccagctctaaaacattgcaagagcaaaatgatcaaagctatccaagtacactgcctgtgtttcctgaagtcgccctgcacacgctgttgtggggggaagatgcgaacaacagcaaagtgaaagagctgcagcgggagcccctaacccctgaggaaatacagtctgttcgagaacaccttggtcatgaaagtgacaacctgctgtttgttcagatcacaggcaaaaaaccaaactttgaagtgggttcttctaggcagcttaagctttccatcaccaagaagtcttctccttcagtgaaacctgctgtggaccctgctgctgccaagctgtggaccctctcagccaactgatatggaggacgacagcatggatctcattgactcagatgagctgctggatccagaagatttgaagaagccagatccagcttcccctgcgggcttgcttcttgtggggaagggaaaaagaggaaggcctgtaagaactgcacctgtggccttgccgaagaacttggaaaaagagaagtcaagggaacagatgagctcccaacccaagtcagctttgtggaaactgctaccgtggagcgatgccttccggctgtgccagctgcccctaccttgggatgccagccttcaaacctggggaaaaggtgcttctgagtgatagcaatcttcatgatgcctaggaggttcctgacatgggacccatctgctcctccagccaactcctgtccctcacatcccaccatggtggctcctcccacctcctctggatttgttcactctgagatctgtttgcagagtagggtgcttagcagacagagtgaagctggctgggggggcacagtggtgtgttagtgctgctgtgttattcaaaagaccaaggtattatgggacctggtttcaagaaatggggatggggtttccttcaaccctcaatgttaaaggagaaggggaagtgtgtccctgaaagaaagccccttccttcctggatgttaaaaatgcctgaaccagaacggttcttgagccccaggcatccgttggagcattaaacactctgtgaacagagctgcagacccctgccttgaagtctcatcctcagcaatgctgccacccctcttgtcttttcagagttgttaagtttactccattcttttgtgacaccgagtcaagtgggctcacaacctcctcaggggcaccagaggacttcactcacttggttgctgtgatgatatccagtgtccctctgcccccttccatccccaaccacattttgactgtaggcattgcatctgtgtcctgttgtcatttatgttaaccttcagggtattaaacttggctggcatatcttggacatatcttggaggattctggcatgtcttgtaaaagagagggggatgtggcatttgtgtgtgatgttggatagtcatcccacgcctcagtttggacccattggaggaacttagtgtcacgcacaaatggggctattcctacgcttagaatagggcttgtctgcccactttagaagagtcccaggttggtgagcatttagagggaagcagggcagaactctgaacgacaatacgtctctctgagcagagacccctttgttcttgttatccacccatatggacttggaatcaatcttgccaaatatttggagagattgtgtggatttaagagacctggatttttatattttaccagtaaataaaagttttcattgatatctgtccttgaaaaaaaa

SEQ ID NO: 5018 - DNA, 486 bp, Homo sapiens
ccgcgtgtcctgttgcttccctgatcttctccgtgacctgtagctaaaccttccaccagcgcttgagaacttaatttgaaccggatcctttcccagacccctttcttcttctcctcctcctcctccacctcctccagggcgccctgaaaggaccaggacatgcggctgcgcttttggctcctcatttggctcctgctgggatttatcagccatcagcccacccctgttatcaatagtctggctgtctatcgtcatcgtgagactgactttggtgtaggagttcgagaccaccctgggccaacatggcaaaaccccatctccacaaaaattggataatttgataattatcattattggggttctgaggacggtacaacatttaacattctcttctgcaacaagttgcctttgtgtgagtatactaactttctgtagaggtatacttgtaatcacaaataagaataaattatataaaacaaaaaaaaa

SEQ ID NO: 5019 - DNA, 365 bp, Homo sapiens
  SIMILAR (3)..(170): 571254mologous to Homo sapiens Human secreted protein, SEQ ID NO: 6953,accession number AAG02872,Smith-Waterman Score=147.
ctacaggcatatggcaccacacccaactaattttttaaaaaaattttttgtagagacgggggtcttgtcatgttgcccaggttggtcttcaactcctggcctcaagggatccttctgcctcaacctcccaaagttctaggattacaagtgtgagtcgctgcacctggccatagaactttaaaataatcaatataaaaatataggaatatttaaacatagtcatgcaccatataacattttagtcaacaacggaccgtgtgcagctgtggtcccatattatactggagctgaaaaattcctactgttttgcccgtcccagctgttgtaacatcatagcacaatgccgttgtgaaacacctcgtgcc

SEQ ID NO: 5020 - DNA, 1236 bp, Homo sapiens
  SIMILAR (1)..(516): 611254mologous to Mus musculus faciogenital dysplasia protein 3,accession number AF017369,Smith-Waterman Score=591.
gagaagcagagctgtaagagctgtggtgagacctttaactccatcaccaagaggaggcatcactgcaagctgtgtggggcggtcatctgtgggaagtgctccgagttcaaggccgagaacagccggcagagccgtgtctgcagagattgtttcctgacacagccagtggcccctgagagcacagagaagacacccactgcagacccccagcccagcctgctctgcggccccctgcggctgtcaaagagcggtgagacctggagcgaggtgtgggccgccatccccatgtcatatccccaggtgctgcacctgcagggaggcagccaggacggtcggctgccccgcaccatccctctccccagctgcaaactgagtgtgccggaccctgaggagaggctggactcggggcatgtgtggaagctgcagtgggccaagcagtcctggtacctgagcgcctcctccgcagagctgcagcagcagtggctggaaaccctaagcactgctgcccatggggaacacggcccagggacagcccgggggccctgcagcttcaggtccctatgggcgcagctgctccgtgagctgagtctcccactgccctgcacaccaccacattggacctgtgctgtcctgggaggtggtgttggaaggccccatgaagagcgccctggactgctgagggtgggccaacagcccagagctcaggacacttggctttggggggaaggaaactgaggcccagagaggggcaaccactggccaagggtcacccagcaagttttggctaagagcctggcctccagccccagcagtgtggcccagagcaggggccgactgccaaagtaacccattatccatatgggcacgtgtggtgatgctggcccggaaaggcaagaaagaggcaagcatgggcactgcccagggacagccacatcctgctggtctgcagcgtggtccaccccgcctctgcccagcctgtctacaccgtgtgagctgaatcgtgacttgcttcccacctcctttctctgtcctctcctgaggttctgcctgcagcccccaggaggtgggcctgccccatcctagctggactcatggttcctaaataaccacgctcagaagctctgctaggacttaccccagccactgagtggcaggcgcatgagatttgtggctgttcctgatgctagtggcacacagtgcttatctgcataaataaacactggccaccagcagtga

SEQ ID NO: 5021 - DNA, 568 bp, Homo sapiens
ccgtgtggggcccggcagggctgtggaggcccaccccccagactctctcttctaggaggaccagccaggagctcctctccaagccagtgcctcccccagcaccagggggcccggcctccagagtgggcagggggagtgtgtcaggggcgctgagcccagagtggaatggggaacgccagcaccaccgtggagtggtcctcacacacccacagagcccaaaccaccaggcagggtcccccaaccccaacaccaggcaggctctagccaccctgtcggttcccaataagccatttattgaataaagattgaatccaaaactccaggttccaggggagtgtgattcctgagctctggctgagggtagccgggccggaagaacacccagagggagtagctatcctccatgcccttctcctctgcagcacgggttggcgcaagctcaccctgggctaaaggaaggcttgccctgccatgcccctgctcaaggacctgccagggctccctatgggcgttagtatctgatcccatccctctgcctggctttcaaggtcctctgtcccacggggct

SEQ ID NO: 5022 - DNA, 591 bp, Homo sapiens
  SIMILAR (3)..(164): 641254mologous to Homo sapiens Human myelin oligodendrocyte glycoprotein gene,accession number AAZ29204,Smith-Waterman Score= 150.
gcgacggagtcttgctctgttgcccaggttggagtgcagtggtgcgatctcagctcactgcaagctccgcctcctgggttcacaccattctcctccctcagcctccagggtagctgggactacaggagcccgccaccacacccggctaatttttttgtagttttagtggaaatgcctcggcctcccaaagcgctgggattacaggtgtgagccaccgcacccggccaagaattgctatttttaatttgactgagaacacaaacgggagtgttgatgaagactaatgaaaaatgtttgggtattctggtacttaaatgcaaaactgtgtcggaaaaaaaaatcttaaaacagggcatctatattcaaaattcaaaacattttatcccaataaataagctaaaaagcacatctttaaaaagatgttatgacacataaaaataattttatgtgttatgacacataaaaataatatgaacttcagccaggcgtggtggctcacacctgtaatcttgggaggccaaggcgggcagatcacgaggtcaggagatcgagaccatcctagccaacacggtgaaaccccatcactactta

SEQ ID NO: 5023 - DNA, 421 bp, Homo sapiens
  SIMILAR (164)..(337): 771254mologous to Homo sapiens dipeptidyl peptidase 8,accession number AF221635,Smith-Waterman Score=221.
tgggcatccacggctggtcctatggaggatacctctccctgatggcattaatgcagaggtcagatatcttcagggttgctattgctggggccccagtcactctgtggatcttctatgatacaggatacacggaacgttatatgggtcaccctgaccagaatgaacagggctattacttaggatctgtggccatgcaagcagaaaagttcccctctgaatctatcctcaggagagacacagcataagagttcctgaatcgggagaacattatgaactgcatcttttgcactaccttcaagaaaaccttggatcacgtattgctgctctaaaagtgatataattttgacctgtgtagaactctctggtatacactggctatttaaccaaatgaggaggtttaatcaacagaaaaccacggaat

SEQ ID NO: 5024 - DNA, 1203 bp, Homo sapiens
  SIMILAR (286)..(846): 991254mologous to Homo sapiens dipeptidyl peptidase 8,accession number AF221634,Smith-Waterman Score=981.
atgaagaaccctgccatcagcatcactgaaaacgtgctgcatttcaaagctcaaggacatggtgccaaaggagacaatgtctatgaatttcacctggagttcttagaccttgtgaaaccagagcctgtttacaaactgacccagaggcaggtaaacattacagtacagaagaaagtgagtcagtggtgggagagactcacaaagcaggaaaagcgaccactgtttttggctcctgactttgatcgttggctggatgaatctgatgcggaaatggagctcagagctaaggtgcagttggtgaataatcggtttaaaggagtcaagtatttccgcttgaataccctagcctctctaggttatgtggttgtagtgatagacaacaggggatcctgtcaccgagggcttaaatttgaaggcgcctttaaatataaaatgggtcaaatagaaattgacgatcaggtggaaggactccaatatctagcttctcgatatgatttcattgacttagatcgtgtgggcatccacggctggtcctatggaggatacctctccctgatggcattaatgcagaggtcagatatcttcagggttgctattgctggggccccagtcactctgtggatcttctatgatacaggatacacggaacgttatatgggtcaccctgaccagaatgaacagggctattacttaggatctgtggccatgcaagcagaaaagttcccctctgaaccaaatcgtttactgctcttacatggtttcctggatgagaatgtccattttgcacataccagtatattactgagttttttagtgagggctggaaagccatatgatttacagatagctttctgtgataattttgccttttatatttgtctagagctagccaacatggaagaagatgccagatcagctggagtcgctacctttgttctccaagaagaatttgatagatattctggctattggtggtgtccaaaagctgaaacaactcccagtggtggtaaaattcttagaattctatatgaagaaaatgatgaatctgaggtggaaattattcatgttacatcccctatgttggaaacaaggagggcagattcattccgttatcctaaaacaggtacagcaaatcctaaagtcacttttaagatgtcagaaataatgattgatgctgaaggaaggggaaacttctgcaagtaa

SEQ ID NO: 5025 - DNA, 985 bp, Homo sapiens
  SIMILAR (2)..(91): 1001254mologous to Homo sapiens dipeptidyl peptidase 8,accession number AF221634,Smith-Waterman Score=163.
caacaggggatcctgtcaccgagggcttaaatttgaaggcgcctttaaatataaaatgggtcaaatagaaattgacgatcaggtggaaggacatccaatatctagcttctcgatatgatttcattgacttagatcgtgtgggcatccacggctggtcctatggaggatacctctccctgatggcattaatgcagaggtcagatatcttcagggttgctattgctgggggccccagtcactctgtggatcttctatgatacaggatacacggaacgttatatgggtcaccctgaccagaatgaacagggctattacttaggatctgtggccatgcaagcagaaaagttcccctctgaaccaaatcgtttactgctcttacatggtttcctggatgagaatgtccattttgcacataccagtatattactgagttttttagtgagggctggaaagcaatgatgatttacagatctatcctcaggagagacacagcataagagttcctgaatcggggagaacattatgaactgcatcttttgcactaccttcaagaaaaccttggatcacgtattgctgctctaaaagtgatataatattgacctgtgtagaactctctggtatacactgagctatttaaccaaatgaggaggtttaatcaacagaaaacacagaattgatcatcacattttgatacctgccatgtaacatctactcctgaaaataaatgtggtgccatgcaggggtctacggtttgtggtagtaatctaataccttaaccccacatgctcaaaatcaaatgatacatattcctgagagacccagcaataccataagaattactaaaaaaaaaaaaaaaaaaagggggggccgttttaaagaatcaaattttacttcccggggctggcaaggttttattttttttttggggcccccaaaattaaattcccgggccggggttttacaacgcggggatgggaaaaccccg

SEQ ID NO: 5026 - DNA, 248 bp, Homo sapiens
  SIMILAR (198)..(248): 881254mologous to Mus musculus MEKK1,accession number U23470,Smith-Waterman Score=82.
tcacaggatgcgtcgccgtttgatggctattgcagatgaggtggaaattgccaagccatccagttgggcgtagaagacactttggatggtcaacaggacagttcttgcaggcatctgttcccaacaactatcagctggcactgcaacagtgtctctaagcatagacttcagggattcattccctgcagaataccttctcatctcctcaaacacagcgcaagttttctctacaattccacagaaactgc

SEQ ID NO: 5027 - DNA, 1303 bp, Homo sapiens
  SIMILAR (142)..(732): 781254mologous to Homo sapiens pregnancy-specific beta-1- glycoprotein,accession number M69245,Smith-Waterman Score=775.
atgagcttgagaagtgctccttccaccgggaagagtctcagcgcagaaggaggaaggacagcacagctgacagccgtgctctggaagcttctggatcctaggctcatctccacagaggagaacatgcacgcagcagagatcatggggcccctctcagcccctccctgcacagagcacatcaaatggaaggggctcctgctcacagcattacttttaaacttctggaacttgcctaccactgcccaagtcatgattgaagcccagccacccaaagtgtccgaggggaaggatgttcttctacttgtccacaatttgccccagaatcttactggctacatctggtacaaagggcaaatcagggacctctaccattacattacatcatatgtagtagacggtcaaataattatatatggaccggcatacagtggacgagaaacagtatattccaatgcatccctgctgatccagaatgtcacccgggaggacgcaggatcctacaccttacacatcataaagcgaggtgatgggactagaggagtaactggatatttcaccttcaccttataccataaagctgaggagcctgttccagggctgggttgtggcttcttgggcagggcttactgggaccaagaatttaccagctgtctgaggactgtgtctcctggagctgttcaccagccagggctcagccctcagagcctcatctgggcaaggacagagctttcttcacctgacactcagagtggagaggacagaaagacaagctttgtaggtcatcagccaactgccttaggaggcttaggacagtccatagaaagtctaatgtcctcagaagcagaaacagaagagagaagatgtacctggatgcagctgtctgaaaccaacaggaccctctttctatttggtgtcacaaagtatactgcaggaccctatgaatgtgaaatatggaactcagggagtgccagccgcagtgacccagtcaccctgaatctcctccatggcctggatgccctcaccatttcttcctcatacacctattaccatacaggggaagtccccaagctctcctgtctcatagacactcacccactggcagagcattcttggctgattggtgggaagttccagcaatcagcacaagtgttcttcataccccaaatcactaaaacatatagaggggtctatgtctgtttcatccataactcagccactggtggaacaaatctcataatcaagaggatcatagtccctgatcattccttgcgctctgctctatctttagaggtcactggttcaa

SEQ ID NO: 5028 - DNA, 576 bp, Homo sapiens
  SIMILAR (377)..(517): 681254mologous to Homo sapiens nuclear pore complex interacting protein NPIP,accession number AF132984,Smith-Waterman Score=162.
tgtctcaaaaaaaaaaaaaaaaatttttttttttagatcatcagctattgttagtgttagtgtatgttatgtgtggctcaagacaactttgcttcttttaatataggcagggaagtcaaaagattggatatccctgctttataccaagaaagacaacaccccacatttgcaatgcctgaaaacactaccagccatctgaaaaacatgagacttctctaacttctgttcttttttgtagcagtggaatcccacggtgatatctgagggatgtggttaccttttggaggaggttgacggtttctaaggatgattctttctgagtgaaatattgtcagtgtcattgaccttttcattatttcaactattattattccaggttatcaatactctggctgaccatcatcatcgtgggactgactttggtggaagtccttggttacatgtcattattgcgtttccgacaagttataaagttgtcattaccctctggatagtttacctttgggtgagtatactaactttctgtagaggtatacttgtaatcgcaaataagaataaattatataaaacaattca

SEQ ID NO: 5029 - DNA, 555 bp, Homo sapiens
  SIMILAR (274)..(480): 631254mologous to Homo sapiens MEK kinase 1,accession number AF042838,Smith-Waterman Score=191.
atggatcttgtgtggaccaagcaaaacctgcagctaggggagaagccaaacaagagtacagaagattcaagtctgccatctcatgctaaacctggagcatatcctttgaatggaatggagaacagaggcactggcatcccttctggaggcgagaagttcatgatcaaggtccggcagagtcagtttctggtgagggttcttttcctggcttgcagacagttgtcttctcaccgtgtcctcacacaggttttccttgatgcatggtcttccatgattcagtggggcctgctgttgcaatggggagacaactgggaaaatttctggggggggcaaccagttgggaagcagcccgattgggggacccaacccaagtttgggtcttcccagaccagtatctcaggagatgtggtggaggcatgctgcagcgttctgtcaatggtctgtgctgaccctgtctacaaagtgtacgttgctgctttactgttggagagggaattgccaggtgtctttagtggaaagatatttaacctgctgtctgactgcttattgtggtag

SEQ ID NO: 5030 - DNA, 1660 bp, Homo sapiens
  SIMILAR (1114)..(1644): 981254mologous to Escherichia coli leucine tRNA synthetase,accession number U82598,Smith-Waterman Score=946.
atggatgatcgtccagaggaacgaatgatcagggagaaactgaaggcaacctgtatgccagcctggaagcacgaatggttggaaaggagaaataggcgagggcctgtgccccccaacaataaatggtctcccccccgcattcaaattaagcattccagaaaccctccaccaatctacccgtttacgctcgaaacaaaagattgggtctcaaaaaatcaaataaaacaagctgcacagcagcaaaccgtacagcagcagcctttggctggatcacgaaggaatcaagagagcaattttaaccttactcattatggaactcagcaaatccctcctgcttacaaagatttagctgagccatggattcaggtagtcgctactccttacctcatggctatcaatgccgcatcgtccctgcgcacctgcaacaaccaccgccctgctagcatttcttaccttgattcagtcaggctactgtgtcacaaaaggccctcaaagtcatccgtatctgcgctcatcaccgtgtgtagttcatttgcaggcttcatgaggcccccgtattcactccgggccaccgtacatgtgtcatgctcaccccttgctgctttacactctattgctccctcgtccgttaaggtacgagtacaagcgtgcggcacttcggctagtccccaaataaggataatggcttttcggtatcccggtagccgcgccattttccctataatcccatgttctgcaaagcccgtccgcatgtcaacttgctcatggcgggccactgtcattgccatgagtttgcgcctaacggaggtgttaggccagcaaaatcgctacgggtcaaacaacccatacgcacatggcgcaaacctgtgtggtgaactgcccctagagctttacgtattcccgattcgcccaagtttttctacccgccctaagaccgttgcagtagatatagccagtattttcaagatccagcaatttcccagtcacttcacaactcctcaactcatcgacctcgttcgctttaactcccctgttttattacgcgtcggcgccctgttccaccagtgctcgatatcacgttcgccattgcgcaggcgttcgctcagtgacgcaaccagttcacgtgcgcgaaaggctgttttgacgcggacgtttgggctatgctatgcggatctgaaaaaccacctcaacgctacatttgtagccgtattgaaaacaggaccactggctgccatgcaagagcaataccgcccggaagagatagaatccaaagtacagcttcattgggatgagaagcgcacatttgaagtaaccgaagacgagagcaaagagaagtattactgcctgtctatgcttccctatccttctggtcgactacacatgggccacgtacgtaactacaccatcggtgacgtgatcgcccgctaccagcgtatgctgggcaaaaacgtcctgcagccgatcggctgggacgcgtttggtctgcctgcggaaggcgcggcggtgaaaaacaacaccgctccggcaccgtggacgtacgacaacatcgcgtatatgaaaaaccagctcaaaatgctgggctttggttatgactggagccgcgagctggcaacctgtacgccggaatactaccgttgggaacagaattcttcaccgagct

SEQ ID NO: 5031 - DNA, 1950 bp, Homo sapiens
  SIMILAR (295)..(1527): 831254mologous to Homo sapiens MEK kinase 1,accession number AF042838,Smith-Waterman Score=1685.
atggccctcaggcgtctttcccatgatgtcagtggggccctgctgttggcaaatggggagagcactggaaattctgggggcagcagtggaagcagcccgagtgggggagccaccagtgggtcttcccagaccagtatctcaggagatgtggtggaggcatgctgcagcgttctgtcaatggtctgtgctgaccctgtctacaaagtgtacgttgctgctttagcagtgcatgctgttggtgactctagaggatccctccagtcacttcaccaggatgcgtcgccgtttgatggctatgcagatgaggtggaaattgccgaagccatccagttgggcgtagaagacactttggatggtcaacaggacagcttcttgcaggcatctgttcccaacaactatctggaaaccacagagaacagttcccctgagtgcacaatccatttagagaaaactggaaaaggattatgtgctacaaaattgagtgccagttcagaggacatttctgagagactggccagcatttcagtaggaccttctagttcaacaacaacaacaacaacaacagagcaaccaaagccaatggttcaaacaaaaggcagaccccacagtcagtgtttgaactcctctcctttatctcatcattcccaattaatgtttccagccttgtcaaccccttcttcttctaccccatctgtaccagctggcactgcaacagatgtctctaagcatagacttcagggattcattccctgcagaataccttctgcatctcctcaaacacagcgcaagttttctctacaattccacagaaactgtcctgaaaacaaagactcagataaactttccccagtctttactcagtcaagacccttgccctccagtaacatacacaggccaaagccatctcgacctaccccaggtaatacaagtaaacagggagatccctcaaaaaatagcatgacacttgatctgaacagtagttccaaatgtgatgacagctttggctgtagcagcaatagtagtaatgctgttatacccagtgacgagacagtgttcaccccagtagaggagaaatgcagattagatgtcaatacagagctcaactccagtattgaggaccttcttgaagcatctatgccttcaagtgatacaacagtaacttttaagtcagaagttgctgtcctgtctcctgaaaaggctgaaaatgatgatacctacaaagatgatgtgaatcataatcaaaagtgcaaagagaagatggaagctgaagaagaagaagctttagcaattgccatggcaatgtcagcgtctcaggatgccctccccatagttcctcagctgcaggttgaaaatggagaagatatcatcattattcaacaggatatgacttttttccgacatatcataccaccaatacaatggatctacaaaaaggaaagtgccaatttgctaattgacagcactggtcagagactaagaattgcagattttggagctgcagccaggttggcatcaaaaggaactggtgcaggagagtttcagggacaattactggggacaattgcatttatggcacctgaggtactaagaggtcaacagtatggaaggagctgtgatgtatggagtgttggctgtgctattatagaaatggcttgtgcaaaaccaccatggaatgcagaaaaacactccaatcatcttgctttgatatttaagaaactactggattttgcaaatactgcatgtgatggtgataaggaatcagaggttgaagatgttgaaacagacagtggtaattcacctgaagatttgaggaaggaaataatgattggtttacaatatcaggcagagattcccccttatcttggagagtacgatggtaatgagaaagacagccctcaacccaagaagatgactggagtacaaaatgcaaaagaggtgctttctacctga

SEQ ID NO: 5032 - DNA, 5285 bp, Homo sapiens
  SIMILAR (4)..(4395): 881254mologous to Mus musculus MAP kinase kinase kinase 1,accession number AF117340,Smith-Waterman Score=6549.
  misc_feature (1)...(5285): n = a,t,c or g
ccgagccctgaggcaggcggcggcggaggagccctcaaggcgagcagcgcgcgcgcggctgccgcgggactgctgcgggaggcgggcagcgggggccgcgagcgggcggactggcggcggcggcagctgcgcaaagtgcggagtgtggagctggaccagctgcctgagcagccgctcttccttgccgcctcaccgccggcctcctcgacttccccgtcgccggagcccgcggacgcagcggggagtgggaccggcttccagcctgtggcggtgccgccgccccacggagccgccagccggcgcggcgcccaccttaccgagtcggtggcggcgccggacagcggcgcctcgagtcccgcagcggccgagcccggggagaagcgggcgcccgccgccgagccgtctcctgcagcggcccccgccggtcgtgagatggagaataaagaaactctcaaagggttgcacaagatggatgatcgtccagaggaacgaatgatcagggagaaactgaaggcaacctgtatgccagcctggaagcacgaatggttggaaaggagaaataggcgagggcctgtggtggtaaaaccaatcccagttaaaggagatggatctgaaatgaatcacttagcagctgagtctccaggagaggtccaggcaagtgcggcttcaccagcttccaaaggccgacgcagtccttctcctggcaactccccatcaggtcgcacagtgaaatcagaatctccaggagtaaggagaaaaagagtttccccagtgccttttcagagtggcagaatcacaccaccccgaagagccccttcaccagatggcttctcaccatatagccctgaggaaacaaaccgccgtgttaacaaagtgatgcgggccagactgtacttactgcagcagatagggcctaactctttcctgattggaggagacagcccagacaataaataccgggtgtttattgggcctcagaactgcagctgtgcacatggaacattctgtattcatctgctatttgtgatgctccgggtgtttcaactagaaccttcagacccaatgttatggagaaaaactttaaagaattttgaggttgagagtttgttccagaaatatcacagtaggcgtagctcaaggatcaaagctccatctcgtaacaccatccagaagtttgtttcacgcatgtcaaattctcatacattgtcatcatctagtacttctacatctagttcagaaaacagcataaaggatgaagaggaacagatgtgtcctatttgcttgttgggcatgcttgatgaagaaagtcttacagtgtgtgaagacggctgcaggaacaagctgcaccaccactgcatgtcaatttgggcagaagagtgtagaagaaatagagaacctttaatatgtcccctttgtagatctaagtggagatctcatgatttctacagccacgagttgtcaagtcctgtggattccccttcttccctcagagctgcacagcagcaaaccgtacagcagcagcctttggctggatcacgaaggaatcaagagagcaattttaaccttactcattatggaactcagcaaatccctcctgcttacaaagatttagctgagccatggattcaggtgtttggaatggaactcgttggctgcttattttctagaaactggaatgtgagagagatggccctcaggcgtctttcccatgatgtcagtggggccctgctgttggcaaatggggagagcactggaaattctgggggcagcagtggaagcagcccgagtgggggagccaccagtgggtcttcccagaccagtatctcaggagatgtggtggaggcatgctgcagcgttctgtcaatggtctgtgctgaccctgtctacaaagtgtacgttgctgctttaaaaacattgagagccatgctggtatatactccttgccacagtttagcggaaagaatcaaacttcagagacttctccagccagttgtagacaccatcctagtcaaatgtgcagatgccaatagccgcacaagtcagctgtccatatcaacactgttggaactgtgcaaaggccaagcaggagagttggcagttggcagagaaatactaaaagctggatccattggtattggtggtgttgattatgtcttaaattgtattcttggaaaccaaactgaatcaaacaattggcaagaacttcttggccgcctttgtcttatagatagactgttgttggaatttcctgctgaattttatcctcatattgtcagtactgatgtttcacaagctgagcctgttgaaatcaggtataagaagctgctgtccctcttaacctttgctttgcagtccattgataattcccactcaatggttggcaaactttccagaaggatctacttgagttctgcaagaatggttactacagtaccccatgtgttttcaaaactgttagaaatgctgagtgtttccagtgtttccactcacttcaccaggatgcgtcgccgtttgatggcttatgcagatgaggtggaaattgccgaagccatccagttgggcgtagaagacactttacaacgacaacaacacaacagcttttgcaggcatctgttcccaacaactatctggaaaccacagagaacagttccccttgagtgcacagtccatttagagaaaactggaaaaggattatgtgctacaaaattgagtgccagttcagaggacatttctgagagactggccaggatttcagtaggaccttctagttcaacaacaacaacaacaacaacaacagagcaaccaaagccaatggttcaaacaaaaggcagaccccacagtcagtgtttgaactcctctcctttatctcatcattcccaattaatgtttccagccttgtcaaccccttcttcttctaccccatctgtaccagctggcactgcaacagatgtctctaagcatagacttcagggattcattccctgcagaataccttctgcatctcctcaaacacagcgcaagttttctctacaattccacagaaactgtcctgaaaacaaagactcagataaactttccccagtctttactcagtcaagacccttgccctccagtaacatacacaggccaaagccatctcgacctaccccaggtaatacaagtaaacagggagatccctcaaaaaatagcatgacacttgatctgaacagtagttccaaatgtgatgacagctttggcttgagcagcaatagtagtaattgctgttataccagtgacgagacagtgttcaccccagtagaggagaaatgcagattagatgtcaatacagagctcaactccagtattgaggaccttcttgaagcatctatgccttcaagtgatacaacagtaacttttaagtcagaagttgctgtcctgtctcctgaaaaggctgaaaatgatgatacctacaaagatgatgtgaatcataatcaaaagtgcaaagagaagatggaagctgaagaagaagaagctttagcaattgccatggcaatgtcagcgtctcaggtagccctccccatagttcctcagctgcaggttgaaaatggagaagatatcatcattattcaacaggatacaccagagactctaccaggacataccaaagcaaaacaaccgtatagagaagacactgaatggctgaaaggtcaacagataggccttggagcattttcttcttgttatcaggctcaagatgtgggaactggaactttaatggctgttaaacaggtgacttatgtcagaaacacatcttctgagcaagaagaagtagtagaagcactaagagaagagataagaatgatgagccatctgaatcatccaaacatcattaggatgttgggagccacgtgtgagaagagcaattacaatctcttcattgaatggatggcagggggatcggtggctcatttgctgagtaaatatggagccttcaaagaatcagtagttattaactacactgaacagttactccgtggactttcgtatctccatgaaaaccaaatcattcacagagatgtcaaaggtgccaatttgctaattgacagcactggtcagagactaagaattgcagattttggagctgcagccaggttggcatcaaaaggaactggtgcaggagagtttcagggacaattactggggacaattgcatttatggcacctgaggtactaagaggtcaacagtatggaaggagctgtgatgtatggagtgttggctgtgctattatagaaatggcttgtgcaaaaccaccatggaatgcagaaaaacactccaatcatcttgctttgatatttaagattgctagtgcaactactgctccatcgatcccttcacatttgtctcctggtttacgaagatgtggctcttcgttgtttaagaacttcaaccttcanggacagacctccatcaagagagctactgaagcatccagtctttcgtactacatggtagccaattatgcagatcaactacagtagaaacaggatgctcaacaagagaaaaaaaacttgtggggaaccacattgatattctactggccatgatgccactgaacagctatgaacgaggccagtggggaacccttacctaagtatgtgattgacaaatcatgatctgtacctaagctcagtatgcaaaagcccaaactagtgcagaaactgtaaactgtgcctttcaaagaactggccctaggtgaacaggaaaacaatgaagtttgcatgactaaattgcagaagcataattttatttttttggagcactttttcagcaatattagcggctgaggggctcaggatctattttaatatttcaattattcttccatttcatatagtgatcacaagcagggggttctgcaattccgttcaaattttttgtcactggctataaaatcagtatctgcctcttttaggtcagagtatgctatgagtagcaatacatacatatatttttaaaagttgagacttctttatgacccacagctgacctttattttcttaaataccacggcagttgtggctcattgtgcattttactgttggcccattcattccgttattggaaattatggttttggattttcatgtctatttacattcttttttgtttattcagggaaagctgatctttttttctaaccagaaaaaaaaaaatgaactataattgaagttcagttccttaaatatcttgctatggtccgaggttttaaaaatagacttaattttgttttttaaattggaaaacg

SEQ ID NO: 5033 - DNA, 2085 bp, Homo sapiens
  SIMILAR (871)..(1968): 891254mologous to Homo sapiens putative p150,accession number U93569,Smith-Waterman Score=1773.
atggagtgggtactgcttggatctccttctagaaaacctgttggagaagcatggttgactgcagatccaccatatttgtaccgaggccatctttctaccagtctagttacagccagcttccattgcaacttctacagaaagttcaggaaaataacgactttcaacattatagaatttcaagttagaagtgatcattttcaactgatgaatctcattgaggaagatgaggcatcaagaggtagaagactaactcagcaggtgactatggaaatggtgtcagacaaaaagcaaattcgagtgattttcttattcaatttaaaaatgggtcataaagcagcagagacaactcgcaatatcaacaacgcatttggccaaggaactgctaacaaatgtacagtgctcaagaagttttgcagaggagacgagagccttgaagatgaggagcatagtgaccagccatcagaagttaacaactgccaactgagagcaattattgaagctgatcctcttacaaccacacaagaagttgccaaagagcttgacgtcgaccattccagggtcgcttggcatttgaagcaaattggaaaggtgaaaaagctcaataactttctgaatcctggtgaaaccattatatctgaggactatgctcagcaaatctatgagatgcaccaaaaactgccacacctgcaactggcattggtcaatagaaagggcccaattcttctccatgacaacgcccaaccacacgtcgcacaaccaatgcttcaaaagttcaatgcattgggctaccaagttttggctcatccttcatattcacctgacctctcatcaacagactaccacttcttcaagcatctccacaactttttgcagagaataaaatacctaggaatccaacttacaatggatgtgaaggacctcttcaagaagaactacaaaccactgctcaatgaaataaaaggggacacaaacaaacggaagaacattccatgctcatggataggaataatcaatatcatgaaaatggccatactgccagaggtaatttatagattcaatgccatccccatcaagctaccaatgactttcttcacagaattggaaaaaactactttaaagttcatatggaaccaaaaaagagctcgcattgctgagtcaatcctaagccaaaagaacaaagctggaggcatcacactacctgacttcaaactatactacaagactacagtaaccaaaacagcatggtactggtaccaaaacagagatatcgaccaatggaacagaacagagccctcagaaataataccacacatctacaactatctgatctttgacaaacctgacaaaaacaagaaatggggaaaggataccctatttaacaaatggtgctgggaaaactggctagccatatgtagaaagctgaaactggatcccttccttacaccttatacaaaaattaattcaagatggattaaagacttaaatatgagacctaaaaccataaaaaccccagaagaagacctaggcattaccattcaggacataggcatgggcaaggacttcatgtctaaaacaccaaaagcaatggcaacaaaagccaaaattgacaaatgggatctaattaaactaaagagcttctgcacagcaaagggaactaccatcagagtgaacaggcaacctacagaatgggagaaaatttttgcagtctactcatctgataaagtgctaatatccagaatctacaaagaactcatacaaatttacaagaaaaaaacaaacaaccccagtaaaaagtgggtgaaggatatgaacagacacttctcaaaagaagacatttatgcagccaacagacacaggaaaaaatgctcaccatcactggccatcagagaaatgcaaatcaaaaccacaatgagatatcatctcacaccagttagaatagcgaccattaaaaagtcaggaaacaacagagacatggatgaagctggaaaccatcattctcagcaaactatcgcaaagacagaaaaccaaacaccgcatgttctcactcataggtgggaattgaacaatgagaacacttggacacag

SEQ ID NO: 5034 - DNA, 1281 bp, Homo sapiens
  SIMILAR (797)..(889): 931254mologous to Homo sapiens putative p150,accession number U93574,Smith-Waterman Score=148.
atggataaattcctcgacacatacactctcccaagactaaaccaggaagaagttgaatctctgaatacaccaataacaggatctgaaattgaggcaataattaatagcttaccaaccaaaaaaagtccgggactagatggattcacagccaaattctaccagagggcaatcaggcaggagaaggaaataaagggcattcaattaggaaaagaggaagtcaagttgtccctgtttgcagatgacatgattgtatatctagaaaacgccatcatctcagcccaaaatctccttaagctgataagcaacttcagcaaagtctcaggatacaaaatcaatgtgcaaaaatcacaagcattcttacacaccaataacagacaaacagagagccaaatcatgagtgaactcccattcacaattgcttcaaagagaataaaatacctaggaatccaacttataagggacgtgaaggacctcttcaaggaaaactacaaaccactgctcaatgaaataaaagaggatacaaacaaatggaagaacattccatgctcatgggtaggaagaatcaatatcgtaaaaatggccatactgcccaaggtaatttatagattcaatgccatccccatcaagctaccaatgactttcttcacagaattggaaaaaacgactttcaagttcatatggaaccaaaaaagagcccgcatcgccaagtcaatcctaagccaaaagaacaaagctggaggcatcacgctacctgacttcaaactatactacaaggctacagtaaccaaaacagcatgggacatggatgaagctggaaaccatcattctcagcaaactatcacaaggacaaaaaaccaaacaccgcatgttctcactcataggtgggaattgaacaatgagaacacatggacacaggaaggggaacatcacacaccggggcttgttgtgcggaggagtccagaccctgagcagaacttcaaggctgtcaggtgtttggaccttcctgatcttcaagctcgtttttggctgtcctcacatttcatttcaaaccagccttccttcagtcccttagatgagataagccacgctctttcctgccttggggacttggcacaagccatgaaaaataactcccaagaaacagatcaggcaatcaccaaacctaacacagaatacaggacagcagtgaagccttcagttgtgggagcacttccagatatcaactcatttctaaagcttggaggcctgcatcgaatcactaatggctgcctccttgattga

SEQ ID NO: 5035 - DNA, 2748 bp, Homo sapiens
  SIMILAR (1)..(1464): 961254mologous to Homo sapiens putative p150,accession number U93563,Smith-Waterman Score=2438.
atgggagactttaacaccccactgtcaacattagacagatcaacgagacagaaagtcaacaaggatacccaggaattgaactcagctctgcaccaagcggacctaatagacatctacagaactctccaccccaaatcaacagaatatacatttttttcagcaccacaccacacctattccaaaattgaccacatagttggaagtaaagctctcctcagcaaatgtaaaagaacagaaattataacaaactatctctcagaccacagtgcaatcaaactagaactcaggattaagaatctcactcaaagccactcaactacatggaaactgaacaacctgctcctgaatgactactgggtacataacgaaatgaagtcagaaataaagatgttctttgaaaccaacgagaacaaagacacaacataccagaatctctgggatgcattcaaagcagtgtgtagagggaaatttatagcactaaatgcccacaagagaaagcaggaaagatccaaaattgacaccctaacatcacaattaaaagaactagaaaagcaagagcaaacacattcaaaagctagcagaaggcaagaaataactaaaatcagagcagaactgaaggaaatagagacacaaaaaacccttcaaaaaatcaatgaatccaggagctggttttttgaaaggatcaacaaaattgatagaccactagcaagactaataaagaaaaaaagagagaagaatcaaatagacacaataaaaaatgataaaggggatatcaccaccgatcccacagaaatacaaactaccatcagagaatactacaaacacctctacgcaaataaactagaaaatctagaagaaatggataaattcctcgacacatacactctcccaagactaaaccaggaagaagttgaatctcttaatagaccaataacaggagctgaaattgtggcaataatcaatagcttaccaaccaaaaagagtccaggaccagatggattcacagccgaattctaccagaggtacaaggaggaactggtaccattccttctgaaactattccaatcaatagaaaaagagggaatcctccctaactcattttatgaggccagcatcattctgataccaaagccgggcagagacacaacaaaaaaagagaattttagaccaatatccttgatgaacactgatgcaaaaatcctcaataaaatactggcaaaccgaatccagcagcacatcaaaaagcttatccaccatgatcaagtgggcttcatccctgggatgcaaggctggttcaatatacgcaaatcaataaatgtaatccagcacataaacagaaccaaagacaaaaaccacatgattatctcaatagatgcagaaaaagcctttgacaaaattcaacaacccttcatgctaaaaactctcaataaattagaattggaaaaaactactttaaacttcatatggaaccaaaaaagagcccgcattgccaagtcaatcctaagccaaaagaacaaagctggaggcatcacactacctgacttcaaactttactacaaggctacagtaaccaaaacagcatggtattggtaccaaaacagagatatagatcaatggaacagaacagagccctcagaaataacaccgcatacctacaactgtctgatctttgacaaacctgagaaaaacaagaaatggggaaaggattccctatttaataaatggtgctgggaaaactggctagccatatgtagaaagctgaaactggatcccttccttacaccttatacaaaaatcaattcaagatggattaaagatttaaacgttagacctaaaaccataaaaaccctagaagaaaacctaggcattaccattcaggacataggcatgggcaaggacttcatgtccaaaacaccaaaagcaatggcaacaaaagacaaaattgacaaatgggatctaattaaactaaagagcttctgcacagcaaaagaaactaccatcagagtgaacaggcaacctacaacatgggagaaaattttcgcaacctactcatctgacaaagggctaatatccagaatctacaatgaactcaaccaaatttacaagaaaaaaacaaacaaccccatcaaaaagtgggcgaaggacatgaacagacacttctcaaaagaagacatttatgcagccaaaaaacacatgaaaaaatgctcatcatcactggccatcagagaaatgcaaatcaaaaccacaatgagataccatctcacaccagttagaatggcaatcattaaaaagtcaggaaacaacaggtgctggagaggatgtggagaaatacgaacacttttacattgttggtgggactgtaaactagttcaaccattgtggaagtcagtgtggcgattcctcagggatctagaactagaaataccatttgacccagccatcccattactgggtatatacccaaatgactataaatcatgctgctataaagacacatgcacacgtatgtttattgcggcattattcacaatagcaaagacttggaaccaacccaaatgtccaacaatgatagactggattaagaaaatgtggcacatatacaccatggaatactatgcagccataaaaaatgatgagttcatgtcctttgtagggacatggatgaaattggaaatcatcattctcagtaaactatcacaagaacaaaaaaccaaacaccgcatattctcactcataggtgggaattga

SEQ ID NO: 5036 - DNA, 3300 bp, Homo sapiens
  SIMILAR (1627)..(3297): 971254mologous to Homo sapiens putative p150,accession number U93563,Smith-Waterman Score=2950.
atgggagactttaacaccccactgtcaacattagacagatcaacgagacagaaagtcaacaaggatacccaggaattgaactcagctctgcaccaagcagacctaatagacatctacagaactctccaacccaaatcaacagaatatacatttttttcagcaccacaccacacctattccaaaattgaccacatagttggaagtaaagctctcctcagcaaatgtaaaagaacagaaattataacaaactatctctcagaccacagtgcaatcaaactagaactcaggattaagaatctcactcaaagccgctcaactacatggaaactgaacaacctgctcctgaatgactactgggtacataacgaaatgaaggcagaaataaagatgttctttgaaaccaacgagaacaaagacacaacataccagaatctctgggacgcattcaaagcagtgtgtagagggaaatttatagcactaaatgcccacaagagaaagcaggaaagatccaaaattgacaccctaacatcacaattaaaagaactagaaaagcaagagcaaacacattcaaaagctagcagaaggcaagaaataactaaaatcagagcagaactgaaggaaatagagacacaaaaaacccttcaaaaaatcaatgaatccaggagctggttttttgaaaggatcaacaaaattgatagaccactagcaagactaataaagaaaaaaagagagaagaatcaaatagacacaataaaaaatgataaaggggatatcaccactgatcccacagaaatacaaactaccatcagagaatactacaaacacctctacgcaaataaactagaaaatctagacgaaatggataaattcctccacacatacactctcccaagactaaaccaggaagaagttgaatctctgaatggaccaataacaggagctgaaattgtggcaataatcgatagtttaccaaccaaaaagagtccaggaccagatggattcacagctgaattctaccagaggtacaaggaggaactggtaccattccttctgaaactattccaatcaatagaaaaagagggaatcctccctaactcattttatgaggccagcatcattctgataccaaagctgggcagagacacaaccaaaaaagagaattttagaccactatccttgatgaacattgatgcaaaaatcctcaataaaatactggcaaaacgaatccagcagcacatcaaaaagcttatccaccatgatcaagtgggcttcatccctgggatgcaaggctggttcaatatacgcaaatcaataaatgtaatccagcatataaacagaggcaaagacaaaaaccacatgattatctcaatagatgcagaaaaagcctttgacaaaattcaacaacccttcatgctaaaaactctcaataaattaggtattgatgggacgtatttcaaaataataagagctatctatgacaaacccacagccaatatcatactgaatgggcaaaaactggaagcattccctttgaaaactggcacaagacagggatgccctctctcaccactcctattcaacatagtgttggaagttctggccagggcaattaggcaggagaaggaaataaagctgataagcaacttcagcaaagtctcaggatacaaaatcaatgtacaaaaatcacaagcattcttatacaccaacaacagacaaacagagagccaaatcatgagtcaactcccattcacaattgcttcaaagagaataaaatacctaggaatccaacttacaagggatgtgaaggacctcttcaaggagaactacaaaccactgctcaaggaaataaaagaggatacaaacaaatggaagaacattccatgctcatgggtaggaagaatcaatatcatgaaaatggccatactgcccaaggtaatttacagattcaatgccatccccatcaagctaccaatgactttcttcacagaattggaaaaaactactttcaagttcatatggaaccaaaaaagagcctgcatcaccaagtcaatcctaagccaaaagaacaaagctggaggcatcacgctacctgacttcaaactatactacaaggctacagtaaccaaaacagcatggtactggtaccaaaacagagatatagatcaatggaacagaacagagccctcagaaataatgctgcatatctacaactatctgatctttgacaaacctgagaaaaacaagcaatggggaaaggattccctatttaataaatggtgctgggaaaactggctagccatatgtagaaagctgaaactggatcccttccttacaccttatacaaaaatcaattcaagatggattaaagatttaaacgttagacctaaaaccataaaaaccctagaagaaaacctaggcattaccattcaggacataggcatgggcaaggacttcatgtccaaaacaccaaaagcaatggcaacaaaagccaaaattgacaaatgggatctaattaaactaaagagcttctgcacagcaaaagaaactaccatcagagtgaacaggcaacctacaaaatgggagaaaattttcgcaacctactcatctgacaaagggctaatatccagaatctacaatgaactcaaacaaatttacaagaaaaaaacaaacaaccccatcaaaaagtgggcgaaggacatgaacagacacttctcaaaagaagacatttatgcagccaagaaacacatgaaaaaatgctcatcatcactggccatcagagaaatgcaaatcaaaaccacaatgagataccatctcacaccagttagaatggcaatcattaaaaagtcaggaaacaacaggtgctggagaggatgtggagaaataggaacacttttacactgttggtgggactgtaaactagttcaaccattgtggaagtcagtgtggcgattcctcagggatctagaactagaaataccatttgacccagccatcccattactgggtatatacccaaaggactataaatcatgctgctataaagacacatgcacacgtatgtttattgcggcattattcacaatagcaaagacttggaaccaacccaaatgtccaacaatgatagactggattaagaaaatgtggcacatatacaccatggaatactatgcagccataaaaaatgatgagttcatgtcctttgtagggacatggatgaaattggaaatcatcattctcagtaaactatcacaagaacaaaaaaccaaacacggcatattctcactcataggtgggaattga

SEQ ID NO: 5037 - DNA, 2205 bp, Homo sapiens
  SIMILAR (670)..(2202): 941254mologous to Homo sapiens putative p150,accession number U93574,Smith-Waterman Score=2643.
atgaaggcagaaataaagatgttatttgaaaccaacgagaacaaagacacaacataccagaatctctgggacacattcaaagcagtgtgtagagggaaatttagaacactaaatgcccacaagagaaagcaggaaagatccaaaattgacaccctaacatcacaattaaaagaactagaaaagcaagagcaaacacattcaaaagctagcagaaggcaagaaataactaaaatcagagcagaattgaaggaaatagagacacaaaaaacccttcaaaaaattaatgaatccaggagctggttttttggaaggatcaacaaaattgatagaccactagcaagactaataaagaagaaaagagagaagaatcaaatagacgcaataaaaaatgataaaggggatatcaccactgatcccacagaaatacaaactaccatcagagaatactacaaacacctccatgcaaataatctagaaaatctagaagaaatggataaattcctcgacacatacactctcccaagactaaaccaggaagaagttgaatctctgaatagaccaataacaggatctgaaattgtggcaataatcaatagcttaccaaccaaaaagagtccaggaccagatggattcacagccaaattctaccagaggtacaaggaggaactgagaataaaatacttaggaatccaacttacaagggacgtgaaggacctcttcaaggagaactacaaaccactgctcaaggaaataaaagaggatacaaacaaatggaagaacattccatgctcatgggtaggaagaatcaatatcgttaaaatggccatactgcccaaggtaatttatagattcaatggtatccccatcaagctaccaattactttcttcacagaattggaaaaaactactttaaagttcatatggaaccaaaaaagagcccgcgtcgccaagtcaatcctaagccaaaagaacaaagctggaggcatcatgctacctgacttcaaactatactacaaggctacagtaaccaaaacagcatggtactggtaccaaaacagagatatagatcaatggaacagaacagagccctcagaaataatgccacatatctacaactatctgatctttgacaaacctgagaaaaacaagcagtggggaaaggattccctatttaataaatggtgctgggaaaactggctagccatatgtagaaagctgaaaatggatcccttccttacaccttatacaaaaattaattcaagatggattaaagacttaaacgttagacctaaaaccataaaaaccctagaagaaaacctaggcaataccattcaggacataggcatgggcaaggacttcatgtctaaaactccaaaagcaatggcaacaaaagccaaaattgacaaatgggatctaattaaactaaagagcttctgcacagcaaaagaaactaccatcggagtgaacaggcaacctacaaaatgggagaaaatttttgcaacctactcatctgacaaagggctaatattcagaatctacaatgaacttaaacaaatttacaagaaaaaaacaaacaaccccatcaaaaagtgggcaaaggatatgaacagacaattctcaaaagaagacatttatgcagccaaaagacacatgaaaaaatgctcaacatcactggccatcagagaaatgcaaatcaaaaccacaatgagataccatctcacaccagttagaacagcgatcattaaaaagtcaggaaacaacaggtgctggagaggatgtggagaaataggaacacttttacactgttgctgggactgtaaactagttcaaccattgtggaagtcagtgtggcgattcctcagggatctagaactagaaataccatttgacccagccatcccattactgggtatatacccaaaggactataaatcatgctgctataaagacacatgcacacgtatgtttactgcggcactattgacaatagcaaagacttggaaccaacccaaatgtccaacaatgatagactggattaagaaaatgtggcacatatacaccatggaatcctatgcagccataaaaaatgatgagttcatgtcctttgtagggacatggatgaaattggaaatcatcattctcagtaaattatcgcaaggacaaaaaaccaaacaacgcatattctcactcatagatgggaactga

SEQ ID NO: 5038 - DNA, 2871 bp, Homo sapiens
  SIMILAR (1558)..(2868): 961254mologous to Homo sapiens putative p150,accession number U93563,Smith-Waterman Score=2320.
atgaaggcagaaataaaggtgttctttgaaaccaacgagaacaaagacacaacataccagaatctctgggacacattcaaagcagtgtgtagagggaaatttatagcactaaatgcccacaagagaaagcaggaaagatccaaaattgacaccctaacatcacaattaaaagaactagaaaagcaagagcaaacacattcaaaagctagcagaaggcaagaaataactaaaatcagagcagaactgaaggaaatacagacacaaaaaacccttcaaaaaatcaatgaatccaggagctggttttttgaaaggatcaacaaaattgatagatcgctagcaagactaataaagaaaaaaagagagaagaatcaaatagacacaataaaaaatgataaaggggatatcaccaccgatcccacagaaatacaaactaccatcagagaatactacaaacacctctatgcaaataaactagaaaatctagaagaaatggataaattcctcgacacatacactctcccaagactaaaccaggaagaagttgaatctctgaatagaccaataacaggagctgaaattgtggcaataatcaatagtttaccaaccaaaaagagtccaggaccagatggattcacagccgaattctaccagagctgggcagagacacaaccaaaaaaagagaattttagaccaatatccttgatgaacattgatgcaaaaatcctcaataaaatactggcaaaacgaatccagcagcacatcaaaaagcttatccaccatgatcaagtgggcttcatccctgggatgcaaggctggttcaatatacgcaaatcaataaatgtaacacagcatataaacagagccaaagacaaaaaccacatgattatctcaatagatgcagaaaaagcctttgacaaaattcaacaacccttcatgctaaaaactctcaataaattaggtattgatgggacgtatttcaaaataataagagctatctatgacaaccccacagccaatatcatactgaatgggcaaaaactggaagcattccctttgaaaactggcacaagacagggatgccctctctcaccactcctattcaacatagtgttggaagttctggccagggcaattaggcaggagaaggaaataaagggtattcaattaggaaaagaggaagtcaaattgtccctgtttgcagacaacatgattgtatatctagaaaaccccattgtctcagcccaaaatctccttaagctgataagcaacttcagcaaagtctcaggatacaaaatcaatgtacaaaaatcacaagcattcttatacaccaacaacagacaaacagagagccaaatcatgagtcaactcccattcacaattgcttcaaagagaataaaatacctaggaatccaacttacaagggatgtgaaggacctcttcaaggagaactacaaaccactgctcaaggaaataaaagaggatacaaacaaatggaaaaacattccatgctcagggggaaggaagaatcaatatcgtgaaaatggccatactgcccaagaattggaaaaaactactttaaagttcatatggaaccaaaaaagagctcacattgccaagtcaattctaaaccaaaagaacaaagctggaggcatcacactacctgacttcaaactatactacaaggctacagtaaccaaaacagcatggtactggtaccaaaacagagatatagatcaatggaacagaacagagccctcagaaataacgcagcatatctacagctatctgatctttgacaaacctgagaaaaacaagcaatggggaaaggattccctatttaataaatggtgctgggaaaactggctagccatatgtagaaagctgaaactggatcccttccttacaccttatacaaaaattaattcaagatggattaaagatttaaacgttagacctaaaaccataaaaaccctagaagaaaacctaggcattaccattcaggacataggcatgggcaaggacttcatgtccaaaacaccaaaagcaatggcaacaaaagacaaaattgacaaatgggacctagttaaactaaagagcttctgcacagcaaaagaaactaccatcagagtgaacaggcaacctacaaaatgggagaaaattttcgcaacctactcatctgacaaagggctaatatccagaatctacaatgaactcaaacaaatttacaagaaaaaaacaaacaaccccatcaaaaagtgggcaaaggacatgaacagacacttctcaaaagaagacatttatgcagccaaaaaacacatgaaaaaatgctcatcatcactggccatcagagaaatgcaaatcaaaaccactatgagataccatctcacaccagttagaatggcaatcattaaaaagtcaggaaacaacaggtgctggagaggatgtggagaaacaggaacgcttttacactgttggtgggactgtaaactagctcaaccattgtggaagtcagtgtggcgattcctcagggatctagaactagaaataccatttgacccagccatcccattactgggtatatacccaaatgactataaatcatgctgctataaagacacatgcacacgtatgtttattgcggcattattcacaatagcaaagacttggaaccaacccaaatgtccaacaattatagactggattaagaaaatgtggcacatatacaccatggaatactatgcagccataaaaaatgatgagttcgtgtcctttgtagggacatggatgaaattggaaatcatcattctcagtaaactatcacaagaacaaaaaaccacacaccgcatattctcactcataggtgggaattga

SEQ ID NO: 5039 - DNA, 602 bp, Homo sapiens
tagatcatcagctattgttagtgttagtgtatgttatgtgtggctcaagacaactttgtttcttttaatataggcagggaagtgaaaagattggatatccctgctttataccaagaaagacaacaccgcacatttgcaatgcctaaaaacactaccagccatctgaaaaacatgagacttctaacttctgttcttttttgtagcagtgggaatcccacggtgatatctgagggatgtggttaccttttgggaggaggttgacggtttctaaggattgattctttctgagtgaaatattgtcggtgtcattgacctttttcattatttccaactattattattcccaggttatcaatagtctggctgtctatcgtcatcgtgagactgactttggtgtaggagttcgagaccaccctggccaacatggcaaaaccccatctcccacgaaaaattggataatttgataattatcattattgggtttctgagacgttacacatttaacattctcttctgcacaagttgcctttgtgtgagtatactaactttctgtagaggtatacttgtaatcacaaataagaataaattatataaaacaaaaa

SEQ ID NO: 5040 - DNA, 3240 bp, Homo sapiens
  SIMILAR (1)..(3024): 951254mologous to Homo sapiens putative p150,accession number U93572,Smith-Waterman Score=5076.
atgaaggcagaaataaagatgttctttgaaaccaacgagaacaaagacacaacataccagaatctctgggacgcattcaaagcagtgtgtagagggaaatttatagcactaaatgcccacaagagaaagcaggaaagatccaaaattgacaccctaacatcacaattaaaagaactagaaaagcaagagcaaacacattcaaaagctagcagaaggcaagaaataactaaaatcagagcagaactgaaggaaatagagacacaaaaaacccttcaaaaaattaatgaatccatgagctggttttttgaaaggatcaacaaaattgatagactactagcaagactaataaagaaaaaaagagagaagaatcaaatagacgcaataaaaaatgataaaggggatatcaccaccaatcccacagaaatacaaactaccatcagagaatactacaaacacctctacgcaaataaactagaaaatctagaagaaatggataaattcctagacacatacgctctcccaagactaaaccaggaagaagttgaatctctgaatagaccaataacaggagctgaaattgtggcaataatcaatagcttaccaacaaaaaagagtccaggaccagtcggattcacagccgaattctaccagaggtacaaggaggaactggtaccattccttctgaaactattccaatcaatagaaaaagagagaatcctccctaactcattttatgaggccagcatcattgtgataccaaagccaggcagagacacaaccaaaaaagagaattttagaccaatatccttgatgaacattgatgcaaaaatcctcaataaaatactggcaaaccgaatccagcagcacatcaaaaagcttatccaccatgatcaagtgggcttcatccctgggatgcaaggctggttcaatatatgcaaatcagtaaatgtaatccagcatataaacagaaccaaagacaaaaaccacatgattatctcaatagatgcagaaaaagcctttgacaaaattcaacaacccttcatgctaaaaactctcaataaattaggcattgatgggacgtatttcaaaataataagagctatctgtgacaaacccacagccaatatcatactgaatgggcaaaaactggaagcattccctttgaaaactggcacaagacagggatgccctctctcaccactcctattcaacatagtgttggaagttctggccagggcaattaggcaggagaaggaaataaagggtattcaattaggaaaagaggaagtcaaattgtccctgtttgcagacgacatgattgtatatctagaaaaccccatcatctcagcccaaaatctccttaagctgataagcaacttcagcaaagtctcaggatacaaaatcaatgtacaaaaatcacaagcattcttatacaccaacaacagacaaacagagagccaaatcatgagtgaactcccattcacaattgcttcaaagagaataaaatacctaggaatccaacttacaagggatatgaaggacctcttcaaggagaactacaaaccactgctcaaggaaataaaagaggatacaaacaaatggaagaacattgcattctcatgggtaggaagaatcaatatcatgaaaatggccatactgcccaaggtaatttacagattcaatgccatctccatcaagctaccaatgactttcttcgcagaattggaaaaaactactttaaagttcatatggaaccaaaaaagagcccgcatcaccaagtcaatcctaagccaaaagagcaaagctggaggcatcacactacctgacttcaaactatactacaaggctacagtaaccaaaacagcatggtactggtaccaaaacagagatatagatcaatgcaacagaacagagccctcagaaataatgccacatatctacaactatctgatctttgacaaacctgagaaaaacaagcaatggggaaaggattccctatttaataaatggtgctgggaaaactggctagccatatgtagaaagctgaaactggatcccttccttacaccttatacaaaaattcattcaagatggattaaggacttaaatgttagacctaaaaccataaaaaccctagaagaaaacctagggattaccattcaggacataggcatgggcaaggacttcatgtctaaaacaccaaaagcaatggcaacaaaagacaaaattgacaaatgggatctaattaaactaaagagcttctgcacagcaaaagaaactaccatcagagtaaacaggcaacctacaaaatgggagaaaatttttgcaacctactcatctgacaaagggctaatatccagaatctacaatgaactcaaacaaatttacaagaaaaaaacaaacaaccccatcaaaaagtgggcaaaggacatgaacagacacttctcaaaagaagacatttatgcagccaaaaaacacatgaaaaaatgctcatcatcactggccatcagagaaatgcaaattaaaaccacagtgagataccatctgacaccagttagaatggcaatcattaaaaagtcaggaaacaacaggtgctggagaggatgtggagaaataggaacacttttacactgttggtgggactgtaaactagttcaaccattgtggaagtcagtgtggcgattcctcagggatctagaactggaaataccatttgacccagccatcccattactgggtatatacccagaggactataaatcatgcttctataaagacacatgcacacgtatgtttattgcggcattattcacaatagcaaagacttggaaccaacccaaatgtccaacaatgatagactggattcagaaaatgtggcacatatacaccatggaatactatgcagccataaaaaatgatgagttcatgtcctttgtagggatatggataaaattggaaatcatcattctcagtaaactatcggaagaacaaaaaaccaaacactgcatattctcactcataggcaagagaacttttgcaggaaaactcccagttataaaaccatcagatcttgtgagacttattcactaccatgagaacagtatgggggaaactgaccccataattcgattatctccacctagctatgcccttgacacatggggcttattacaactgaagattttggatggtggcttgcctgtaacctcagttcctgatgggtctaagaaaaatcattga

SEQ ID NO: 5041 - DNA, 2004 bp, Homo sapiens
  SIMILAR (484)..(2001): 941254mologous to Homo sapiens putative p150,accession number U93563,Smith-Waterman Score=2610.
atgcctcacatccaggtcatgctgatgcaagagatggactcccacagccttgggaagctctgcccctatggctttgcagagtacagccccacttctagctgctttcatgggtttgtgttgagtgtctgtggctcttccagggacaaagccacccagagagttgatgctcttgtcagacaggtcatagtcaatggaggcattgttcttgatcagtttgccgtccatgatagggtagccctggccgatcttatagatcttcttgttgatctcagtgccatgatgctttgtggtgtgccaacaactggtgacccctttgtagcctttgcccttggtcaccccgatgactttgatcatctcatcttgcccaaacacttggttgacaggtacctgctgctcgagcctcttctgggcccagtccagcttctcagccacagtgcctctgttcacctagatctccatcagttctgctctgattttagttatggaatccaacttacaagggacgtgaaggacctcttcaaggagaactacaaaccactgctcaaggaaataaaagaggatacaaacaaatggaagaacattccatgctcatgggtaggaagaatcaatatcatgaaaatggccatgctgcccaaggtaatttatagattcaatgccatccccatcaagctaccaatgactttcttcacagaattggaaaaaactactttaaagttcatatggaaccaaaaaagagcccgtatcgccaagtcaagccttagccaaaagaacaaagctggaggcatcacactacctgacttcaaactatactacaaggctacagtaaccaaaacagcatggtactggtaccaaaacagagatatagatcaatggaacagaacagagccctcagaaataacgccgcatatctacaactatctgatcttcgacaaacctgagaaaaacaagcaatggggaaaggattccctatttaataaatggtgctgggaaaactggctagccatatgtagagagctgaaactggatcccttccttacaccttatacaaaaattcattcaagatggattaaagacttaaatgttagacctaaaaccataaaaaccctagaagaaaacctaggccttaccattcaggacataggcatgggcaaggacttcatgtctgaaacaccaaaagcaatggcaacaaaagccaaaattgacaaatgggatctaatgaaactaaagagcttctgcacagccaaagaaactaccatcagagtgaacaggcaacctacaaaatgggagaaaattttcacaacctactcatctgacaaagggctaatatccagaatctacaaagaactcaaacaaatttacaagataaaaacaaacaaccccatcaaaaagtgggcaaaggacacgaacagacacttctcaaaagaagacatttatgcagccaaaaaacacatgaaaaaatgctcaccatcacgggccatcagagaaatgcaaatcaaaaccgcaatgagataccatctcacaccagttcgaatggcgatcattacaaagtcaggaaacaacaggtgctggagaggatgtggagaaataggaacacttttacactgttggtgggaatgtaaactacttcaaccattgtggaagtcagtgtggcaattcctcagggatctagaactagaaataccatttgacccagccatcccattactgggtatatacccaaaggactataaatcatgctgctataaagacacatgcacacgtatgtttattgtggcactattcacaatagcaaagacttggaaccaacccaaatgtccaacaatgatagactggattaagaaaatgtggcacatatacaccatggaatactacgcagccataaaaaatgatgagttcatgtcctttgtagggacacggatgaaattggagatcatcattctcagtaaactatcgcaaggacaaaaagccaaacaccgcatattctcactcataggtgggaattga

SEQ ID NO: 5042 - DNA, 2985 bp, Homo sapiens
  SIMILAR (187)..(2682): 981254mologous to Homo sapiens putative p150,accession number U93572,Smith-Waterman Score=4352.
atggttgacatccacaagccatatcacccctttacttggttgggagtctctgtgagtccatgtggtccagtgctcaggtacagcaacttcttcttagccagcagcactgtgcaagtggagctcttggtctgtggtggcagcagcagtggcagcagtgagcagggatttgtgaccatgagaacagaactaaaccaggaagaagttgaatctctgaatagaccaataacaggctctgaaattgtggcaataatcaatagtttaccaaccaaaaagagtccaggaccagatggattaacagccgaattctaccagaggtacaaggaggaactggtaccattccttctgaaactattccaatcaatagaaaaagagggaatcctccctaactcattttatgaggccagcatcattctgataccaaagccgggcagagacacaaccaaaaaagagaattttagaccaatatccttgatgaacattgatgcaaaaatcctcaataaaatactggcaaaccgaatccagcagcacatcaaaaagcttatccatcatgatcaagtgggcttcatccctgggatgcaaggctggttcaatatacgcaaatcaataaatgtaatccagcatataaacagagccaaagacaaaaaccacatgattatctcaatagatgcagaaaaagcctttgacaaaattcaacaacccttcatgctaaaaactctcaataaattaggtattgatggcacgtatttcaaaataataagagctatctatgacaaacccacagccaatatcatactgaatgggcaaaaactggaagcattccctttgaaaactggcacaagacagggatgccctctctcaccgctcctattcaacatagtgttggaagttctggccagggcaatcaggcaggagaaggaaataaagggtattcaattaggaaaagaggaagtcaaattgtccctgtttgcagacgacatgattgtttatctagaaaaccccatcatctcagcccaaaatctccttaagctgataagcaacttcagcaaagtctcaggatacaaaatcaatgtacaaaaatcacaagcattcttatacaccaacaacagacaaacagagagccaaatcatgagtgaactcccattcacaattgcttcaaagagaataaaatacctaggaatccaacttacaagggatgtgaaggacctcttcaaggagaactacaaaccactgctcaaggaaataaaagaggacacaaacaaatggaagaacattccatgctcatgggtaggaagaatcaatatcgtgaaaatggccatactgcccaaggtaatttacagattcaatgccatccccatcaagctaccaatgactttcttcacagaattggaaaaaactactttaaagttcatatggaaccaaaaaagagctcgcatcgccaagtcaatcctaagccaaaagaacaaagctggaggcatcacactacctgacttcaaactatactacaaggctacagtaaccaaaacagcatggtactggtaccaaaacagagatatagatcaatggaacagaacagagcccccagaaataatgccgcatatctacaactatctgatctttgacaaacttgagaaaaacaagcaatggggaaaggattccctatttaataaatggtgctgggaaagctggctagccatatgtagaaagctgaaactggatcccttccttacaccttatacaaaaatcaattcaagatggattaaagatttaaacgttagacctaaaaccattaaaaccctagaagaaaacctaggcattaccattcaggacataggcatgggcaaggacttcatgtccaaaacaccaaaagcaatggcaacaaaagccaaaattgacaaatgggatctaattaaactaaagagcttctgcacagcaaaagaaactaccatcagagtgaacaggcaacctacaacatgggagaaaatattcgcaacctactcatctgacaaagggctaatatccagaatctacaatgaactcaaacaaatttacaagaaaaaaacaaacaaccccatcaaaaagtgggcgaaggacatgaacagacacttctcaaaagaagacatttatgcagccaaaaaacacatgaaaaaatgctcatcatcactggccatcagagaaatgcaaatcaaaaccactatgagatatcatctcacaccagttagaatggcaatcattaaaaagtcaggaaacaacaggtgctggagaggatgtggagaaataggaacacttttacactgttggtgggactgtaaactagttcaaccattgtggaagtcagtgtggcgattcctcagggatctagaactagaaataccatttgacccagccatcccattactgggtatatacccaaatgactataaatcatgctgctataaagacacatgcacacgtatgtttattgcggcattattcacaatagcaaagacttggaaccaacccaaatgtccaacaatgatagactggattaagaaaatgtggcacatatacaccatggaatactatgcagccataaaaaatgatgagttcatgtcctttgtagggacatggatgaaattggaaaccatcattctcagtaaactatcgcaagaacaaaaaaccaaacaccgcatattctcactcatagaccgtcttgaccagcgcaacttcctcctaggttccagcggggcctttccactgtcccatgacctggctgagcgggaccaggcctctgggacaggcaaggcctctcctcacaggcaactcaacccttcacatccagcccagccctcggtggactccggaccgctgaccgccaatcacaacacagcctctgctactttcagcctgccctgcctttgggctaaggctcccccagctggccacctggaacatggcacctttcgagtgaaaagttttctgggccacagtcctgccatcaatcaataa

SEQ ID NO: 5043 - DNA, 4728 bp, Homo sapiens
  SIMILAR (1223)..(2965): 951254mologous to Homo sapiens putative p150,accession number U93563,Smith-Waterman Score=2977.
aaaaatggcaaatttaaaatattttttattcagaaatattttttcaaccaagcaatcaggagtgccaagatcgcatgatttgtgtaaaacacaactttggtctgaaagtaacaagtgaattttacaaaagaaaatatcctgatcctagttccagacttagagagaaaatgcttttgctgaatgttaaccaggaaagttggtaaccagcacttcagtcttatggaagaatcttgatttgttcattctgtaatctctttgagagctcagcacaaaaactgtactcaggagtttgtttgtttttttttgaactttttttttttaatttaagttttagggtacatgtgcacaatgtgcaggtttgttacgtatgtatacatgtgccatgttggtgtgctgcacccattaactcatcatttacattaggtatatctcctaatgctatccctcccctctccccgcaccccacaacaggccctggtgggtgatgttccccttcctttgtccatgtgttctcattgttcatttcccacctatgagtgagaacatgtggtgtttggtttttgtccttgcgatagtttgctgagaatgatggtttccagcttcacccatgttcctacaaaggacatgaactcatcctttttatggctccatagtattccatggtgtatatgtgccacattttcttaatccagtctatcattgttggacatttgggttggttccaagtctttgctattgtgaatagtgctgcaataaacatatgtgtgcatgtgtctttatagcagcatgatttataatcctttgggtatatacccagtaatgggatggctgggtcaaatggtatttctagttctagatccttgaggaatcgccacattgacttccacaatggttgaatgagtttacagtcccaccaacagtgtaaaagtgttcctatttctccacatcctctccagcacctgttgttccctgactttttaatgatcgccattctaactggtgtgaaatggtatctcattgtggttttgatttgcatttctctgatggccagtgatgatgagcattttttcatgtgtttgttggctgcatcaatgtcttcttttgagaagggtcttttcatatccttagcccgttgattgggttgtttttttcttgtaaatttgtttgagttcattgtagattctggatattagccctttgtcagatgagtagattgcaaaaatcaccactcctattcaacatagtgttggaagttctggccaaggcaatcaagcaggagaaggaaataaagggtattcaattaggaaaagaggaagtcaaattgtccctgtttgcagatgacatgattgtatatctagaaaaccccactgtctcagcccaaaatctccttaagctgatgagcaacttcagcaaagtctcaggatacaaaatcaatgtgcaaaaatcacaagcattcttatacaccaataacagacaaacagagagccaaatcatgagtggactcccattcacaatcacttcaaagagaataacatacctaggaatccaacttacaagggatgtgaaggacctcttcaaggagaactacaaaccactgctcaaggaaataaaagaggatacaaacaaatggaagaacattccatgctcatgggtaggaggaagaatcaatctcgtgaaaatggccatactgcccaaggtaatttacagattcaatgccatccccatcaagctaccaatgactttcttcacagaattggaaaaaactactttaaagttcatatggaaccaaaagagagccctcattgccaagtcatccctaagccaaaagaacaaaactggaggcatcacgctacctgacttcaaactatactacaaggctacagtaaccaaaacatcatggtactggtaccaaaacagagatatagatcaatggaacagaacagagccctcagaaataatgccacatatctacaactatctgatctttgacaaacctgacaaaaacaagcaatggggaaaggattccctatttaataaatggtgctgggaaaactggctagccatatgtagaaagctgaaactggatcccttccttacaccttatacaaaaattaattcaagatggattaaagacttacatgttagacctaaaaccataaaaaccctagaagaaaacctaggcaataccattcaggacataggcatgggcaaggacttcatgtcgaaaacaccaaaagcaatggcaacaaaagccaaaattgacaaatgggatctcattaaactaaagagcttctgcacagcaaaagaaaccaccatcagagtgaacaggcaacctacagaatgggagaaaatttttgcaacctactcatctgacaaagggctaatatccagaatctacaatgaactcaaacaaatttacaagaaaaaaacaaacaaccccatcaaaaagtgggcaaaggatatgaacagacacttctcagaagaagacatttatgcagccaaaaaacacatgaaaaaatgctcatcatcactggccatcagagaaatgcaaatcaaaaccacaatgagataccatctcacaccagttagaatggtgatcattaaaaagtcaggaaacaataggtgctggagaggatgtggagaaataggaacacttttacactgttggtgggactgtaaactagttcaaccattgtggaagtcggtgtggcaattcctcagggatctagaactagaaataccatttgacccagccatcccattactgggtatatacccagaggattataaaccatgctgctataaagacacatgcacacgtatgtttattgcggcactattcacaatagcaaagacttggaaccaacccaaatgtccaacaatgatagacgggattaagaaaatgtggcacatatacaccatggaatactatgcagccataaaaaaggatgagttcatgtcctttggcagggacatggatgaagctggaaaccatcattctgagaaaactatcacaaggacagaaaaccaaacaccgcatgtactcactcataggtgggaatttaacaatgagaacatttggacacagtgcagggagccatcacacaccagggcctatcatgaggtgtggggctgggggagggatagcattaggagaaatacctaatgtaaatgacgagttaatgggcacagcaaaccaacatggcacatgtatacctatgcaacaaaactgcacattgtgcacatgtaccctaaaacttaaagtataataataaaaaaagaaaaaaagaaagttagttttcagttatggaaggttgggcttgtaatctcaactactcgggacgctgaggcaggaggatcatctgagccccgcagtttgaggctgcagtaagttatgactgcaccactgcactccagcctgggtaacagtgagaccctatctcttaaaaaaattatgctgagaatattttctgagttgtcacatgggtcttgtgataaactaataatgcaaacttttatttttcattatatataaatattggatttatcccaaccaaactagtttgcagggaacctctgcctttatttcacggctggagaatgagatacaaaagatgtcaatttccatcgtaagaactttccacagtagtgttctttggacattctctcccttgtattaggctcctcagaaatctatctccagactgaaaccagcacattctgatgagatcatagcttagtactcagaaaaatcactactcagtggaattcttgaaattttgaaacaactgattttagcatacagaatttcaaaaagaacatacattacagccagaaacgattgtttgctcatgaattttgattattggcagacacatttgctgtagcggcaactgtgcaagagttcattttaacagaataatatgttctgaaatactcttttataatcaatataaaattctagaatgttaattcctatagcaagaacttgtgacattataaaatgtggtttaccatagaaagtcgctagatttcccatgttttcttaaaattaaatgtactaaaaaatccaaatgtaatagaaaaatgcaatcacataggtgctttaaacagacatttctgaataacactgcattctaactcatgagtacaaagaaatgtgtatgctatttatacattttcttagtgttccctacctttggactccaatcattttaacgtatccgtatactggagatttgatcacagtatatggcacttcacaataacattccatgtcctaataatgtgaaatgcctgtatacaatctgagtatattgtttagtcagaaaacatcaaaattaaggatataggacatggaatgtctgttaagtgctgagtttttctgactagagtttaatctagccagtgttaatgtggaagctgtatgcttttttcatgggcatgttcgaattttttctttcaaaatgtttctcaactttttgatgtgacactttgttttctcccaagtcactctaagggttctatcaacatctttctttgaaaacagcccaaaaacatatttttaaaatgaaaaaaaaattcacaagagaatcaagatttggttttaatctattatttacatatttgtaaactgctgttaaaatgctctcaaaaatgttatttaggaaggcacaatttggtagcatcaattttttatttatagttttttctaaacaagatccgaag

SEQ ID NO: 5044 - DNA, 6001 bp, Homo sapiens
  SIMILAR (1957)..(5793): 951254mologous to Homo sapiens putative p150,accession number U93565,Smith-Waterman Score=6430.
cctccggtctacagctcccagcgtgagcgacgcagaagacgggtgatttctgcatttccatctgaggtaccgggttcatctcactagggagtgccagacagtgggcgcaggccagtgggtgcgcgcaccgtgcggagccgaagcagggcgaggcattgcctcacctgggaagcgcaaggggtcagggagttccctttccgagtcaaagaaaggggtgacggacgcacctggaaaatcgggtcactcccacccgaatattgcgcttttcagaccggcttaaaaaacggcgcaccacgagactatatcccacacctggccttcggagggtcctacgcccacggaatctcgctgattgctagcacagcggtctgagatcaaactgcaaggccgcagcaaggctgggggaggggcgcccgccattgcccaggcttgcttaggtaaacaaagcagccggggaagctcgaactgggtgcagcccaccacagctcaaggaggcctgcctgcctctgtaggctccacctctgggggcagggcacagacaaacaaaaagacagcagtaacctctgcagacttaaatgtccctgtctgacagctttgaagagagcagtggttctcccagcacgcagctggagatctgagaacgggcagactgcctcctcaagtgggtccctgacccctgacccccgagcagcctaactgggaggcaccccccagcaggggcacactgacacctcacacggcagggtattccaacagacctgcagctgagggtcctgtctgttagaaggaaaactaacaaacagaaaggacatccacaccgaaaacgcatctgtacatcaccatcatcaaagaccaaaagtagataaaaccacaaagatggggaaaaaacagaacagaaaaactggaaactctaaaacgcagagcacctctcctcctccaaaggaacgcagttcctcaccagcaacggaccaaagctggatggagaatgattttgacgagctgagagaagaaggcttcagacgctcaaattactctgagctacgggaggacattcaaaccaaaggcaaagaagttgaaaactttgaaaaaaatttagaagaatgtataactagaataaccaatacagagaagtgcttaaaggagctgatggagctgaaaaccaaggctcgagaactacgtgaagaatgcagaagcctcaggagccaatgcgatcaactggaagaaagggtatcagcaatggaagatgaaatgaatgaaatgaagcaagaagggaagtttagagaaaaaagaataaaaagaaacgagcaaagcctccaagaaatatgggactatgtgaaaagaccaaatctacgtctgattggtgtacctgaaagtgatgcggagaatggaaccaagttggaaaacactctgcaggatattatccaggagactttccccaatctagcaaggcaggccaacgttcagattcaggaaatacagagaacgccacaaagatactcctcgagaagagcaactccaagacacataattgtcagattcaccaaagttgaaatgaaggaaaaaatgttaagggcagccagagagaaaggtcgagttaccctcaaagggaagcccatcagactaacagcggatctctcggcagaaaccctacaagccagaagagagtgggggccaatattgaacattcttaaagaaaagaattttcaacccagaatttcatatccagccaaactaagcttcataagtgaaggagaaataaaatactttacagacaagcaaatgctgaccgattttgtcaccagcaggcctgccctaaaagagctcctgaaggaagcgctaaacatggaaaggaacaaccggtaccagccactgcaaaatcatgccaaaatgtaaagaccatcgagactaggaagaaactgcatcaactaacgagcaaaatcaccagctaacatcataatgacaggatcaaattcacacataacaatattaactttaaatgtaaatggactaaattctccaattaaaagacacagactggcaagttggataaagagtcaagacccatcagtgtgctgtattcaggaaacccatctcatgtgcagagacacacataggctcaaaataaaaggatggaggaagatctaccaagcaaatggaaaacaaaaaaaggcaggggttgcaatcctagtctctgataaaacagactttaaaccaacaaagatcaaaagagacaaagaaggccattacatgatggtaaagggatcaattcaacaagaggagctaactatcctaaatatgtatgcacccaatacaggagcacccagattcataaagcaagtcctgagtgacctacaaagagacttagactcccacacattaataatgggagactttaacaccccactgtcaacattagacagatcaacgagacagaaagtcaacaaggatacccaggaattgaactcagctctgcaccaagcagacctaatagacatctacagaactctccaccccaaatcaacagaatatacatttttttcagcaccacaccacagctattccaaaattgaccacatacttggaagtgaagctctcctcagcaaatgtaaaagaacagaaattataacaaactatctctcagaccacagtgcaatcaaactagaactcaggattaagaatctcactcaaagccgctcaactacatggaaactgaacaacctgctcctgaatgactactgggtacataacgaaatgaaggcagaaataaagatgttctttgaaaccaacgagaacaaagacacaacataccagaatctctaggacgcattcaaagcagtgtgtagagggaaatttatagcactaaatgcccacaagagaaagcaggaaagatccaaaattgacaccctaacatcacaattaaaagaactagaaaagcaagagcaaacacattcaaaagctagcagaaggcaagaaataactaaaatcagagcagaactgaaggaaatagagacacaaaaaacccttcaaaaaatcaatgaatccaggagctggttttttgaaaggatcaacaaaattgatagaccgctagcaagactaataaagaaaaaaagagagaagaatcaaatagacacaataaaaaatgataaaggggatatcaccaccgatcccacagaaatacaaactaccatcagagaatactacaaacacctctacgcaaataaactagaaaatctagaagaaatggatacattccttgacacatacactctcccaagactaaaccaggaagaagttgaatctctgaatagaccaataacaggagctgaaattgtggcaataatcaatagtttatcaaccaaaaagagtccaggaccagatggattcacagccgaattctaccagaggtacaaggaggaactggtaccattctttctgaaactattccaatcaatagaaaaagagggaatcctccctaactcattttatgaggccagcatcattctgataccaaagccgggcagagacacaaccaaaaaagagaattttagaccaatatccttgatgaacattgatgcaaaaatcctcaataaaatactggcaaaccaaatccagcagcacatcaaaaagcttatccaccatgatcaagtgggcttcatccctgggatgcaaggctggttcaatatacgcaaatcaataaatgtaatccagcatataaacagagccaaagacaaaaaccacatgattgtctcaatagatgcagaaaaagcctttgacaaaattcaacaacccttcatgctaaaaactatcaataaaataggtattgatgggatgtatttcaaaataataagagctatctatgacaaaaccacagccaatatcatactgaatgggcaaaaactggaagcattccctttgaaaaccggcacaagacagggatgccctctctcaccgctcctattcaacatagtgttggaatttctggccagggcaatcaggcaggagaaggaaataaagggtattcaattaggaaaagaggaagtcaaattgtccctgtttgcagatgacatgattgttgatctagaaaaccccatcgtctcagcccaaaatctccttaagctgataagcaacttcagcaaagtctcaggatacaaaatcaatgtacaaaaatcacaagcattcttatacaccaacaacagacaaacagagagccaaatcatgagtgaactcccattcactattgcttcaaagagaataaaatacctaggaatccaacttacaagggatgtgaaggacctcttcaaggagaactacaaaccactgctcaaggaaataaaagaggatacaaaaaaatggaagaacattccatgctcatgggtaggaagaatcaatatcgtgaaaatggccatactgcccaaggtaatttacagattcaatgccatccccatcaagctaccaatgactttcttcacagaattggaaaaaactactttaaagttcatatggaaccaaaaaagagcccgcatcaccaagtcaatcctaagccaaaagaacaaagctggaggcatcacactacctgacttcaaactatactacaaagctacagtaaccaaaacagcatggtactggtaccaaaacagagatatagatcaatggaacagaacagagccctcagaaataacgccgcatatctacaactatctgatctttgacaaacctgacaaaaacaacaagaaaaacaagcaacggggaaaggattccctatttaataaatggtgctgggaaaactggctagccatatgtagaaagctgaaactggatcccttccttacaccttatacaaaaattaattcaagatggattaaagacttaaatgttagacctaaaaccataaaaaccctagaagaaaacctaggcaataccattcaggccataggcatgggcaaggacttcatgaataaaacaccaaaagcaatggtaacaaaagccaaaattgacaaatgggatctaactaaactaaagagcttctgcacagcaaaagaaactaccatcagagtgaacaggcaacctacagaatgggagaaaatttttacaatctacccatctgacaaagggctaatatccggaatctacaatgaactcaaacaaatttacaagaaaaaaacaaacaaccccatcaaaaagtgggtgaaggacatgaacagacacttctcaaaagaagacatttatgcagccaaaaaacacatgaaaaaatgctcatcatcactggccatcagagaaatgcaaatcaaaaccacaatgagataccatctcacaccagttagaatggcaatcattaaaaagtcaggaaacaacaggtgctggagaggatgtggagaaataggaacacttttacactgttggtgggactgtaaactagttcaaccattgtggaagtcagtgtggcgattcctcagggatctagaactagaaataccatttgacccagccatcccattactgggtgtatacccaaaggactataaatcatgctgctataaagacacatgcacacgtatgtttattgcggcactgttcacaatagcaaagacttggaaccaacccaaatgtccaacaatgatagactggattaagaaaatgtggcacatatacaccatggagtactatgcagccataaaaaaggatgagttcacgtcctttgtagggacatggatgaagctagaaaccatcattctgagcaaactattccaacgacggaaaaccaaacactgcatgttctcactcataggtgggaattgaacaatgagatcatatggacacaggaaggggaacatcacactctggggactgttgtggggtggggggaggggggagggatagcattgggagatatacctaatggtagatgacgagttagtgggtgcagcacaccagcatggcacatgtatacatatgtaactaacctgcacaatgtgcacatgtaccctaaaacttaaagtataat

SEQ ID NO: 5045 - DNA, 651 bp, Homo sapiens
  SIMILAR (469)..(651): 751254mologous to Mus musculus p59fyn,accession number M27266,Smith-Waterman Score=232.
cccgggccgacccacgcgtgcgcggacgcgtggggcagacattgaaagtctagtggtattttccagacatcctcatgtggtgccatattgttgaatggcacaccccataaacttagataatctaatttcttccatgcacactgtactccctaagggacagctattagatggccaggcctgttccaacccctggactttcatcactgtatggtgcagagcttttggtataaatgtgtaatcatatgactgagccaaaaaaagagagagtggtaatatatcaaaatttaaaaaaattttaatgagttataaatcttaatatagccatcttagccataaccacaaataaactcattttttctgttaaaatacttgacagagtccttgcaattgaatgtctttgttcaacaaaaactgtattaagtgttttaaatttaaaatctaatcttatgcaaatagctggtggtcaaaacctttttccatcaaaagaagatctttggtttgacttcatattctgggatgtttgtaggtacctggaatggaaacacaaaagtagccataaagactcttaaaccaggcacaatgtcccccgaatcattccttgaggaagcgcagatcatgaagaagctgaagcacgacaagctggtccagctt

SEQ ID NO: 5046 - DNA, 637 bp, Homo sapiens
  SIMILAR (3)..(635): 791254mologous to Homo sapiens src-like tyrosine kinase (put.); putative,accession number M14676,Smith-Waterman Score=831.
tgaaaggagaccatgtcaaacattataaaattcgcaaacttgacaatggtggatactacattaccacccgggcccagtttgaaacacttcagcagcttgtacaacattactcagagagagctgcaggtctctgctgccgcctagtagttccctgtcacaaagggatgccaaggcttaccgatctgtctgtcaaaaccaaagatgtctgggaaatccctcgagaatccctgcagttgatcaagagactgggaaatgggcagtttggggaagtatggaatggtaccctggaattggaaacacaaaagtagccataaagactcttaaaccaggcacaatgtcccccgaatcattccttgaggaagcgcagatcatgaagaagctgaagcacgacaagctggtccagctctatgcagtggtgtctgagggagcccatctacatcgtcaccgagtatatgaacaaaggaagtttactggatttcttaaaagatggagaaggaagagctctgaaattaccaaatcttgtggacatggcagcacaggtggctgcaggaatggcttacatcgagcgcatgaattatatccatagagatctgcgatcagcaaacattctagtggggaatggactcatatgcaagat

SEQ ID NO: 5047 - DNA, 2526 bp, Homo sapiens
  SIMILAR (841)..(1083): 951254mologous to Homo sapiens tyrosine kinase p59fyn(T),accession number S74774,Smith-Waterman Score=393.
atgcactggaagcggccctggcaagtgggagggtatttgaccctggctgctaccgatactgtccaaatgctgaattacatgtcggtcagacagctcagctatttgaatttccccaacacgtggcagttcttgtcctggagccaaatgcccacacagcaagcatacccgtgcgttacacacacacatacacccccggtgctgggccagatggcatgctgtatctctaatcaaaggcgcactgcagctttgattggcactggccgtccagagaggaatgtgcatgtgaatttgaggcaagggtttgtggttaacgctcatgaaccatgggtaaatgaaaaggttgccaggcaggagccagaggatgctggcaggggtgctgttaatagggcctgggggtttagtccacgccttattcactggagtgagggtcctcaggctgcggccctaggtgatagggaccctcgctggctcccctaccatcacgctgctgccctgagcgggtcccacgctgctgccctcagcctggcccccagccggtcctctgcattagctgtcctgattgcccttctgccggctgcccagctgcaccatcatgtccccagaagcaaggcttgtgacattgcctatgtcgggggtcacaggagacaggtgtggtatggacaagaagatggacagcagatccttgtggtgcctgtgctcctgagtacaactcagcaaaaggtgtctgcactctgggcagacagattagaaatgggcactccttgcacgttcccttgcagcaaggttggcaccaccttctgtacatccctgctgggtttcaccttcccatcagcagtagcctggataaacgcaggaagtttactggatttcttaaaagatggagaaggaagagctctgaaattaccaaatcttgtggacatggcagcacaggtggctgcaggaatggcttacatcgagcgcatgaattatatccatagagatctgcgatcagcaaacattctaatggggaatggactcatatgcaagattgctgacttcggattggcccgattgatagaagacaatgagtacacagcaagacaagacccaaccagaagtagaggtcacaggagctcagcgatgaatccttatgggtccagagcagggagagggagagtggagagtggacttacactacagatggctgcaacacaggtcacagtgcaatggtcagcacatctagtgtctggtgaggcagtggcctggaatacttttcctactgccaatcaagaccggaaggagttagctgcccttagctgctcatgtccaagtactctttgttttatgctccttggcttatacccaacacttgatcatttgcaggtgagacagtcacattgtttaactgtttcctgtgcatggcagggtctgaagccattgttcttgtggctagccatcaacaaagctgaggaaatttgccttaccttgttgaagtattggcaagcagactgtgagctccttgccagtgcttatcagcatgcttggcacacctgtgcaaggactcagtcaagtaacttgtccattgcagacattgaaagtctagagctggtggtcaaaacctttttccatcaaaagaagatctttggtttgacttcatattctgggatgtttgtaggtacctggaatggaaacacaaaagtagccataaagactcttaaaccaggcacaatgtcccccgaatcattccttgaggaagcgcagatcatgaagaagctgaagcacgacaagctggtccagctctatgcagtggtgtctgaggagcccatctacatcgtcaccgagtatatgaacaaaggtggagatgagggcacaataagagaggaaataggacaggtgaaggctccgaggagggacaatatccccaaacccagtgctgcccatgcagcccagctcgtcatgtggcatgaagtcagactgacacgggccctctgccccttctgggggtggctggattcttggcatcatttctgtgttgagctacatcccacacatccgttgatcactcagaaaccaaagggaaaggaactcactgacgttgtacatagaagtcaattttctggggcacagagcagagtggagagtatttggatacagaggagtatgacgaagacgccaggtgcaaaacttcaaaagcaagcataccagggagtgtcaaaccctcaccaccatcatcacacaggacagcagctaaaggctgtgccacacccactcatggaagcacctgatgctatagatgggtacagaaaaattcttgtcaattttacaaaaatctacagtgcatttgcagtgactaacagtgattatgaatggcaaccaacacttgtggccataggctacaggtgtggggacccacagggaaccgaacggaggacccagaaaccacctacagaggtggtcactacacagctccagccccagccgtggctgctgagaggccatgttggccttgtgctgctagatcatcctatttttaaagaaaagccataa

SEQ ID NO: 5048 - DNA, 1005 bp, Homo sapiens
atgcttcaagatgttccatctttagacaccgccagaaacaaacaaacaacccagtatgtcatctttgaaatgatccaacgaatcgaatgccgttgctctaagtacagtggagcgcacggccagacgcgacgcccctcagcacggaacccagcctcgcggactaccccgaagctcagagccacatcccgcgcagaggaccgcggcgaccggaaaagcaaggcagaggcggaaaaccaccgcgagcgctggggcgagagagggcaggcggaggctcgcggggaccaccagcatccccggaccctctcagccgtccctgttcacaggcaccgcccccaggagcctcggcaggggcctaggacgccccggcgtgcagaagagaagcgggatcagatggcgtcccatgtagagtgccgtcctctgggagtgtttgagtgtgaactctgtaccttgacagctccgtacagctatgtgggacagaagccccccaacacccagtcgatggtcctcctggaggaaagctatgtcatgaaggatcccttcacctccgacaaggacagattcctggtcctcggctcgtgctgcagtttgtgcagcaggctggtgtgtgtgggcccggtgggacggatggaagtggagcagcatggctttcacagcgtgcccagtgtactcagagtgaccccagagtctgagaagtccctgagcatctgccacaggttgacacacacaaaggggagctgtatcaatagccagggggacgagatgggccagggtgggaggagcctccgcagtgtggcatgggagtatctgaggctcatggaggagctggtggtccaggagaagctgggaaaggaagactgcaaaggaaattcggcaagacttggagaaaaggaaagctccatcaaagaggacccccagccagcccggttctcggacggcccaggcctgagtgagtgctgctcagatgtgactgagagggatgacctccttcagcagggcagctcctaa

SEQ ID NO: 5049 - DNA, 764 bp, Homo sapiens
  SIMILAR (655)..(329): 291254mologous to Homo sapiens Human secreted protein sequence encoded by gene 27 SEQ ID NO:150,accession number AAY91477,Smith-Waterman Score=59.
cgcggagccgtgggacgagggcggcgatggcgtcccatgtagagtgccgtcctctgggagtgtttgagtgtgaactctgtaccttgacagctccgtacagctatgtgggacagaagccccccaacacccagtcgatggtcctcctggaggaaagctatgtcatgaaggatcccttcacctccgacaaggacagattcctggtcctcggctcgtgctgcagtttgtgcagcaggctggtgtgtgtgggcccggtgggaatgcagtttattctactccaagagattctgcctcccttgtgtccgggagaacatcaatgcttttcctcaggaaattcggcaagacttggagaaaaggaaagctccatcaaagaggacccccagccagcccggttctcggacgtgagtgcaactggggctaggtcatcgggcggcaccctgcacagagctcctaggaccagcctgcgccaaggatgctgctgagctgggaaccgccatgcctggccttgtttttggaccactgggagcagcactgcagcccaggggagctggagtccagcttggagcagccacaggcccagggagctgtagcaagagggtagtccaaaggcagatgccagacaagacacagccaggaacccggccaggtccccccacatgcccctcagggcccaggcctgagtgagtgctgctcagatgtgactgagagggatgacctccttcagcagggcagctcctaagaggctgcgtgcaggtgcgtgtgggggg

SEQ ID NO: 5050 - DNA, 1474 bp, Homo sapiens
  SIMILAR (319)..(816): 961254mologous to Homo sapiens arginine N- methyltransferase,accession number AF263539,Smith-Waterman Score= 839.
tttcgtccgctgcctgctcctgaggaggaaaatttcgtttaacgcggccgagagcaccgaggtgaacagccccccctcccagcccccccagcccgtcgtccctgctaagcccgtgcaatggcgtccatcatgtgtccactcaacccagctgcccaggacggggcaagatgtccaagctgctgaacccagaggagatgacctcgagagattattacttcgactcctatgcccactttgggatccacgaggaaatgctgaaggatgaggtgcggactctcacttaccggaactccatgtaccacaacaagcacgtgttcaaggacaaagtggtacttggttgtggggagtggaactgggatcctttccatgttcgctgccaaggcaggggccaagaaggtgtttgggatcgaatgctccagtatttctgactactcagagaagatcattaaggccaaccacttggacaacatcatcaccatatttaagggtaaagtggaagaggtggagctgcctgtggagaaggtggacatcatcatcagcgagtggatgggctactgtctgttctatgagtccatgctcaacacggtgatctttgccagggacaagtggctgaaacctggggggcttatgtttccagaccgggcagctttgtacgtggtagcgattgaagacagacagtacaaggacttcaaaatccactggtgggagaatgtctatggctttgacatgacctgcatccgggacgtggccatgaaggagcctctagtggacatcgtggatccaaagcaagtggtgaccaatgcctgtttgataaaggtctggacactcatccggggtggacctgggtgtgctgggagccccgctgtgccaccctggagtccaggcaatgccggctcctgcacagcccccacctgggcaagggcgaaggtggtgagactgcgatatgagccagaagtgagattggaaggccatgctacactggtgacggagggaaccaagaaagaaagataccagggaccttggaaagagcctggagcctggctgattggccctgagaaggtgatggaaaagtcagtccttactcctaatgtcatccttgatgcctcctattgctgggaacttgcgtatcaaaaaattggggaaggagtagtctggttcatctacatcactggagggcctgataaaacacagattgctgttttggtccagcaggaggtggacatttacacagtgaagacggaagagctatcgttcacatctgcattctgcctgcagatacagcgcaacgactacgtccacgccctggtcacctattttaatattgaatttaccaagtgccacaagaaaatggggttttccacagccatggaggaaccatgcatccctatatttgtgctgtccaaggagaaggtaaataatgttgtggttgttacagcacaagttgagagtgtgttggatgagggagaggcaggag

SEQ ID NO: 5051 - DNA, 615 bp, Homo sapiens
  SIMILAR (335)..(484): 541254mologous to Homo sapiens hypothetical protein,accession number AL110192,Smith-Waterman Score=128.
  misc_feature (1)...(615): n = a,t,c or g
tgattttgtacatatttatttgaaaatatgctgtcaacatcatgacttttcaaaacttaaaaaaaaaacttctgcatgcatctcctaagaattagaacattatcctacgtaactcaattatcacttctagaaaaatcaaatataccacattatctactacccattccatcttcctatttccccaaatatccccccaaatgtctcttataggttttttttatgaatcagaagctaataaaggatcacactttccatttggttatgtctcttgtcttaatctagcagagaccactttttgttttactacatttgctttttgaaaagtccagaccagggccaaaatgcacaaactatggcttacaacatcacacccctgcgtagggccagtggaatgtgtgcaagatcagtttgggcttcattaactatgaagtagggggatagcaagaaggctctttttccatatgaaagaagtttgagggatggcnagtgcagtgcctggaatgtttggccgagtctgntgaggggccccaaggctggttgcagctcctcgacctggatcggttgggtcagtcgcttgaagaacatcaccctgggatggatgccagtgatcctcgc

SEQ ID NO: 5052 - DNA, 3729 bp, Homo sapiens
  SIMILAR (1518)..(2831): 801254mologous to Homo sapiens unr protein,accession number AF077054,Smith-Waterman Score=1669.
gcttatggcggcgctggagagggggcgctgagctgttgggtatgaagtgtaacagaacagactttaccacctgaaactgctgcttcaagttcagatcaggcaaggaacaaacctcgtaacaactaacaagaccaaagaagagtacacttaagttgaagacacaacacttgatctgaaacaagaagtttgtgcctactcaacagctttgaaagagcacttcccaacgctgctagtagtctttgttttcttcagtgctgtactgtgagattgcccggtacagcagcagttgtattctttattagcttggtagatcattttctctcgctcttttttttaatactagcaactttcatcctttgaaacgtgtgctgaaaaagaagaatcagcaaatactactgaaagtgcaatatttgagtatcactgcgagatgagctttgatccaaaccttctccacaacaatggacataatgggtaccctaatggtacttcagcagcactgcgtgaaactggggttattgaaaaactgttaacctcttacggatttattcagtgttcagaacgtcaagctagacttttcttccactgttcacagtataatggcaacctgcaagacttaaaagtaggagatgatgttgaatttgaagtatcatcggaccgacggactgggaaacccattgctgttaaactggtgaagataaaacaagaaatcctccctgaagaacgaatgaatggacaagttgtgtgcgctgttcctcacaacttagagagtaaatctccagctgccccgggtcagagtccaacagggagtgtatgctacgaacgtaatggggaagtgttttatctgacttacacccctgaagatgtcgaagggaacgttcagctggaaactggagataaaataaactttgtaattgataacaataaacatactggtgctgtaagtgctcgcaacattatgctgttgaaaaagaaacaagcccgctgtcagggagtagtttgtgccatgaaggaggcatttggctttattgaaagaggtgatgttgtaaaagagatattctttcactatagtgaatttaagggtgacttagaaaccttacagcctggcgatgatgtggaattcacaatcaaggacagaaatggtaaagaagttgcaacagatgtcagactattgcctcaaggaacagtcatttttgaagatatcagcattgaacattttgaaggaactgtaaccaaagttatcccaaaagtacccagtaaaaaccagaatgacccattgccaggacgcatcaaagttgactttgtgatccctaaagaacttccctttggagacaaagatacgaaatccaaggtgaccctgctggaaggtgaccatgttaggtttaatatttcaacagaccgacgtgacaaattagagcgagcaaccaatatagaagttctgtcaaatacatttcagttcactaatgaagcccgagaaatgggtgtgattgctgccatgagagatggttttggtttcatcaagtgtgtggatcgtgatgttcgtatgttcttccacttcagtgaaattctggatgggaaccagctcccatattgcagatgaagtagagtttactgtggttcctgatatgctctctgctcaaagaaatcatgctattaggattaaaaaacttcccaagggcacggtttcatttcattcccattcagatcaccgttttctgggcacggtagaaaaagaagccactttttccaatcctaaaaccactagcccaaataaaggcaaagagaaggaggctgaggatggcattattgcttatgatgactgtggggtgaaactgactattgcttttcaagccaaggatgtggaaggatctacttctcctcaaataggagataaggttgaatttagtattagtgacaaacagaggcctggacagcaggttgcaacttgtgtgcgacttttaggtcgtaattctaactccaagaggctcttgggttatgtggcaactctgaaggataattttggatttattgaaacagccaatcatgataaggaaatctttttccattacagtgagttctctggtgatgttgatagcctggaactgggggacatggtcgagtatagcttgtccaaaggcaaaggcaacaaagtcagtgcagaaaaagtgaacaaaacacactcagtgaatggcattactgaggaagctgatcccaccatttactctggcaaagtaattcgccccctgaggagtgttgatccaacacagactgagtaccaaggaatgattgagattgtggaggagggcgatatgaaaggtgaggtctatccatttggcatcgttgggatggccaacaaaggggattgcctgcagaaaggggagagcgtcaagttccaattgtgtgtcctgggccaaaatgcacaaactatggcttacaacatcacaccccctgcgcagggccaccagtggaatgtgtgaaagatcagtttggcttcatttaactatgaagtaggagatagcaagaagcttctttttccattgtgaagaaagttcaggatggccattgagctacaggccaggagatgaggtggagttctccagtgattcttaatccagccgcaactggcaaagtgcaagcgccctgtaaatgtttggcgaagtctgtgaagggcccccaaggctgttgcaagctccctcgacctgatcgggttgggtcaatccgcttgaagaatatcacctctggatgatgccagtgctcctcggcctaatggttccttcgtcagcccaagggggaccagataacgtcaatggggttttggtgcagaaagaaagatcccgtcaagctggtgtcattgactaaccacatccaccaaagcacaccatttaatcccactatgattcaagttggggggaatctcggtgaagggttctgaatatctccctcttcatccctcccgaaatctgggattacttattctattgaggctattacaccagttttacacacctctcctcggtgttatgtttaaaaaaataaataaatttaaggaaaaccattttaaataatgcacagttgcagccggggaaaaacttaaggtgggcgccttatagtatcaattttaggagctttatcttggtgcatttaacgcaactgggtaattgcagaatccactttgcctgtgtaagtggaaaaatataggcttgtttatctttggttgccctatggaaattctggcactttttcattatatactctaccttcattaattacttctgggcaagatgttctgccttaggcactcagttgcattcttttcctttttcttcctgttcattatgctttaattctgaggaccatatgagggtagaatatattatcttttaaaaattacaaaaatttgtataggcaaaccatttcttaaagttgatgggccaaattttaaaatgttatttttcatatcatttataatcttgtcacaatccacttaaagaagtttggttatatttcagtgaaaattttcttccagagtaggttttttttcgtgggttgggggggtaactttactacaattaggtaagtatggtgcagaatttcatgcaaatgaggagtgccagcagtgtgataatttaaacatatttaaacaaaaacaaaaaaatgaatgcacaaacttgctgctgcttagatcactgcagcttctaggacccggtttcttttactgatttaaaaaaaaaa

SEQ ID NO: 5053 - DNA, 1078 bp, Homo sapiens
  misc_feature (1)...(1078): n = a,t,c or g
tcaggtacctccagagctttgaggggtggggcagagagtcagtgggactgggaggactagggcagtgtcccctcatccctgggacggttttcctgaatggcctggcaggctgggggctgtcgcgtcaacagccaacctcctggatgatgtggagggccacgcgtgtggggaggctggaggggagatcgaagctccaacttctctatgatcggggatctcccagcggagttcctgggtgtttcatgggagcacccgccctgtcccctggaggaacacactgagggttggggggcgggtgacccaaagatatggatccccctgacttggtcgacattgcttccccctttctgcaacccctgagaaggggccctagccctacttccacctagatgagtacctgtagcatgaagtgccaggtactgtttctggggaatattcttttgggtgtgaggtggcagacaggcctgccccctgtgggagcccgtcggccgtgagaaccaagcactgggcagcttcagtctgtgggcccagaggcttcttcaactttcacccagtcccttccaaaggccacgtgggcaggaagactctgcctcagaccctcctgggcccgcagctgaaaccctgatcctcatgccacattcgagggtcaggaggcatccagaaacaaggactggaagggcctcagaggtcatctagatagtccagcttttccatcccattttatagatgaggaaatttgaggcccaaagacgaggggagaacttgtccaaggtctcagagctcagtggtggaccctggccagcacctgagtgtcctgctgcctctctccctggacccatgcatcgtctacctggggggatctgcatgggtcccaaatgaagggggcagagagagtcaggtcagctctcttgcccagtctaggggccgtgcctgagcgaggccctgcagggttagaggatgaggcagcttccctctccttttcagatgaagacttccgggggcaggcgtcaggaggcacccaaggttggagggaaggcctgcgagaaaggacagttaagagattgccagcagttntttc

SEQ ID NO: 5054 - DNA, 602 bp, Homo sapiens
  SIMILAR (1)..(198): 811254mologous to Takifugu rubripes BAW,accession number AF153879,Smith-Waterman Score=256.
gccttattcagggacaagctgaaacacatgggaaagtccacccggaggaaactgtttgaacttgcccgagccttctcagagaagaccaaaatgaggaagtcaaagaggaaacacttgttgaagcatcagtccaggctgggggctgccgcgtcaacagccaacctcctggatgatgtggagggccacgcgtgtgatgaaaaacttccggggccaggcgtccaggagggcaccccaaggtggaggaaggccctgccgagaaggacagtaagagatgcccagcagctcttccttgcccagagatgatctgtacccggtggggggcagctggaaagcaacactggcccccagctgaagggcccagctgcagccagacagatggtgcttgagaaccgaggcccggtgatcctccagccacagtccagcccaaccactgccactttccatgggacttagaacttcggagttgctgccttgcaattggaggaaggacctggggcccctataggcagcagccaattacagccccttttgtagccaggcgttcctatggtcaaagagtggaaatgcaggaaccaacctccctttaaaaaaaaaaaaaaaaa

SEQ ID NO: 5055 - DNA, 775 bp, Homo sapiens
  SIMILAR (27)..(290): 611254mologous to Homo sapiens Human myelin oligodendrocyte glycoprotein gene,accession number AAZ29204,Smith-Waterman Score= 298.
  misc_feature (1)...(775): n = a,t,c or g
tttttttttttttttttgacagacatacttttattcttttatttttgagatggagtttcactgtcacccaggctggagtgcaatggagcgatcttggctcactgcaacctccacctcccaggctcaagcaattctcctgcctcagcctcctgagtagctgggatcacaagtgcctggcaccacgcccagctaatttttgtagctttagtaaagacggggtttcaccatgttggccaggctggtctcaaactcctcacctcaggtgatccacctgcttcggcttccccaaagtactgggattaccaggcgtgagcccactgcgcccggccttaacataggattttcatcctagaatgacttttcccccnaaaaagattcaatccttaggccctcttgctgtaggcaagttcccatgggactgccacaaaaagaggcagggaaacagtcccccatggggagattgtaagtttctttaaaaataggcttcctaggcccaggaatggtgtaaacatgcttgtaatccccagcaggttaagaagccaaggcagaggatcccttgagcctaggcattacagaccagcctgggcaacacagggagaccctcctgtctctataaaaaatcaaaaaagtttgccaggcatggtagcatgcgcctgtggtcccagctactcatgaggccgaggtgggaggaactctagagcccaggaggttgaggctacagtgagccacagttatgccactgcaatcctgcttgggtgacagagcgagactttgt

SEQ ID NO: 5056 - DNA, 325 bp, Homo sapiens
  SIMILAR (63)..(269): 981254mologous to Mus musculus putative,accession number AK006287,Smith-Waterman Score=364.
atggggacgagcagtggatcctggccgaggtggtcagttacagccatgccaccaacaagtatgaggccttgttccagaaggagcagctcgtgctggccctgtatccccagactacctgcttctaccgcgccctgatccatgcgcccccacagcggccccaggatgactactcggtcctgtttgaagacacctcctatgcagatggctattcccctcccctcaatgtggctcagagatacgtggtggcttgtaaggaacccaagaaaaagtgatgccgcctggcagactcgccatcccccaacgacacagggcaggacagcagagg

SEQ ID NO: 5057 - DNA, 523 bp, Homo sapiens
  SIMILAR (335)..(481): 761254mologous to Mus musculus putative,accession number AK006287,Smith-Waterman Score=182.
cggccgcggcggatgggaagccgtgcacgacgagcacaatctccatggggaggagaacaggaatgttcctgtgagccccgccgcgccctaccgccagcgcagcccagcatcgcgggtcccctcctatcccaccggagaacggggtcctcactcccagcttcagccgagccctggccccgcaactgcctgaaggcacgccccctgcacctgcccacctcaggtcccgcctccagcccagtggccaagatcgcgggtctctacaatgacttggagccaccccggaagaccatgcgcagaggggtgctgatgaccctgctgcagcagtcggccatgaccctgcccctgtggattgggaagcctggtgacaagagactacgtggccagacctggagacaaagtggctgcccgggtgaaggccgtggatggggatgagcagtggattctgggcgaggtggtcagttacagccatgccaccaacaagtgagtgacaccagccccggggctgctccctgcccttcctgtc

SEQ ID NO: 5058 - DNA, 754 bp, Homo sapiens
  SIMILAR (228)..(752): 961254mologous to Escherichia coli branching enzyme (EC 2.4.1.18),accession number M13751,Smith-Waterman Score=942.
ctaaattgctggtagctgacgaatattttgtaagtaatggcaaactgtcagctcatcgtatccagtcgtcgcgtatccggtgaacaaaacgcaaaatcgtctgccaatttttctccagcagcagaatactctcgttatgcagcgatattttttgctttcatgataaatatcgaatgaacgacgaatgaggatcaccgagcagacagagtcatgattatcccttataaaaggttgtacagactgaagagcgcaaaaaagcgaatcagtttgatgcgccaatctctatttatgaagttcacctgggttcctggcgtcgccacaccgacaacaatttctggttgagctaccgcgagctggccgatcaactggtgccttatgctaaatggatgggctttacccacctcgaactactgcacattaacgagcatcccttcgatggcagttggggttatcagccaaccggcctgtatgcgccaacccgccgttttggtactcgcgacgacttccgttatttcattgatgccgcacacgcagctggtctgaacgtgattctcgactgggtgccaggccacttcccgactgatgactttgcgcttgccgaatttgatggcacgaacttgtatgaacacagcgattcgcgtgaaagctatcatcaggactggaacacgctgatctacaactatggtcgccgtgaagtcagttactttctcgtcggtaacgcgctttactggatgaaccgttttggtattgatgc

SEQ ID NO: 5059 - DNA, 2712 bp, Homo sapiens
  SIMILAR (1246)..(2058): 941254mologous to Escherichia coli branching enzyme (EC 2.4.1.18),accession number M13751,Smith-Waterman Score=1429.
atggggcttgatgatggcgtggcgcgcaatctcgggctggccttgtcgcttgcgcgtctggcagacgctgtcgctggcgatgtcatcagtgcgctgctggtgaacgctgtggggattatcgggcttatcgggttgttcgcgaccgctgtggccaaaattgtgggggagcggtggttcgccagacgccattttttcgatattgcgccgtggatggaggaaatcgccatcaagaaacgcggcatgaagttgatgcgccacttcactggcgaccgcagatttgccgctgcccgatacgcccatcaagacgtaaatgtggtgatcatggttagtcgtgctcaaagtggtgcccccacaatacaagaattaaaaatgttacgggtaactgttatcggtaacattgtccagccggacaatatcagaagcaatatccatccatgccttaagtgtataagtattcgccacgaatacgcgccagcaggcgttcagcgccaatactgcccatccgctcacgcggcgtcagcacgctcgcaagtcgtggctccatcacctgaccaatgtcatgaccgtggaaaccggcaatcgccatatcgtcaggaacttttaaccccagacgctgacattcaaacgccgcgccgaccgccaggtcatcattcgtacagaacacgccatccagctgcggatattcccgccgcgcctggcgaatcagttcaataccggaagaaacagaccgaacttcataccggaatattcaatgtggtaaccatccgccagttcctgctcggcttccggctggtcaaacgggtgacggtgacataccgccacgcccgcgatggcaaagcccgcaaacagcaccgcgtaaaccgccagacctgccatcatcaggaagaacaaaatcccgatgttcaggtcggcaaccacccaacccggactgactggcacaatcgcaaaggccagcagcagcgaggtaaaggcaatcatcggtgccagggtaaagatgacgcgatccgagaatttcgggatccagtcttctttaaagaacattttgatcatgtccgcaaccagctggagcgaaccgccccagccaacacggttaggtccgtaacggttctggaacagacccagcaggcgacgttcgccaaagctcatgaatgccccgcaggtgacaaccaccagcaggatcaccaccgctttgaggatgatcctcaagatgcgcgccagccagcaccggagcatgccgacatttcctcggaagccacctgcctggcggcaggcctcggcgaattcaccggggcgggacgggatatgggcggtctgggcttctggtacaagtggaacctcggctggatgcatgacaccctggactacatgaagctcgacccggtttatcgtcagtatcatcacgataaactgaccttcgggattctctacaactacactgaaaacttcgtcctgccgttgtcgcatgatgaagtggtccacggtaaaaaatcgattctcgaccgcatgccgggcgacgcatggcagaaattcgcgaacctgcgcgcctactatggctggatgtgggcattcccgggcaagaaactactgttcatgggtaacgaatttgcccagagccgcgagtggaaccatgacgccagcctcgactggcatctgttggaaggcggcgataactggcaccacggtgtccagcgtctggtgcgcgatctgaacctcacctaccgccaccataaagcaatgcatgaactggattttgacccgtacggctttgaatggctggtggtggatgacaaagaacgctcggtgctgatctttgtgcgtcgcgataaagagggtaacgaaatcatcgttgccagtaactttacgccggtaccgcgtcatgattatcgcttcggcataaaccagccgggcaaatggcgtgaaatcctcaataccgattccatgcactatcacggcagtaatgcaggcaatggcggcacggtacacagcgatgagattgccagccacgttcgtcagcattcactaagcctgacgctaccaccgctggccactatctggctgggcgtcaacttcacacttttctccgctcatgccgagcgggtagaactgtgtgtctttgacgccaatggccaggaacatcgctatgacttgccagggcacagtggcgacatttggcacggttatctgccggatgcgcgcccgggtttgcgttatggttatcgcgttcatggcccctggcaacccgccgaggggcatcgctttaacccggcgaagttgttgattgatccttgcgcgcggcaaattgacggggagtttaaagataacccgctgctgcacgccggtcataatgaacctgactatcgcgacaacgccgccattgcgccgaaatgcgtagtggtggttgatcactatgactgggaagatgatgccccgccgcgcacgccgtggggcagcaccatcatttatgaagcccatgtcaaaggattaacaaacttgcacccggagatcccggtcgagatccgtggcacttataaagccctcgggcatccggtgatgatcaactatttgatacaattgggcattaccgcgctggaactgctgccagtggcgcagtttgccagtgaaccacgtctgcaacgcatggggctaagtaactactggggttacaaggccggtggcgatgtttgcgctgcatccggcgtatgcctgctctaa

SEQ ID NO: 5060 - DNA, 925 bp, Homo sapiens
  SIMILAR (89)..(502): 961254mologous to Mus musculus putative,accession number AK006287,Smith-Waterman Score=669.
ggaacgcgcctgctcccctcgtcgcagtttccagcccgacgagcttgttttgtcccggactcggtgcccctgtagacaatgtttcttcttgtctgccgattcccgcattgcagagcttctgacagagctccatcagctgagcaaacaaacccaggaagagcgttcgcggagcgaacacaacttagtgaacatccagaagacccatgagcggatgcagacagagaacaagatttctccctattaccggacaaagctgcgtggcctctacacaaccgccaaggccgatgcagaggctgagtgcaacatccttcggaaagctctggacatgatcgcggaaatcaagtctctgttggaagagaggcggagtgcggccaagattgccggtctctacaatgactcggagccaccccggaagaccatgcgcagaggggtgctgatgaccctgctgcagcagtcggccatgaccctgcccctgtggatcgggaagcctggtgacaagccctctcagccttccagccccctcgttttggctgcctctaaggccctccaggtcctcctgggcttcctcctctacaatcttccctgtctttcccaccgccaccacccccagttcctcagccgcctgcgcctcccgctctacagtggggactgcatctcccaggagtgcctcaacctggtgttcctgctggcagacgtgtggttcggctttctgccaagcatctacctcgtcttcctgatcattctgtatgaggggctcctgggaggcgcagcctacgtgaacaccttccacaacatcgccctggagaccagtgatgagcaccgggagtttgcaatggcggccacctgcatctctgacacactggggatctccctgtcggggctcctggctttgcctctgcatgacttcctctgccagctctcctga

SEQ ID NO: 5061 - DNA, 477 bp, Homo sapiens
  SIMILAR (319)..(263): 781254mologous to Homo sapiens Smaller hepatocellular oncoprotein (hhcm) gene preoduct,accession number AAR07057,Smith- Waterman Score=75.
  misc_feature (1)...(477): n = a,t,c or g
tttacatctaggtagcttctgagcggtaaaaattagcttagttccttggggaatataaggaaagtcttcccagataagaaagttggcctgctgtcttttgttttgtttggagatggggtcttgctctgtcacccaggctggagtgcagtggcgcgatcttggctcactgcaacctccacctccgggattcaagcgattgtcctgcctcagcctcctgagtagctgggatttaggcgcccaccaccacgcctggctgattgttttgtatttttagtagagacagggtttcaccatgttgtccaggctggtcctgaactcctgggcctcaggtgatccccccggcccccctgccgccttcgggcttcccaaagttgttgagatttacagggcgtgaaccacttgcgcccagccagccttgccgtatttttgaaagttgaacagggatttgccaagaagataantacaggataagatatt

SEQ ID NO: 5062 - DNA, 1504 bp, Homo sapiens
  SIMILAR (3)..(65): 851254mologous to Escherichia coli branching enzyme (EC 2.4.1.18),accession number M13751,Smith-Waterman Score=105.
atggcagttggggttatcagccaaccggcctgtatgcgccaacccgccgctggtctgaacgtgattctcgactgggtgcaagcccacttcccgactgatgactttgcgcttgccgaatttgatggcacgaacttgtatgaacacagcgatccgcgtgaaggctatcatcaggactggaacacgctgatctacaactatggtcgccgtgaagtcagtaacttcctcgtcggtaacgcgctttactggattgaacgttttggtattgatgcgctgcgcgtcgatgcggtggcgtcaatgatttatcgcgactacagccgtaaagagggggagtggatcccgaacgaatttggcgggcgcgagaatcttgaagcgattgaattcttgcgtaataccaaccgtattcttggtgagcaggtttccggtgcggtgacaatggctgaggagtctaccgatttccctggcgtttctcgtccgcaggatatgggcggtctgggcttctggtacaagtggaacctcggctggatgcatgacaccctggactacatgaagctcgacccggtttatcgtcagtatcatcacgataaactgaccttcgggattctctacaactacactgaaaacttcgtcctgccgttgtcgcatgatgaagtggtccacggtaaaaaatcgattctcgaccgcatgccgggcgacgcatggcagaaattcgcgaacctgcgcgcctactatggctggatgtgggcattcccgggcaagaaactactgttcatggcggccaagattgccggtctctacaatgactcggagccaccccggaagaccatgcgcagaggggtgctgatgaccctgctgcagcagtcggccatgaccctgcccctgtggatcgggaagcctggtgacaagcccccacccctctgtggggccatccctgcctcaggagactacgtggccagacctggagacaggttgcttgcccggttgaagcccttgaatggggaacgagcagttgattccttgcccgaaggtggtcaagttacagccattgccacccaacaaggtatgaggtagattgaccatccgattgaagaaaggccaaagagagacacacccttgagccggcgccgtgtcatcccgctgccccaagtggaaggcccaacccggagacggaccctgaggcctttgtccaagaaggagcagcttcgtgctggccctgtatccccagactaccatgcttctaccgcgcccttgatccatggcgcccccacagcggccccaggatgactaattggtcctgtttgaagacacatcctatgcagatggctattcccctcccctcaatgtggctcagagatacgtggtggcttgtaaggaacccaagaaaaagtgatgccgcctggcagactcgccatcccccaacgacacagggcaggacagcagaggacgtgctgggattaaacacattccccctctaaaaaaaaaaaaaaaaaaaaaaaaaaaaaaaaaa

SEQ ID NO: 5063 - DNA, 506 bp, Homo sapiens
  SIMILAR (191)..(487): 581254mologous to Homo sapiens Human myelin oligodendrocyte glycoprotein gene,accession number AAZ29204,Smith-Waterman Score= 233.
cctctgctcccgggttcaagcgactctgctgccacaccacacgcccaactaattttttgtatttttagtagagatggggtttcaccatgttggccaggctggtcttgaactcctgaactcaagtgatctaccctcctcagcctcccaaagtgctgggattacaggtgtgaaccactgtgcccagccttttttttttttttttctgagacggagtctcgctctgtcgcccaagctgtagtgcaatggtgtgatctcagctcactgcaacctccacctccccatttcaagcgattcttctgcctcagcctcttgagtagctgggattacaggcacgtgccaccatgcctggctaatttttgtatttttagtagaggcagggtttcaccatgttggccaggctggtcacaaactgctgatctcaagtgatccacctgcctcagtctcccaaagtgctgggattacaggcatgagccattgcatccagcctcattcccctgtgttttcta

SEQ ID NO: 5064 - DNA, 4252 bp, Homo sapiens
  SIMILAR (1)..(312): 591254mologous to Homo sapiens YY1 and E4TF1 associated factor 1,accession number AB029551,Smith-Waterman Score=236.
  misc_feature (1)...(4252): n = a,t,c or g
tctgcaaatgctacaacaaagaccagcgaaacaaatcacacctcaaggccccggctgaaaaacgtggacaggagcactgcacagcagttggcagtaactgtgggcaacgtcaccgtcattatcacagactttaagggaaaagactcgctcctcatcggacatcctcatccacagtgacctcccagtgcagggtcaggaacagcagaacccagagcagctcgggggtccagagagcaccggacaaagggcttcctccccgttccctcccaaccccaaagggcgacatgtcaagcagtcaatgatgaaatctttcctgaaattgccacatggaattgtgaaaaactatgaatcagggtatgaaattcaaaacctcccacctgcccatgctgcttgcatccctggagaatcttctgtggacatcgacctcttagtgatgctgcccaggataatttctgcttgccatgggcatctggccaccaaggaatttcgcaccctgacgattactcttgacacttttaatgtattccattgttttatatgattttcctaacaatcatttataattggatgtgctcctgaatctactttttataaaaaaaaaaaaaaaatctgctgtgcacaattttccatgtaccattacaactggttttttgtttttgttttgttgccggtggggagggctgggagggggagggaacttttatttattgtgttcacaaactccatcctttcagcatatccttttaagtttagttctttcttccagttatactatgtactatcagttttgatataactatatatatataaatataaaattatatataaagggttatttgaaaccaatccatggcaaacgctggggcttgatacactgtgaagtgaatacaacattgaacagttacagatctgggacagtcccttctatgaaagtgctgaaatttaattaaaaacaggcttacatgaagtatgttccaatccatgtgggaacttgactctctcatctgtctaaagagtactggacgatataaaaatataaatttttaaaacaagtggacctcaaatttaaaagactgccccccngatagcccggcatttggcaatggaataactgacaaatccacaagtggtttagttgggcagggctttgatcattcaaaagtaacctaaagtagcctcccagaatgccaagtattcgtggtaaattacggttacatgttatcatttgctgttctaacataggcactcatggaaaatatgggtattctgtaacttggaattccatccattttccagacggtctactcatgtctgagggtaaatctaggaaattgtcttaggttttagggattggaaacagtctataaaactgtatttttgggtccatcccaggaaagctagtcccctgtttcctccctttcctaacatgacattggcagtgggtgggtttcctgtaattaaaatttggtttgccctcatgtcccctttgtcctgataaaccttccactctacccgattcaagttgtgaagcattcctttttttccctcctcaaaaccctacctatgatttgttttaactgaacaaaggttatcaacccacacatccaggtcctggacatgggagcttttcagtgtttggagacatttctcaatcccctgctgtggtaggaactccagtggtgaacggcttgcgcgcctgcagccagagttgcagggaaagctcgtacttactgcgagcagcatgtaatcttttttcttcctggacataaagatagcttgagtaaactgttctatttcattctcttcactctttttactgtcttgcaaaaaaaaaaataataataataataatcaaagaccactaataagattccacctctccttattaaaataattttttaaaattttgttttgcttttgtttggatgtggggtctctcttctatttgacttttacatttagatacagagtttgtagtacttcagagacatttcaagcatgagaatttgaggttacctctctttatttgacctttagggactcacgggagggcagcctgatttgtaatgaagcaccacattttggtgttaaaaacctggtttgcttaataatagcagtaatttctgtctgtggaggcaacaaataaaaaaattaacagcttgaattgagtagccaacaggaaaggttcctttcacatttacattaaaactattctgtagtcactaatgtaccataatttaaattcttttctcaaaggtatagattataaagcagtgccatttgttgctgtggtcctattctcaaatgcatggacaatgttcccccctttttaaaataatgcttgtgtctgggatgcaagctttgcttatctttttaaatacatttttaaagtatttattaatgaaccaaaggaaatcagatgctttctataagcatcagaatatataatacatagtgatttgactatgaattttaaatccacattttaatattggtgggatattgcaaagacattccttctaaagttttaatattccttttattaagggtctcagggagggtaaattagtcagccatatttattttccagaggtttaaggaaattgctgtttttaactttttggaaaaaacttaaatgccacccaaactcatgtaggggtggcactgcttattggaacccattaactgttggggatggcactttgttcagacacactgtgtactttttcaaaaactagtttcatgtaaagtgattggaccccatagattagtgggaaaaagctgattaaccagctactcatagggctgctaattcattcatgccaatgttttggtttttcagttttgcctccgtgataaattaaagaatggggaggggtgaaggaaggggaagaagattgctttagaacaagtgggcatgaaattacccatctttgtaggaaaccgcagctaacagtggggagttatctaaggcaatcagatgttacagggccagccctttagctgctgtgggtgtattctgttgggtagtgaggtagtaggtactttatagacttttaattttgggaaattgatgacatccctcagggcatgtattctggaaatggaattcctgtaacttcctgtgttctggcagtatgcccctaccattagtagggcagcgtgtaaaaaccactagtgtaggattataaaggatatacattaaaagaggaccacaaatacttggtatttactggcacagaaagcagggtaaacgaacaaaaagcacagtgttaccgcttgcaagtttccatttgtttttaataccacggcaatctttcacacttcgtgcgtgtgcgcggcacacaggagctttaccctgacttgctctgcttgagtcatgcagttacaaaaaaaaaaggacatcttggacacccacacaatatttctaatccaaaacctttcagtttcaatctggatatttaaaaacattggcagaagcctctgtgagtttagttccactaagatgtttcacctgccttatcaagaccattgctcggtctacttttttaagctaccgtatcttaaattattgaaaatttattaattgctgaatatataataaccttttgcttggatgtaacccgaaaatggtttaagagccaacatttagagtatggacaatgggagctgaacagtttttaatgcgcaagcagttctgttcttgtgtatgacttgtaacccttaatttaccgtgtaaaaggatggttaccattatttcccttaggctttgtttgttggagaccaaatagagaatgcttgttaagtatgtcaaaaacaatcttatctttgtggaatttttggtaaatggtattataccgagctataatttttccatttgccccagaaaagacaggcttgttataacggcttttgggaagtttctggctctgtaaatgtctttaggagctgacagtctgttaggtttgtttttttccttcatgcctaaagtgtcagttggtagttttgagaactggtcaaaaattcacagatcttaaaagttttgagggaaatattatattagacactgctcttagatctagcaaataaaagatgttaatatattcctgttactggcatgtgcacgactatgttattagaagccactttatcattttcctgctttaaatagaaatgtctatttatgaattctgcttgtagttttttcacaaataaaatagtaaaatttacattggaaaaaaaaaaaaaaaaa

SEQ ID NO: 5065 - DNA, 918 bp, Homo sapiens
  SIMILAR (298)..(915): 791254mologous to Oryctolagus cuniculus elongation factor 1 alpha,accession number U09823,Smith-Waterman Score=831.
atgggaaaggagaagactcatatcaacattgtcgtcaatggacacatagattcgggcaagtccacctctactggccatctgatctacaaatgtggtggcatcaacaaaagaagcattaagaaatttgagaagaaggctgctgagatgggaaagggctccttcaagagttttgtctgtgactcgtcctggtatatcccaggacacagagacttcatcacaaacatctttacagggacatctcaggctgactgtgctgtcctggttgttgctgctggtgttggtgaatttgaagctgccctgcttctccaggatgtctacaaaattggtggtattggtactgttcctgatggccaagtggagactgttgctctcaaacctggtgtggtgatcacctttgctccagtcaacactacaactgaagtaaaatctgtcaaaatgcaccatgaagctttgagtgaagctttttctggggacaatgtgggcttccatgtcaagaatgtgtctgtcaaggatattcattgtagtaacaatgctggtaactgcaaaaatgacccaccaatggaagcagctggattcactgctcaggtgatctatcctgaaccatccaggccaaattgccacatggctcacattgcatgcaagtttgctgagctgaaggaaaagattgatcgctcttctggtaaaaagctggaagacggccctaaattcttgaaatctggtgatgttgccatcattgatatggttcctggtaagcccatgtgtgttgagagcttctcagactatccacctctgggttgctttgctgcttgtgatatgagacagacagttgcactgggtgtcatcaaagcagcggacaagaaggcagctggagctggcaaggtcaccaagtatccccagaaagctcagaaggctaaatga

SEQ ID NO: 5066 - DNA, 762 bp, Homo sapiens; identical to SEQ ID NO: 572
  SIMILAR (415)..(759): 851254mologous to Oryctolagus cuniculus elongation factor 1 alpha,accession number U09823,Smith-Waterman Score=489.

SEQ ID NO: 5067 - DNA, 706 bp, Homo sapiens
  SIMILAR (433)..(627): 891254mologous to Oryctolagus cuniculus elongation factor 1 alpha,accession number U09823,Smith-Waterman Score=297.
ttcgctgtcacgatttcgtggtgtcgtgaaaactacccctaaaagccaaaatgggaaaggaaaagactcatatcaacattgtcgtcattggacacgtagattcgggcaagtccaccactactggccatctgatctataaatgcggtggcatcgacaaaagaaccattgaaaaatttgagaaggaggctgctgagatgggaaagggctccttcaagtatgcctgggtcttggataaactgaaagctgagcgtgaacgtggtatcaccattgatatctccttgtggaaatttgagaccagcaagtactatgtgactatcattgatgccccaggacacagagactttatcaaaaacatgattacagggacatctcaggctgactgtgctgtcctgattgttgctgctggtgttggtgaatttgaagctgtgatcttcaagaatgggcagaacccgagagcatgcccttctggcttacacactgggtgggaaacaactaattgtcggtgttaacaaaatggattccactgagccaccctacagccagaagaaatatgaggaaattgttaacgaagtcagcacttacattaagaaaattggctacaaccccgacacaagagcatttgtgcccaatttctggtttaaatggtgaccacatgctggagccaagggctaacatgccttggtttaagggatggaaaagtcaccct

SEQ ID NO: 5068 - DNA, 1059 bp, Homo sapiens
  SIMILAR (4)..(558): 351254mologous to Homo sapiens elongation factor 1 alpha,accession number M27364,Smith-Waterman Score=143.
caatctgaacagccttgcgccctgccttccagggagtccaccaaattgggtggtattggtactgtctcttctgccccgatggaaacctggtttctccaaccccggtatggtggtcacctttgctcccagtccacggtaacaacggaaagtaaaattctgcgaaaatgcacccatgaagctttgaagtgaagctctttctggggaacaattgggggcttcaaatgtcaagaatgtgttctgtcaaggaatgtttcgtccgtggcaaacggttgctgggtgaccagcaaaaaatgaccccacccaatgggaagcaagctggctttcactgctccaggtgattatccttgaaccatcccaggccaaaataaggcgccgggcctatgcccctgtatttggattgcccacacggctccacattgcatgcaaagtttgctgagctgaaggaaaagattgatcgccgtttctggtaaaaagctggaagatggccctaaattcttgaagtctggtgatgctgccattgttgatatggttcctggcaagccccatgtgtgttgagagcttctcagactatccacctttgggtcgctttgctgttcgtgatatgagacagacagttgcggtgggtgtcatcaaagcagtggacaagaaggctgctggagctggcaaggtcaccaagtctgcccagaaagctcagaaggctaaatgaatattatccctaatacctgccacccccactctttatcaggtgtgggaagaacggttctcagaacctgtttgttttcaattggcccatttaaggttaagtagtaaaagattgggttaatgataaccaatgcatcgtaaaaacctttcaaaggaaagggagaatgttttgtgggccccttttgggtttatttttttggcgcggggccgttttaaagttattaagttttttaaaatcccgacttttttaatgggaaccaacttgaccaaaaaatttgtcacaaaaattttgggaacccattaaaaaaggttaaatgagaaaaaaaaaaaaaaaaaaaaaaaaaaagggcggccgct

SEQ ID NO: 5069 - DNA, 477 bp, Homo sapiens; identical to SEQ ID NO: 4112
  SIMILAR (291)..(61): 881254mologous to Homo sapiens glucose transporter-like protein,accession number M20681,Smith-Waterman Score=360.

SEQ ID NO: 5070 - DNA, 1131 bp, Homo sapiens
  SIMILAR (2)..(160): 641254mologous to Homo sapiens Human secreted protein encoded by DNA clone vq3 1,accession number AAB34695,Smith-Waterman Score= 172.
gagatggagtctcgctctatcgcccaggatggagtgcagtggctcaatctcggctcactgcaaactccgcctcccgggttcacaccattctccggcctcagtctcccgagtagctgggactacaggcacctgccaccacgcccggctaatttttttgtattttcactggagacggggtttcactgtgttagccacgatggtctccatctcctgacctcgtgatctgcccacctcggcctcccaaagtgctgggattacaggcgtgagccaccgcgcctggccaaaatgcagacattttattagggggataaggagggcaaggtaaagcttatggaactgagtgttagtgactttggcatttgtgtagctgagcacagcaagggaggggttaatgcagatggcaagtgcaccaaggagaaggcaggaacactggagcctgcaataagggaggagagaggactggagagtgtggggaataggaagaagaaatttccctttagactaaccgaatatattggggggaggaatagaggggaggtgtgcaggaaccagcaatgagaaggccagggaaaagaaagagctgaaaattgcaggaaagccggaagagttagaacctttttggatacagcagaagaaaccagccggctccacttaccgaccctgcccccccggttccgatgtccttccaagaattgaagtctttcccctggtgatggtcccctgccctgtctttccagcatcccactctgtcttgtcctccctggaagtgtatctcaagtcagccagtggctttcttgatgatgggcggttggaggtggtggttatagtgttgatggatccccttttaggttattttaggggtatatgtccccctgctttgaaccctgaaggccaggtaatgagccatgggccattgtccccagctgaggaccaggtgtctctaaaaacccaaacatcctggagagtatgcgagaacctaccaagaaaaacagtctcattactcatatacagcaggcaaagagacagaaaattaactgaaaagcagtttagagactgggggaaggccggatctctagagccatcctgctgaagtgccctgtgtgtaagtcctaataaactcacctactcacc

SEQ ID NO: 5071 - DNA, 508 bp, Homo sapiens
  misc_feature (1)...(508): n = a,t,c or g
cccccgactggtcctcgaaactccctgaccctgtgnacctgccccccctnggcccccccccaagtgcctgggnattaccgggcatgagcccacccagccccgaccccgatagaaataaattaaggataataaggatcctcaaaaatgccagcctaagttacctacaggttgaagtattcccttaccccaaaatgccttaggaacagaagtgtttcaggttttaaattttttctaattttggaatatgtgcattacacttagtgactgagcatccttaatttgaaaattcaaaatccaaagaacatttccttttagcatcatgttcgtggctcaaaaggtttcaaattctgcagtattttggatttcagtttaggatactcaagctctgttttgtatatagaataataccggaatcaattcagctagcaccaatggctatgtcatcatgacaccaaaaactaagtgaaagatgaggaatttaattaagttcgcacgcgtgggtcgaccc

SEQ ID NO: 5072 - DNA, 487 bp, Homo sapiens
ccaggctggagtgtagtgatgggatcttggctcattgcaacctctacctcccaggctcaagcaattctcctgattttaaaccctggcaacttatccaaagaattttaaagcactaaggagaccaaacaaaacatatttgtgggtcatatccagtcacagacctctaaatttgcaatctctctcatccagatacatcccataaacatgagatcaggcaccaagacattcatgatggtttaaggaaataaacaaagatctaagtttcccatatggactttcaaaattttccctgatatgcttccaagctgacctacctgttcctctctcccagcagcccccagcccgccaacaggactcacagctcttcctcctgcccaagattcctagagtctccctagactcctccaaagcccaagtcccaatccttctaagagacagttccagctagccccacagccaggaacaaacctcgtggccgcgtacatac

SEQ ID NO: 5073 - DNA, 572 bp, Homo sapiens
  SIMILAR (48)..(140): 961254mologous to Mus musculus putative,accession number AK013256,Smith-Waterman Score=165.
cgagtcaatccaggactacaaacacctgtgccaagacctgagcttctgccagcctgcctcctgacccgccaccccttactgtgccccagacgcacaatgcccgtgaccagtggctgcaggatgccttccacatcagcctctgaagggctggggggcagggggcatgcacccatgcaaaaggctcagaaactccccctccggcaagccctcagacttcggagcctgcgccttcccccctaccgcctcacctcacaggagggccaggcatgtattcctcagaggcgaaactgccaaactctttctcctgtcttgggttggctggcactggggcgggcatctagggtacagcctctgctcatggcactgggcctccagttcttccacatgtgtgcacccccagcttggccaaccctcagccttgcggtggggcccgaagcatcttcccttccgcttgggtctctgggattgggatgagtgcctggctcccatctcctcctcaccttttgttgctatcggcagctgctggctcaggggcatcccacctccgggctctgggttcctctgccctggaa

SEQ ID NO: 5074 - DNA, 1051 bp, Homo sapiens
  SIMILAR (35)..(145): 891254mologous to Mus musculus C184M protein,accession number AB012726,Smith-Waterman Score=173.
  misc_feature (1)...(1051): n = a,t,c or g
atccacgacgagctgagccgcgccgcccgcgcctccggacgggccccgccacgccgccggcgccgccaacgcgggacccgcagccggcccgcgtcgtcctgtcaacctcgactcagcgctggccgcgctgcgcaaggagatgttgtctgcaggtggggctgcggcagttggacatgtccttgttgtgccagctgtggggcctgtacgagtcaatccaggactacaaacacctgtgccaagacctgagcttctgccaggacctgtcatcctccctccattcggacagctcctacccaccggatgcgggcctgtctgacgacgaggagcctcccgatgccagcctgcctcctgacccgccaccccttactgtgccccagacgcacaatgcccgtgaccagtggctgcaggatgccttccacatcagcctctgaagggctggggggcagggggcatgcacccattgcaaaaggcttcagaaactccccctccggataagccctcatacttcggagcctgcgcccttcccccctaaccgcctcacctcacaaggaggggccaggcatgtattcctcagaggcgaaactgccaaactcttttctcctgtcttgggttggctggcactggggccgggcatcttagggtacagcctctgctcaatggcaactgggcctccaagttcttccacatgtgtgcacccccagcttggccaacccttcaagccttgcggtggggcccccggggaaaaaaaaaggggncatttcttttccccttccgcttgggttctcttgggattgggatgagtgcctggctcccatctcctcctcaccttttgttgctatcggcaagctgctggctcagagggcatctccacctccgaggctttagggttcctactgccctggaagaggctccagagacccggtcccaaataaccacccaacggccaggagggcagcaagggccccgtgctggatatttaaatttaggggccggtctcccagggcgcgtagataaataaatacactcagcgtcaaaaaaaaaaaaaaaaaaa

SEQ ID NO: 5075 - DNA, 848 bp, Homo sapiens
  SIMILAR (170)..(694): 1001254mologous to Homo sapiens lymphotoxin-beta,accession number L11015,Smith-Waterman Score=934.
cagtctcaatgggggcactggggctggagggcaggggtgggaggctccaggggaggggttccctcctgctagctgtggcaggagccacttctctggtgaccttgttgctggcggtgcctatcactgtcctggctgtgctggccttagtgccccaggatcagggaggactgggtttcagaagctgccagaggaggagccagaaacagatctcagccccgggctcccagctgcccacctcataggcgctccgctgaaggggcaggggctaggctgggagacgacgaaggaacaggcgtttctgacgagcgggacgcagttctcggacgccgaggggctggcgctcccgcaggacggcctctattacctctactgtctcgtcggctaccggggccgggcgccccctggcggcggggacccccagggccgctcggtcacgctgcgcagctctctgtaccgggcggggggcgcctacgggccgggcactcccgagctgctgctcgagggcgccgagacggtgactccagtgctggacccggccaggagacaagggtacgggcctctctggtacacgagcgtggggttcggcggcctggtgcagctccggaggggcgagagggtgtacgtcaacatcagtcaccccgatatggtggacttcgcgagagggaagaccttctttggggccgtgatggtggggtgagggaatatgagtgcgtggtgcgagtgcgtgaatattgggggcccggacgcccaggaccccatggcagtgggaaaaatgtaggagactgtttggaaattgattttgaacctgatgaaaataaagaatggaaagcttcagtgctgccgataaa

SEQ ID NO: 5076 - DNA, 910 bp, Homo sapiens
  SIMILAR (325)..(702): 431254mologous to Homo sapiens lymphotoxin-beta,accession number L11015,Smith-Waterman Score=185.
atgggggcactggggctggagggcaggggtgggaggctccaggggaggggttccctcctgctagctgtggcaggagccactatctctggtgaccttgttgctggcggtgcctatcactgtcctggctgtgctggccttagtgccccaggatcagggaggactggtaacggagacggccgaccccggggcacaggcccagcaaggactggggtttcagaagctgccagaggaggagccagaaacagatctcatccccgggctcccaactgcccaccttataggcgctccgctgaaggggcacgggctgaggctgggagacgacgaaggaacagggcgtttctgacgagcggaacccaggtctcggacgccgaggggctggcgctcccgcaggacggcctctattacatctactgtctcgtcggaataaccgggccgggcgccccctggcggcggggacccccagggccgctcggtcacgctgcgcagctctctgtaccgggcggggggcgcatacgggccaggcaactcccgatgctgctgctcgaagggcgccgagacggctactccagtgctggacccggccaggagacaaggtttctggcctctctggtacacgagcgtggggttcggcggcctggtgcagctccggaggggcgagagggtgtacgtccaacatcagtcaaccccgatatggtggacttccgcgagagggaagaccttctttggggccgtgatggtggggtgagggaatatgagtgcgtggtgcgagtgcgtgaatattgggggcccggacgcccaggaccccatggcagtgggaaaaatgtaggagactgtttggaaattgattttgaacctgatgaaaataaagaatggaaaaaaatcagtgctgccgataaaaaaaaaaaaaaaa

SEQ ID NO: 5077 - DNA, 848 bp, Homo sapiens
  SIMILAR (368)..(559): 591254mologous to Mus musculus ATFa-associated factor,accession number AJ132702,Smith-Waterman Score=218.
atggggtttctccatgttggccaggctggtctcaaactcctgacctcaggccattatcaaaagaagaggatgttttcagaaaacgaggaaaatgttaaacgcatgaaaacttcagagcaaattaatgaaaatatttgtgtaagtttggaaaggcaaacagcattcctggaacaggttcctgagtcctttgagcacctgccacctctcccagaaccaccagcaccactacctgaattagtagacaaaacccgagacacacttcctccccagaagcctgagctcaaagtgaaacgggttttcagacccaatggcattgccctgacttggaatataaccaaaatcaatcccaagtgtgctcctgaagaaaagctaccccctcttcctgtgtcatgagaactctaataataagttgatttggaagaagattggagaaattaaagctttaccactccccatggcctgtactttatctcagtttttagcttccaacagatactattttactgtccaatcaaaagatatttttggacgatatggaccattctgtgatataaaatctatccctgggttttctgaaaatcttacgtaaaaggtgtctaataatgatatactacttgttctttcatatttgttaagaccgcaatgttaccttaataatacatgtctttctattaagccctttcatatatttatctcgaaatttgctgtacgtttttgcgtttgggatatttttcttcattaaacttgaattgcttctttttatttttttctttgtataatgcattacaattttaattatacatgagctattttaactaaattcgtttgttcgcgtattaaatattcag

SEQ ID NO: 5078 - DNA, 495 bp, Homo sapiens
  SIMILAR (390)..(494): 881254mologous to Mus musculus fragile-X-related protein 1 isoform g,accession number AF124394,Smith-Waterman Score=158.
atgaagacactggaacatttagaatctatagagagtgctggtgctgtaaaaaaggctagaggtttcttggaatttgtggaggattttattcaggtttctaagaatctcattggaaaagtaattggaaaaaatggcaaagttattcaagaaatagtggacaaatctgatatggttccggtgagaattgaaggggacagtgaaaataaactacccagagaagacaaagatgatcgagacagccgacatcagcgtgacagcaggagatgcccaggaggaagatgcagaagtgtttcagggcgtcgaggtcgtggtggaccacgtggtggcaaatcctccatcagttctgtgcccaaagatccagacagcaatccatacagcgtacttgataatcagaatcagatcagactgcagacactgatgccagcaaatctcatcacagtactaatcgtcatacgaggtctcgtagacgaaggactgatgaagatgctgttctga

SEQ ID NO: 5079 - DNA, 2066 bp, Homo sapiens
  SIMILAR (1547)..(1831): 941254mologous to Mus musculus fragile-X-related protein 1 isoform f,accession number AF124394,Smith-Waterman Score=463.
atggcggagctgacggtggaggttcgcggctctaacggggctttctacaagggatttatcaaagatgttcatgaagactcccttacagttgtttttgaaaataattggcaaccagaacgccaggttccatttaatgaagttagattaccaccaccacctgatataaaaaaagaaattagtgaaggagatgaagtagaggtatattcaagagcaaatgaccaagagccatgtgggtggtggttggctaaagttcggatgatgaaaggagaattttatgtcattgaatatgctgcttgtgacgctacttacaatgaaatagtcacatttgaacgacttcggcctgtcaatcaaaataaaactgtcaaaaaaaataccttctttaaatgcacagtggatgttcctgaggatttgagagaggcgtgtgctaatgaaaatgcacataaagattttaagaaagcagtaggagcatgcagaattttttaccatccagaaacaacacagctaatgatactgtctgccagtgaagcaactgtgaagagagtaaacatcttaagtgacatgcatttgcgaagtattcgtacgaagttgatgcttatgtccagaaatgaagaggccactaagcatttagaatgcacaaaacaacttgcagcagcttttcatgaggaatttgttgtgagagaagatttaatgggcctggcaataggaacacatggtagtaacatccagcaagctaggaaggttcctggagttaccgccattgagctagatgaagatactggaacattcagaatctacggagagagtgctgatgctgtaaaaaaggctagaggtttcttggaatttgtggaggattttattcaggttcctaggaatctcgttggaaaagtaattggaaaaaatggcaaagttattcaagaaatagtggacaaatctggtgtggttcgagtgagaattgaaggggacaatgaaaataaattacccagagaagacggtatggttccatttgtatttgttggcactaaagaaagcattggaaatgtgcaggttcttctagagtatcatattgcctatctaaaggaagtagaacagctaagaatggaacgcctacagattgatgaacagctgcgacagattggtatgggtttcagaccttcttccaccagagggcctgaaaaagagaaaggatatgccactgatgaaagtaccgtctcttctgtacaaggttctaggtcttatagcggaagaggcagaggtcgtcggggacctaattacacctccggttatggtacaaattctgagctgtctaacccctctgaaacggaatctgagcgtaaagacgagctgagtgattggtcattggcaggagaagatgatcgagacagccgacatcagcgtgacagcaggagacgcccaggaggaagaggcagaagtgtttcagggggtcgaggtcgtggtggaccacgttggtggcaaatcctccatcagttctgttcaatatagatcaaacattcataattgcagtactcttaaacgaatatttcttgcctctgacatgaatatagtgctcaaagatccagacagcaatccatacagcttacttgataatacagaatcagatcagactgcagacactgatgccagcgaatctcatcacagtactaaccgtcgtaggcggtctcgtagacgaaggactgatgaagatgctgttctgatggatggaatgactgaatctgatacagcttcagttaatgaaaatgggctagatgatagtgaaaaaaaaccccagcgacgcaatcgtagccgcaggcgtcgcttcaggggtcaggcagaacgatagacagccagctatagatttcatttataaagaagttgaaaaagttgtctccctttggcaggcaaaagatgtgattgaagagcatggtccttcagaaaaggcaataaacggcccaactagtgcttctggcgatgacatttctaagctacagcgtactccaggagaagaaaagattaataccttaaaagaagaaaacactcaagaagcagcagtcctgaatggtgtttcataa

SEQ ID NO: 5080 - DNA, 2149 bp, Homo sapiens
  SIMILAR (1622)..(1672): 881254mologous to Mus musculus fragile-X-related protein 1 isoform e,accession number AF124394,Smith-Waterman Score=74.
atggcggacgtgacggtggaggttcgcggctctaacggggctttctacaagggatttatcaaagatgttcatgaagactcccttacagttgtttttgaaaataattggcaaccagaacgccaggttccatttaatgaagttagattaccaccaccacctgatataaaaaaagaaattagtgaaggagatgaagtagaggtatattcaagagcaaatgaccaagagccatgtgggtggtggttggctaaagttcggatgatgaaaggagaattttatgtcattgaatatgctgcttgtgacgctacttacaatgaaatagtcacatttgaacgacttcggcctgtcaatcaaaataaaactgtcaaaaaaaataccttctttaaatgcacagtggatgttcctgaggatttgagagaggcgtgtgctaatgaaaatgcacataaagattttaagaaagcagtaggagcatgcagaattttttaccatccagaaacaacacagctaatgatactgtctgccagtgaagcaactgtgaagagagtaaacatcttaagtgacatgcatttgcgaagtattcgtacgaagttgatgcttatgtccagaaatgaagaggccactaagcatttagaatgcacaaaacaacttgcagcagcttttcatgaggaatttgttgtgagagaagatttaatgggcctggcaataggaacacatggtagtaacatccagcaagctaggaaggttcctggagttaccgccattgagctagatgaagatactggaacattcagaatctacggagagagtgctgatgctgtaaaaaaggctagaggtttcttggaatttgtggaggattttattcaggttcctaggaatctcgttggaaaagtaattggaaaaaatggcaaagttattcaagaaatagtggacaaatctggtgtggttcgagtgagaattgaaggggacaatgaaaataaattacccagagaagacggtatggttccatttgtatttgttggcactaaagaaagcattggaaatgtgcaggttcttctagagtatcatattgcctatctaaaggaagtagaacagctaagaatggaacgcctacagattgatgaacagctgcgacagattggttctaggtcttatagcggaagaggcagaggtcgtcggggacctaattacacctccggttatggtacaaattctgagctgtctaacccctctgaaacggaatctgagcgtaaagacgagctgagtgattggtcattggcaggagaagatgatcgagacagccgacatcagcgtgacagcaggagacgcccaggaggaagaggcagaagtgtttcagggggtcgaggtcgtggtggaccacgtcggtggcaaatcctccatcagttctgtgctcaaagatccagacagcaatccatacagcttacttgataatacctgaatcagatcagactgcagacactgatgcccagcgaatctcatcacagtactaaccgtcgtaggcggtcatccgtagacgaaggactgattgaagatgctgttctgatggatggaatgactgattctgatacagcttcagttaatgaaaatgggctagtcacagttgcaggattatatttctagagctgagtctcagagcatacaaagaaacctccccaagggaaactttggctaaaaacaagaaagaaatggcaaaagatgtgattgaagagcatggtccttcagaaaaggcaataaacggccccaactagtgcttctggcggatgacatttctaaagctacagcgtactccgaggagaagaaaagattaatcccttaaaagaagaaaacactcaagaagcagcagtcctgaatggtgtttcataaactgaagaagttcctagtttacagttcttttacattacatttacaatagtgcttgtacaagcttgccaaagatagaatatggatcgccagtctttacgatcgcactttcagttcctccatttggaattcaaaaaggggagggatcctgaagaaatcatatgttaaacatactttgacacctactgtgttataaaatatatcatcagatgtgccttgagaatagtatatgtaacattaaaaaaaagttgctggctaaaaaaaaaaaaaaaaa

SEQ ID NO: 5081 - DNA, 1555 bp, Homo sapiens
  SIMILAR (341)..(376): 1001254mologous to Mus musculus fragile-X-related protein 1 isoform f,accession number AF124394,Smith-Waterman Score=59.
  misc_feature (1)...(1555): n = a,t,c or g
acggaatctgagcgtaaagacgagctgagtgattggtcattggcaggagaagatgatcgagacagccgacatcagcgtgacagctggagacgcccaggaggaagaggcagaagtgtttcagggggtcgaggtcgtggtggaccacgtggtggcaaatcctccatcagtttctgtgctcaaggatcagcccagcaatccattacagcttacttgataatacagaatcagatcagactgcagacactgatgcaagcgaatctcatccacagtactaaccgtcgtaggcggtctcgtagacgaaggactgatgaagatgctgttctgatggatggaatgacctgaatctgatacagcttcagttaatgaaaatgggctaggcaaaagatgcgattgatagagcatggccccttcaggaaaaggcaataaaccggcccaacttagtgccttctgggcgatgacatttcctaagctacagccgtactccaggagaaagaaaaagattaataccttaaaagaaggaaaacactcaagaagcagcagtcctgaatggtgtttcataaactgaagaagttcctagtttacagttcttttacattacatttacaatagtgcttgtacaagcttgccaaagatagaatatggatcgccagtctttacatcagcactttcagttcctccatttggaattcaaataaggggagggatcctgaagaaatcatatgttaaacatactttgacacctactgtgttataaaatatatcatcagatgtgccttgagaatagtatatgtaacattaaaaaaaagttgctggctataggaaatgttattttgttttcaaaatatggcagagatggggggtggtgggtggggtgggatccctaacgtaatattctttatgaaagcattagctgcttttgttacatttttaatatgcaaccacttcttcacctgaggaaaactagaatgaaatgcagtctaaaatattttgcactgaattgtaatttcttcattagtttagtcctggaaactggtctgttttaatgtgttttttaaatgctgtatgtagaggaaaatctgcagaccactggaatacatttgttaaactctcatctgcagggacactgggcgatacttggcagtgactgttctaccttgaggctttgtttggtttatttattaaagtgcacagtatttaaaaatcaaacatagctttagtcaaaacactaagctgaattagtcatgtccattcagacataacctgaactactgaaaagatcaatttccagaaggtttattctgtataaactacatgttagtcttcagtagaggatctttttttttcccnnnnnnnnnnnnnaaattgggggggtgggggggccaaaaggttttggttggcgggaggaaaaaaaacttggattttcctttgggggaatttttaaaatttttactttttacccccattgggggaaaaaagggggggcctataaaaggcctaagaaaggaacctttggtttttaaaaaggcttttatcctggccaaaaaaaaccttaaaa

SEQ ID NO: 5082 - DNA, 1780 bp, Homo sapiens
  SIMILAR (883)..(374): 331254mologous to Streptomyces ansochromogenes SanE,accession number AF228524,Smith-Waterman Score=139.
agctacaaaactaaatctactcacatatagggccttgaggcctagaatgtcagaattcggcacgaggctctgcctatggggagctgtgtggcctcgggacgtcagctctgtgggttcatttttctgtaccggggggaggaggtgtttgctgggattgatggggaactgtgggtgagtcctgcccatgagaagcaccaggcagagcccggcccggccttgggggccgtgagaccacaggtgaggacgcagccctgtgcggccctggtaacccgcagcctgtccctccccagccaacaacatctgcttctacggcgagtgttcctactactgctccacggagcacgccctgtgcgggaagccagaccagatcgagggcgtcgctggggggctttcctgcccgacctgtccctggccaagaggaagacctggcggaacccttggcggcgttcctaccacaagcgcaagaaggccgagtgggaggtggaccctgactactgcgaggaggtgaagcagacaccgccctacgacagcagccaccgcatcctggacgtcatggacatgacgatcttcgacttcctcatgggaaacatggaccgtcaccactacgagacttttgagaagtttgggaatgaaacgttcatcatccacttagacaatggaagagggtttgggaagtattcgcacgacgagctctccatcctggtgccgctacagcagtgctgcaggatccggaagtccacctacctgcgtctgcagctcctggccaaggaggagtacaagctgagcctgctgatggccgagtctctgcggggggaccaggaggcacccgtgctgtaccagccgcacctggaggccctggaccggcggctccgcgtcgtgctaaaggccgtctgggactgcgtggagaggaacgggctccacagcgtggtggatgacgacctggacactgagcacagagccgcctcggcgaggtagtgtccgccggccggttgcgctgcccgggacggagacagaggggccggacctcccagcaagcgcatgcgcccgtcgtgaattcagtgaattcagaggcaggacgggatcatccggagtcgggagctgctgccacaggaggcgaggctccccaggtctcataggacacattttgtcagtgtttgaccagaaaagcttgggaaggaagcgcgtgtctgtgctcacggacagaggcggccggcgccggaggcattccatcctttctgtagggaaaggagcctttatttactattttgtatttatatttgatgaataagtatataaacagagacgtgtacacagatgccaatcacctaccaaaccaaacacgaggaccgccctccctggttctgggggcccctcaaggccaagctcacccctcaagtgctctcacactcgggacctaattcaagtaaaaaccctttctccttcctggggcctcggctcctggagggctggagggtctcgtctgaggacgggaggaggctctcgctggacgtctggcctgtgcgctggtggacggatgcctacgcggttttggaggacccgatgaccaggcgtcctgcggagtccgcccgctggcctgcagcacccacctcggacttggctgtggacggttggtgcaagtgcatcctgcagggctggctgtgcgcagctgtgggctgacctttgcagagttttgtggaatagtttgcaatgtcataaaagtgcaataaaaggtacagcagatgtgtgtcggcctcacggggcgggtccctcacaaaaaaaa

SEQ ID NO: 5083 - DNA, 778 bp, Homo sapiens
  SIMILAR (392)..(643): 771254mologous to Homo sapiens Human secreted protein, SEQ ID NO: 6953,accession number AAG02872,Smith-Waterman Score=333.
cgacttttttttgtagtaacatccagtattttaatatttatgcttgataagtcatttaagttgaagactctttatgtattaatttcagcaagtaacataaccacacagaatagacaatgaaagcataattagtcattatacacaattataatttgataaaaaatttcaacatatacagaagtataaagaatgtgtatctatcatgcagcttctacaattatcattccaactcctcgtttctttgatattgccaacaatttacaccctgccccaattccaaatttggaaacaagtcccagatattaatataatttccctcttcaacatttcagtatgcctgagagattcttgtttaaaaaaaacatttttttgaggggcacagggtctctctctgtcacccaggctggagtgtaatggtgcgatcttggctcactgcaacctctgcctcccaggctcaagcaattctcctggttcagcctcctgagtagctgggactataggcatgcaccaccacgcccggctaatgtttgtatttttagtagagtcaggttttcaccatgttggccaggctggtctcgaactcctgacctcaagtgatccgcccgcctcagcttcccaaagtgctgggattaggggcataagccgccgcgccggcctggacttctgacctctaaacaatcacctggccctacccaacaccccacagacacaccatccatgtgcgcaaccatgtgagtctgaaattacagcattagaagttcactcctttgctttctct

SEQ ID NO: 5084 - DNA, 475 bp, Homo sapiens
  misc_feature (1)...(475): n = a,t,c or g
ctggtgtgtatcctaaatatggaaggaagaaaagctttgacctggaaatactacgcaaaaggttttgaagggaaaaaaagtggtttcacacctcttgttattccttagagtcacttcaaggcctgtttgaatgtggcaggttagaaagagagagaatgtctttcatttgaagagtgttggacttgtgtgaaaggagatgtgcgtgttggaatctgcttttccaagccgccagggtcctgacggcagcaggacgaagcctgttgtggcgtcttctgggaaagcctgaccgtgtgttcggacggcactggctcctttccgaagttctcagtaactgagcccagagtaactgcacgcctttgtgcagctctggagctccaccaactctcggncctgcagttctcaagcgagctaatcttgtcattaatcgatagaagctaacttccgagttaggacctagttactttgctctcaacat

SEQ ID NO: 5085 - DNA, 502 bp, Homo sapiens
  misc_feature (1)...(502): n = a,t,c or g
gggatgtccccncnncagcnccaaccactgatccccntcgactatgatcacgctcagcttggcacgaggtacatcagtgatgggttctttttgtagtgagacatacaaatctgatgttaatgtttgctcttagaagtcatactccatggtcttcaaagaccaaaaaatgaggttttgcttttgtaatcaggnnnnnnnnnnnttaatgaaccttnnnnnnnnnnnnnnnngggttttgagggaaaaaaaagggggttcccccccttttgtatttctttaaagactttcaaaggcctgtttaattggggcacgttnnnnnnnnnnnnnntgtttttattttaaaaagggttggccttgcggaaaagaaaaaggcctttttgaaatttgtttttccaaacccccggggtcttgttggaaggagaacaaaccctttgggggcctcttttggaaaagcctcaccggtttttaggacgagactggctcttttaaaaagaataaaaaa

SEQ ID NO: 5086 - DNA, 4315 bp, Homo sapiens
  SIMILAR (2)..(1546): 821254mologous to Homo sapiens F-box protein Fbx21,accession number AF174601,Smith-Waterman Score=2038.
  misc_feature (1)...(4315): n = a,t,c or g
gatggcggcggcagcagtcgacagcgcgatggaggtggtgccggcgctggcggaggaggccgcgccggaggtagcgggcctcagctgcctcgtcaacctgccgggtgaggtgctggagtacatcctgtgctgcggctcgctgacggccgccgacatcggccgtgtctccagcacctgccggcggctgcgcgagctgtgccagagcagcgggaaggtgtggaaggagcagttccgggtgaggtggccttcccttatgaaacactacagccccaccgactacgtcaattggttggaagagtataaagttcggcaaaaagctgggttagaagcgcggaagattgtagcctcgttctcaaagaggttcttttcagagcacgttccttgtaatggcttcagtgacattgagaaccttgaaggaccagagattttttttgaggatgaactggtgtgtatcctaaatatggaaggaagaaaagctttgacctggaaatactacgcaaaaaaaattctttactacctgcggcaacagaagatcttaaataatcttaaggcctttcttcagcagccagatgactatgagtcgtatcttgaaggtgctgtatatattgaccagtactgcaatcctctctccgacatcagcctcaaagacatccaggcccaaattgacagcatcgtggagcttgtttgcaaaacccttcggggcataaacaggcgccaccccagcttgaccttcatagcaggtgaatcatccatgataatggaaatagaactccagagccaggtgctggatgccatgaactatgtcctttacgaccaactgaagttcaaggggaatcgaatggattactataatgccctcaacttatatatgcatcaggttttgattcgcagaacaggaatcccaatcagcatgtctctgctctatttgacaattgctcggcagttgggagtcccactggagcctgtcaacttcccaagtcacttcttattaaggtggtgccaaggcgcagaaggggcgaccctgggacatctttgactacatctacatagatgcttttgggaaaggcaagcagctgacagggaaagaatgcgagtacttgatcggcgcagcacgtgactgcagcactgtatgggggtggtcaatgtcaagaaggtgttacagagaatggtgggaaacctgttaagcctggggaagcgggaaggcatcgaccagtcataccagctcctgagagactcgctggatctctatctggccaatgtacccggaccaggtgcagcttctcctcctccaagccagggtttactttccacctggggaatctggccagagaagtctttctgtcttgttttgaaggtgcttgacatcctccagcacatccaaaccctaggacccggggcagcacggggcgggtgggctacctgggtgcagcacactctagagcacattttaggcgcaaaaaggaggaggtgggcgtagaggtgaagcttgcgttccgatgagaaagcacagagatgtctgctactccattcgggcttcattatggaaggcataagaggtatgggcttattaactgtgttgattctacggctggggaccccacctggcatggatgggacacgagttggattcccggaacatgaacgttccacagcctgccgcacggccaccaccagcctttctataacgtgctggtggaggacggctcctgtcgatacgcagacccaagaaaactttggaatataacgctgagccctcaagaaatctcacacacctgacgtgggacgcgtatattctcagagatttactctgcactcactacatcccaaaccgcagagctggagatccggtatccagaagatctggagtttgtcctatgaaacggtgcaagaatatttacaagtgcaaaagaaaagagaacatagaatgagtaaagtctagagaggacattgcacctttgctgctgctgctatcttccaagagaacgggactccggaagaagacgtctccagcggagcccttcgggacctgctgcagccagggaaagccacttccaccagtagtgctggttgcctcctacttaagttttaaataccgtgtgctcttccccagctgcaaagacaatgttgctctccgcctacactagtgaattaatctgaaaggcactgtgtcagtggcatggcttgtatgcttgtcctgtggtgacagtttgtgacattctgtcttcatgaggtctcacaagtcgacgctcctgtaaatcattctttgtattcactccattcccctgtctgtctgcatttgcctcagaacatttcccttggctggacagatggggttatgcatttgcaataatttccttctgatttctctgtggaacgtgttcggtcccgagtgaggactgtgtgtctttttaccctgaagttagttgcatattcagaggtaaagttgtgtgctatcttggcagcatcttagaaatggagacattaacaagcttaagggtaattagaatcatttgaatttatttttttctaaatatgtgaaacaccaggatttcaagtgttttatctttttttttttaaatttaaatgggaatataacacagttttcccccttccccatattccctctcttgagtttatggcacatcctctataaatccattagttttcctattttattacataaaattccttttagaaaaggcaaatagcgaactttgtgaatggatttttcccatactcatcctacaattcctcccattttaaatgacctacttttattttttaatttaaaaaatctacttcagtatcatgagtaggtcttacatcagtgatgggttctttttgtagtgagacatacaaatctgatgttaatgtttgctcttagaagtcatactccatggtcttcaaagaccaaaaaaatgaggttttgcttttgtaatcaggaaaaaaaaaaaattaatgaaccttaaaaaaaaaaaaaaaaaggttttgaggggaaaaaaaagtggtttcacacctcttgttattccttaggagtcacttcaaggcctgtttgaatgtggcaggttagaaagagagagaatgtctttcatttgaagagtgttgggactttgtgttgaaagggagatgtgcgtgttgggaatctgcttttccaagccgccgggttcctggacgggcagcaggacggaagcctgttgtgggcgtcttctggggaaagcctgaccgtgtgtttcggacggcactgggctcctttacgaagttctcagtaactgagcccagagtaactgcacgccttttgtgcagctctggagctccaccaactctcggcctgccagttctcaagcgagctaatcttgtcattaatcgatagaagctaacttccgaagttaggacctagttactttgctctcaacatttaaaataatgcagttgctctagtgaatggggcgttaggggcctgtctctgcacctgtctgtccatctgcatgcagtattctcacccatgttgaatgcctgctgcttgtttaccctttggaaaccctggggtgaccaaggtttggaaagccacctgagaccacttcatagcaagggaaggctttaagcagttactagaaagagatggggatttggcccctggctcctccagcctgaatgagctatttaatccactgtccatgttcctcatcagtcaaatccaaagtcaaaggatttgaacctgcatctggaaacgtaaccactcacagcacctggcccgccaaggttgggaggattgtacactactttcatttaaatgtggaattttttgataatacggaattaattaatatgaatgagatgcattaataagaacctgagcatgctgagagttgcaattgttggttttctggtttgattgatttccctttttccttagacacatcaaagtcaagaaagatgggttttaccctttactgaccccagctgtacatatgtatcctagactgtttttaaatgtctttcttcatgaatgctgcatggggcncccaggaagcgtgtatcacctgtgtaagttggtatgttgggcactgtgtatttttcgaaaaacgtgtgttggatcgctgtactctaataaatcataaggttcctttttaaaaattttccaaaacttttctccattttaaaaagccctgttataaacgttgaactttcacaatgttaaaatgttaaatatttggatatagcaacttcttttctcttcaaactgaatgccaagatttttttgtacaatgattaataaatggaacttatccagagaaaccaaaaaaaaaaaaaaaaa

SEQ ID NO: 5087 - DNA, 1054 bp, Homo sapiens
  SIMILAR (15)..(182): 601254mologous to Homo sapiens Secreted protein encoded by gene 94 clone HPMBQ32,accession number AAW88627,Smith-Waterman Score=170.
tttttttttctcctgagacagagtctcactgtatcgcccaagctggagtgcagtggcagatgctaggctcactgcaatccccaccaccattctcatgcctcagcctccccagcagctacgattacaggcatgcgccactgcaccgggctaattttcttctattttttaagagatggggtttcagcgtgttggccagccaccgcacccggcctattattgattttttttggccgggcgccgtggcttatgcctgtaatcccagcaccccgggaggccgaggcaggcggatcacttgaggctagaagttcgagaccagcctccttatttcaggtttcttttttttccccctttttccacatgttctaacatgctttctaattaccatacttcttattttttccccccttcatttttgccttccattaattttccttttgcaggtgtggcagtttgctaagtcgcctcctgctagctattttcccctccttccttagtttgagaaccccagtttttagctggacatgatgcagtcctgctatacagtacatcccagccttcctgaaagccaggtattgtcatatgattagcccaatgagatacaaaggaggtttgatgtatgatatctgagaaatgtcctaaaaaggaaggggtaggtcaagctgggtttaatattgccatggagctgctaccgtcagcaatggattggactgcctaccgtcagaaattcttttcagaaagatgtaagcctccatcttgcttaactaccgctaatttgcagatttttcttaccctgccagcaagcctttcctaactgacgtagtatgtttcaaagttatacattcaattttccgtttctgttagttgttccattaacttattaggatctctatttttatttttccccataaattacataaacttacaattgttcacctttctcatcctcaagaatagtagttctggacattctcatctctctctgctctatactaattcctcacctatgttggaattacccagaatttatctctggaatattatagatactagttgc

SEQ ID NO: 5088 - DNA, 1146 bp, Homo sapiens
tttttttttttttggtagagacaagatctcactatgttgcccaggctggtctcaaattgctgggctcaagggatcctgccgtcttggcctcctgaagtgctgagactacaggcgtgacgaccggagccagacattatcttacattcaatgaaacagtaactttctggtgctgatgctacagttaacttaatttttgttacctttctgcgacttaaaatgtttctttcaaagtaccaatgtaaactcccttggaaaggctatcctaccagattaaccagatatctatgttacttacataactccccagactcaagcttgacttaagcaaacaaacctttagttttgtttagtctatctctttagaaacaggttaatgtctaattcaaagcaacagatcatggattaagaaactgattaaagcaaaatcaacaaataaaaccccaatacacttaaaactacaaattctgagaagaaaggaaccagctgttatcaagctatacagctatatagacgcaggttcaatataagaccctcctcccccaacccctccccgcggtttctccataggagcaattagtgtaatatataaaggagcaagacccatagcttccctgcaggtaagcaggttgcagtcatgtggaaagtgacatcacaggcaaaggtgctgcagcacttgcttgacgtgcaggtgtttcacttacttactgtctctgtggtatctactcttcaaatagtttgagaattggttggaaagtgatgctattcttgaatccttgttactaatcttctatcattttgacgcagacttcctttaaaggcattccattttcatttgccttcaaaagcattttcacacgcctcttggtagtaagattttcaccgagctttagaagaacagctccatcccaaggctggacggccgcatgccacagtggggcttcatcagtactgtgctggctgcaaatggtcgctgaagcagtacagcgctccacggctctgcggccagtcggcgtggctccaaaccctggccctgccatacactcgctttgtgacccaggttaattgctcccacgcctcggattctgcatctgagactgggaagaacagtatttccttccttcttcggtggtgtgaagattcactgac

SEQ ID NO: 5089 - DNA, 558 bp, Homo sapiens
tttttttttttttttttgagacagagactcacactgtcgcccgggctggagtacaatgttgccatctcgcttcactgcaacccctgcctgctgggttcaagccattctccatgccgcagcctcccatgtagcttcttaagatgtgaagatttttaaattaagatgactcttgggatgaaccatcttgtgttggttaaagactttaactggacacaattttaaaaaaacctttttaaacttttaatttccaggtcaaatggcacatgccgtaggtttgttaatgtaggtaaactagtgtcacagggatttgttgtgcagattatttcaccacccagctattaagcctagtacccattaattgtttttccctgatcttctggcttcctcccaccatccaccctcccagagggccccagtgtctgttgtttccctctatgtgttcatgtgttctcataatttagctcccatttgtaaatgagaacatgcagtatttggttttctgttcctgcattagtttgttaaggataaagacctccatccagctccatccatgttcct

SEQ ID NO: 5090 - DNA, 363 bp, Homo sapiens
  SIMILAR (117)..(338): 1001254mologous to Homo sapiens KIAA0513 protein,accession number AB011085,Smith-Waterman Score=397.
gacgagaacaaaccccaggagaagcggcccagggctgtgaccgcgtacagcccgaggacgaaaagaagggggagaagatctacctgtacacgcacctgaagcaacagcccatctgggagaagtggtgccacatgacccaggaggagcgcgacgacagcctccggttcaacgagaacatcaccttcgggcagctgggcacattcacgcacaacatgctggcctttggactgaacaagaagctgtgcaatgacttcctgaagaagcaggctgtgattggcaacctggatgaagagcaatacaagctgcttagtgaccacattgagcaaatggccactgagtaggccccagaggtcgcactccgca

SEQ ID NO: 5091 - DNA, 1050 bp, Homo sapiens; identical to SEQ ID NO: 4352
  SIMILAR (169)..(273): 771254mologous to Homo sapiens Human secreted protein, SEQ ID NO: 5327,accession number AAG01246,Smith-Waterman Score=134.

SEQ ID NO: 5092 - DNA, 963 bp, Homo sapiens; identical to SEQ ID NO: 4353
  SIMILAR (169)..(273): 771254mologous to Homo sapiens Human secreted protein, SEQ ID NO: 5327,accession number AAG01246,Smith-Waterman Score=134.

SEQ ID NO: 5093 - DNA, 4313 bp, Homo sapiens
  SIMILAR (99)..(2942): 891254mologous to Mus musculus Similar to ubiquitin specific protease 20,accession number BC005506,Smith-Waterman Score=4521.
cggaccccccgagggcagcgctgcggggccgttttccggccctcctgacgcgacactgcccctctccgagagctgagaaggaaaagaggagcttgcggaggtgcggctgcaggccgttgttggtcgagttggcgggtcccgcgggccaggccgtggaggtgttacctcattttgaaagtcttgggaaacaggaaaaaattcctaacaaaatgtcagcttttcgaaatcattgtccacatttggattcagttggtgaaataacaaaagaagatttgatacaaaaatcccttggtacttgtcaggattgtaaagtccaaggaccaaatctttgggcatgtctggagaatagatgttcatatgttggctgtggtgaatcacaagtagatcacagcaccatacattctcaggagacaaagcattatctaactgtgaaccttaccactcttcgagtatggtgttatgcttgcagcaaagaagtatttttggataggaaattaggaactcagccttcattgcctcatgtaagacaacctcaccaaatacaagaaaacagtgtccaggattttaaaatacccagtaatacaacattaaaaactcctctggttgccgtatttgatgatctggatatagaagcggatgaagaagatgaacttagggccagaggtcttacaggtttgaaaaatattggaaatacttgttacatgaatgcagctttgcaggctctttctaattgcccacctttgacacagttttttcttgattgtggaggactagctcgaacagataagaaacctgccatttgtaaaagttatctcaaactaatgacagagctgtggtataaaagcaggccaggatctgttgtgcctactactctgtttcaaggaattaaaactgtaaatccaacatttcgggggtattctcagcaggatgctcaagaattccttcgatgtttaatggatttgcttcatgaagaattgaaagagcaagtcatggaagtagaagaagatccgcaaaccataaccactgaggagacaatggaagaagacaagagccagtcggatgtagattttcagtcttgtgaatcttgtagcaacagtgatagagcagaaaatgaaaatggctctagatgcttttctgaagataataatgaaacaacaatgttaattcaggatgatgaaaacaattcagaaatgtcaaaggattggcaaaaagagaagatgtgcaataagattaataaagtaaattctgaaggcgaatttgataaagatagagactctatatctgaaacagtcgacttaaacaaccaggaaactgtcaaagtgcaaatacacagcagagcttcagaatatatcactgatgtccattcgaatgacctgtctacaccacagatccttccatcaaatgaaggtgttaatccacgtttatcggcaagccctcctaaatcaggcaatttgtggccaggattggcaccaccacacaaaaaagctcagtctgcatctccaaagagaaaaaaacagcacaagaaatacagaagtgttatttcagacatatttgatggaacaatcattagttcagtgcagtgtctgacttgtgacagggtgtctgtaaccctcgagacctttcaagatctgtccttgccaattcctggcaaggaagaccttgctaagctgcattcatcaagtcatccaacttctatagtcaaagcaggatcatgtggcgaagcatatgctccacaagggtggatagcttttttcatggaatatgtgaagaggtttgttgtctcatgtgtccctagctggttttggggtccagtagtaaccttgcaagattgtcttgctgccttctttgccagagatgaactaaaaggtgacaatatgtacagttgtgaaaaatgcaaaaagttgagaaatggagtgaagttttgtaaagtacaaaactttcctgagattttgtgcatccaccttaaaagattcagacatgaactaatgttttccaccaaaatcagtacccatgtttcatttccgctagaaggcttggatcttcagccatttcttgctaaggatagtccagctcaaattgtgacatatgatcttctgtcagtcatttgccatcatggaactgcaagtagtggacactatatagcctactgccgaaacaatctaaataatctctggtatgaatttgatgatcagagtgtcactgaagtttcagaatctactgtacaaaatgcagaagcttacgttcttttctataggaagagcagcgaagaggcacaaaaagagaggagaaggatatcaaatttattgaacataatggaaccaagcctccttcagttttatatttctcgacagtggcttaataaatttaagacctttgccgaacctggccctatttcaaataatgactttctttgtattcatggaggtgttcctccaagaaaagctggttatattgaagacctggttttgatgctgcctcagaacatttgggataacctatatagcaggtatggtggaggaccagctgtcaaccatctgtacatttgtcatacttgccaaattgaggcggagaaaattgaaaaaagaagaaaaactgaattggaaatttttattcggcttaacagagcgttccaaaaagaggactctccagctactttttattgcatcagtatgcagtggtttagagaatgggaaagttttgtgaagggtaaagatggagatcctccaggtcctattgacaatactaagattgcagtcactaaatgtggtaatgtgatgcttaggcaaggagcagattctggccagatttctgaagaaacatggaattttctgcagtctatttatggtggagggcctgaagttatcctgcgacctccggttgttcatgttgatccagatatacttcaagcagaagaaaaaattgaagtagaaactcggtctttgtaatttttaggatgtagagagttctaatgaggaatcattttcatgtgccctgacatgtacacatgcgaaaacattcctaaaagcgtgtttatttgctttattttttttcatcatttatcccatttatttcttcttagtgggcattatggaagaatatattaaaatgtgtaatataccacaggttggtatatttagttttaaatacttaccataaagtctttcagtgtaatttttttttgagacagagtcttgctttgtcacccaggctggagtgctgtggtgttacctcagctcactgcagcctccacctcctgggttcaagcgattctcctgcctcagcctctcgagtagctgggattacaggcacctgccaccatgcccggctaatttttgtattttagtagagatggggtttcaccatgttggccaggctagtctcaaactcctgacctcaggtgatccacccacctcggcctcccaaagtgctgggattacaggtgtgagccacagcgcctggcccagtgtaatatttttgaaagaggagggacaattgtgaaatcagtaggttatctttaatctttacactacatgcagatccatagtatcctttgtagtgttgtaaatacttttgctttgaaaactttttcattgtcctaaatcaccctgactctgaccagtctttcagttctccaaaagcccaatttaattgtatagttttgtcatggcttcatataataaagagcctattttaagttgaaagtagtagtcagaaaattgttaatttcctaaagctcaggaaactagggtgtcactttttttgcactgcagcatatacactaactagcttattaaaatttacaaaaatgtctttttgaatgtatcaaggatatatttaggtttgagtgggaatttgtcagcagatatcagtaacttattgccgcttatattgtaccaatggttaaaccttccaattcccgtaccccccggttagtattaatgtccagtgacctaaaaaaccttagagttagttttagggccaccttttaatttggagagccatgaaagtgtggaatgtgtccacctacgattgttgataaagctgaggcccactgccaacttgattttttaaatgaaatagataaagtcctttttgaataatatagtatgcactgcctatttgccttgattatgtaatgtcaaaagtttaactatattccaagtacaaaaacatactggattacattgaggatgttgaatagcattcatgatggctttgttttggtttggggcagctgtcaccagataaagcaatgttgctaaaattagctcaataaaaatagtataataaatgtaaaaaaaaaaaaaaaaagg

SEQ ID NO: 5094 - DNA, 685 bp, Homo sapiens
  SIMILAR (395)..(667): 541254mologous to Homo sapiens Human myelin oligodendrocyte glycoprotein gene,accession number AAZ29204,Smith-Waterman Score= 244.
gagatcaagtatcactcgttacccaggctggaatgtagaggcgagatctcagctcactgaaacctgtgcctccccggttcaagcgattctcctgccacagctacttgggaggctgaggcaggagaatggcgtgaaactgggaggcagagcttgcagtgagccgagatagcgccactgcactccagcctgggcaacagagcgagactccgtctcaaaaataaatataattaattaattatttaattaaaaaaataaaaaataaatgtggataatactagtacctccctcttaaggtcagggctggagctagggtgacatctccagggcagaattttaagaggacaccaaaaaagctcagcaaccaagataaaaaatattttaaagcaatattttgttttgggtttttttttttttttgagatcaagtatcactcgttacccaggctggaatgtagaggcgagatctcggctcactgaaacctgtgcctccccggttcaagcgattctcctgccacagcctcctgagtggctgggattacaggcatgcgccactatgcccagctaatttttctatttttggtggagacatgatttcaccatgttggccagggctggtctcgaactcctgactcaaatgatccccctgcctcggcctcccaaggtgctggggactacaggcgtgacac

SEQ ID NO: 5095 - DNA, 7078 bp, Homo sapiens
  SIMILAR (1104)..(1403): 621254mologous to Homo sapiens Human myelin oligodendrocyte glycoprotein gene,accession number AAZ29204,Smith-Waterman Score= 263.
ttttttttttttcttttttaaaagttttattttagttttaattgacacataataattgtataccaaatagcaatttttaaaaatagggagacccaagagttaaaaacacaaagtttttccactgttctttgtaaaatttctcatactgaggaaactgtttttataaagcaaccatgtatcgttgccattacagtgtactggcatacttattaggacaattgacagggaaaaacaacttttgggcacaaggaatgccaatttattccttttttgggacacataaacacaaaatatccctggcagggccaaaaaaaattggcaaaatttaaacgaccgatcatccttatctccaacatgaggggtacaacccctcccttaatagtttgggaaggtacctcgtattggctgggggccatacatccagtccaaatttaataaaatacattttaaaacattaccaggtctaataatatagaaacaaaaatcacaccattagtcaaatgaacaaatgcaaacattttcagccactaaacgtagaaaggagcatgaatatgtcaatagcaaggcataagaaaatggttaatcaataacaagatctttcctttaattttacaaggaaaacttcttggagttgcaacagtattgatacaatgccctcagcctccactttcttaaaatgaaagcagagctaccaccttgctattgagcaagaaaatatcacagcacattcacaaaaggtcgttaggacagggtggagagggtgagccttgttaaacagtggattatattttcccacttgaagggtaggcagctttgccaggtaggcaagctctgatagaggctggggcacccagaacccttaaaacaacagacccatatagaaacatgtctgcttgaaaaatccatcacctttggaaagcagcaaaatagaattttacagtaagaatgaaatatgttcctgctgccccagaaacgctggctgcattaaagccagctagttcactttataaaccattcaggattcaacagctaagaacaccaccaccaaaacataattggttcaacatttgggtcatcaccactctcttaatgtcccccccccctttttttttttgagacagagtttcgctcttgttgcccaggctggagtaatagctcactgcaccgtccacctcctgggttcaagcaattctcctgcctcagcctcccgagtagctgggattacaggcacctgccaccacgcccggctgatttttgtgtttttagtagagacagggtttcgccatgttggccaggctggtcttgaactcctgacctcaggtgagccacccgcctcggcctcccaaagtgttgggattacaggcgtgagccactgcccccagccccagcttgatcttgaacctcctgtgtgtgggcagagagacatggccctgctactgcttgaacggcttccggagacagtgacttgtttcctttttccctctgaactatgccgtagggccaggtgagctgctgtgaaggactcattcttggtagccggcagttactggcaacttgtgagcttggtgggctcctactaacgcacctgggacaccaggctgctgggctcccctctaggcagcctcccctccaggcagcctcaccagcagctcccctgagccatggagaccccagaggtccccgtgggctcgctaatcgactttgggcctgaggcacccacctcttctcccctggaggcaccaccccctgtgctgcaggacggcgatggctccctgggggacggtgcatcagagagtgagaccactgagtctgcggacagtgagaatgacatgggcgagtcgccctcgcacccgtcctgggaccaagaccgccgttcctcctccaacgagtccttctcctccaaccagagcaccgagtctacccaggatgaagagaccctggcactcagggacttcatgcgtggctacgtggagaagatcttctctggaggggaggacttggatcaggaggagaaagccaagtttggagagtactgcagcagtgaaaatggaaaaggccgggagtggtttgctcgatacgtgagtgcccagcgctgcaactccaagtgtgtctcagaggcaaccttctaccgcctggtgcagtcttttgcagtggtgctgttcgagtgtcatcagatggatgactttgggcctgccaagaacctcatgaccatgtgcttcacctactaccacatcggaaaaccacagctgctgcccccggagtcccgggagaagcccgcgggcagcatcgactcctacctgaaatccgcaaacagctggctggccgaaaagaaggacatcgccgagcggctgctgaagaacacctcggccaggactgagaatgtcaagggcttcttcggggggctggagaccaagctgaaggggcccctggccaggaggaacgaggaagacgagaacaaaccccaggagaagcggcccagggctgtgaccgcgtacagccccgaggacgaaaagaagggggagaagatctacctgtacacgcacctgaagcaacagcccatctggcacactctgaggttctggaatgcagccttttttgacgctgtccattgtgagaggacaaagcgatctcccactaccagaggggatgctggagaggaggaggagaagagggagaagtggtgccacatgacccaggaggagcgcgacgacagcctccggttcaacgagaacatcaccttcgggcagctgggcacattcacgcacaacatgctggcctttggactgaacaagaagctgtgcaatgacttcctgaagaagcaggctgtgattggcaacctggatgaagagcaatacaagctgcttagtgaccacattgagcaaatggccactgagtaggccccagaggtcgcactccgcaggaggactgaggccatgtgccattctcccgggcccagcgcccggccgtcaccccacccgatgacctgcatgaagccagcagcacccagagccactcctgctgccctagaactagcggttagaagaatccgctgttcctccctcatctcctctgcctgtgtctgcgacccccatccatgtgccaaagtgtcccttgggtcacacagctaaagccgaggtgaccagttgtaccccgagtgccaggcttgtgagatgagaccaagagggaggaggggaaggactccatgggccatcgtgggccaagggctggcgagggtgggggtgggcaagggatgcaggcaggacagccatgaggtggggctgcagccggcacacccagtggtggagggccggcgctgccactcacggtgggtggccgtgggccaccttccctgcaatgggtgcacacgcggctcccatccagccctctcagcgtggggctgtggctggtcctcactattccccagtctcccgctgtggggcaggaacaggaagtgacgggaaccttgaggaggaaacgcctgtgttagggagagagtgggtgcggtgtagaggatgctcttggccggctggagcaagacctggctcccaccagagggacgtgtgtgtgcctgcagacggcccgggagctgtgtgtctccgccagagtcacagcagtgccgaggtgtccgcggcagaccacacagaccgtctgaaatgcgcccgcctggcggacagctcccttctgaagcagagaagcctccatggtcacgaagcagcgttgtgctgtgtgtccctcgcaagaagcacaggaaagagaagtttctttagtagccactagacaaccaccctttctgaaagcaaacagtgctgctctttattccagacaaggcaggaaagtctgagttgggagtgacagtggctggagagaagcagatctgtgcaacgtgcagggcaagccagtggcgtggcctctgcctctaagcgctgagcattgggccccttccccaccagacctttgtagctcctccagcctctgcagagactcccttcacctcgcacttactgcctgggaaccacggcccttctcttctgtgggtctgcaccaggtactccaggccagcccatgggcccggggcctgaccccaacacctgcatgctgggtccagagccttctgtttcaccgtgcgtggacactgctaggccgcctggggtcccctgcctcctgcctgtcgctgccgtggtccctgactgcgaaataggcccgcggggctctccctcctcctgccatcctcccctcccgcccttcctggctacctcctctgacatgcggtcagataagtcccgtcttgtttgtgagtaccacagaaacgcctgagagttcacttacggggccactgcttggaaggtttccctccggggaatgcctccctggaaaatgttccagagacgaaacattctctagagacaccagtctgtgctgcagattggttggatcacagaatgtgtgtctggggcattatctgaaacgtggtgtcatctgatgcatttggaccatatgctgccagactgcagaacggggaagccggggctcagggcccctgactgcatggtgcatgagtgatctcagcctagcgatgccgctggccagaccgtgaccatgctgccagtgtgctcgccatgagctgggtcagggctggggagttgtgcaggctggggtgacccttcccccatcattgggccccaacgggcatgtctccaccgaatccatttagagaaatgtcagagcgagggttgtgtggacacccctcgctctgatgccaactgcagataatacacacctcctgcagcgtccagccacggctccagggcactgctctcctccttgcaccggtgaaactcaggccacactcaagggctgactgtccaggcgctcccttcagccgcctcgtcgtcagcgttcttagtcatgcattattcgtgttagctgaaatgcattcagactttgttctgcggtgcccacaggacttacccctgtatgtacaggatttttgtatgaaagttttgtttgattctgagactctcttgggaacgctggagagcttgtgcacagcctctggaaggaaaggcagcgctgacttcgttgggcttttttccaagcactttaacttcagaaatggtcttgacacttttttctccacatagactcttgaaatagccatttcaggggaggaaagggttggggttttctttgtttgtttgtttgtttccccctttactacctgttcttgtagatctagctcctcagagttggaggaaggctgacagagaaggtctcctctgtgctccatccacacaggatgccggagagacagccccttgtgctgtgagcagagcaggcagtggctctggaggctgcctgtggtctccttccagctgtggctgacagtggctctggccagggttgcttggagaaggctcagtgtgcctgggacagggcttaccacctgccaccaaggtttcctctcttcccccaggacctgggcagagcaggcatgagctgggctgtggtgcagagcaagcagacccagccacactgctcaaaggtccctgcgtggggaggtgtcacaccaggggcacacccagggccacctgggtgtaggagagctctggtggcccctccgtaaactcaggaagtgtcaggtgatttcctagggagaggttcccagtcccagcaggcagaatgcccaaaaccaggagcacgaaggcctgtcatccatggggccattgcaggcaccctgccgcccgaccttgagggctgtgccaatcctagtgaaccaaaatgcaaacaactcacacaagtgaaaagctccctgctttgaaaacaggacatgttgacaggcagcatggtatgtttttagcctttgttacagttttagcaacattgatgtctaagaggggccgtggtaatagattgcatctgccctgtgcatgcgcatgtttaaccacaggccagagaactcaattctgatgtcgtaagttctctgtaagtgaaatggggtagactgtatgattttcctattgccaaaagaaagaaagggggccaaacagctctgaaatttccaaaaaatggctagagggagagtccagtttctgagctctgtacccaaattaaaatcctgatgttcaggttaatccaagcaacacgcattgggtttaaaaccagcaccgaggcccagtgggggaatcacagacatcaccaagtctcgtcttctttccttcctgtgagttgaaaccaaacaggcctctcgctcactcctcccagcccagtaatgctgaggagttcagttgtgaggaaagaaggctggagctgtgagattcgcttttccctaggctgttccgcgtgggttaccttattcaccctgggagcacttggtattccagacccctggacatgaggaatgcaggttcacactgtaaagagtttgtggaaaggtttcagtcttaactggggttccttagctggaagccagggctggaagttacaggcctgaccttcctgggtcccactatctgttggcattttttttttttttttttagacggagtctcactcttttttgcccaggctggagtgaaagtggtgcgatcttggctcatcgcaacctccatctcctgggttcaagcaattctcctgcctcagcttcctgagtagttgggattacaggcatgcaccaccataccgtggctaatcttttttttttttttttttttttgtatttttagtagagacgggggtttcaccatgttgggccaggcttggtcttgaacgcccgacctcaggtgatccacccacctcgggcctcccaaagtgctagggaccacagccgtcagccaccacgcccagcctctttgcttatttatttatttatttatttatttttatttatttttttgagactgagtttcgctcttggcccccaggctagagtgcagtggcacaatctcagctcactgcaacctccgcctcctgggttcaagcaattctcctgcctcagcctcccgagtagctgggactacaggtggccgccaccacacccagccaattttgtatttttacttcgctaccttaggtagcgaag

SEQ ID NO: 5096 - DNA, 388 bp, Homo sapiens
gtttgctaccccgacagagactgtggggagtccctggtggcagcgagctacaggcagccagtaccccatcagtgtggctggttccatcctctcaagcctgcctgcacccagacactgtcgagtgtgtcttcagaaaaactcctaaaattccccaaaagcacagtggctccccgagagccacctccctcaccttcttacaggggcaggttcctcttccggttccaccctcctcagcacggagctcaggggccatccccacctcctcttggccgcaagcacagaccttcccacacaggctcagcagctctgcgggcctgtcccccacctggagctgcaggcctccactcctggggacagctgtgaccatggctctgcaaagcagccttgt

SEQ ID NO: 5097 - DNA, 596 bp, Homo sapiens
  SIMILAR (3)..(344): 981254mologous to Homo sapiens homeobox B4,accession number AF287967,Smith-Waterman Score=609.
  misc_feature (1)...(596): n = a,t,c or g
gcaaagagccggtcgtctacccctggatgcgcaaagttcacgtgagcacggtaacccccaattacgccggcggggagcccaagcgctttcggaccgcctacacgcgccagcaggtcttggagctggagaaggaatttcactacaaccgctacctgacacggcgccggagggtggagatcgcccacgcgctctgcctctccgagcgccagatcaagatctggttccagaaccggcgcatgaagtggaaaaaagaccacaagttgcccaacaccaagatccgctcgggtggtgcggcaggctcagccggagggccccctggccggcccaatggaggcccccgcgcgttntagtgcccccgcacgcgggagccacgaacctcggggtgggggtgggcagtgagtgcaggggatggggtggggggacaggagggggccctggggcctgggccccggaaaaatctatctgccctcccccacactttatatacgaataaacgcagaagagggggaggggaagctttatttatagaaatgacaatagagggccacggggaggccccccccagaagcaagattcaaatctcttgctttctttct

SEQ ID NO: 5098 - DNA, 1240 bp, Homo sapiens
  SIMILAR (720)..(821): 881254mologous to Homo sapiens homeobox B4,accession number AF287967,Smith-Waterman Score=160.
  misc_feature (1)...(1240): n = a,t,c or g
atgagttcttttttgatcaactcaaactatgtcgaccccaagttccctccatgcgaggaatattcacagagcgattacctacccagcgaccactcgcccgggtactacgccggcggccagaggcgagagagcagcttccagccggaggcgggcttcgggcggcgcgcggcgtgcaccgtgcagcgctacgcggcctgccgggaccctgggcccccgccgcctccgccaccacccccgccgcccccgccaccgcccggtctgtcccctcgggctcctgcgccgccacccgccggggccctcctcccggagcccggccagcgctgcgaggcggtcagcagcagccccccgccgcctccctgcgcccagaaccccctgcaccccagcccgtcccactccgcgtgcaaagagcccgtcgtctacccctggatgcgcaaagttcacgtgagcacggggagatacagtcttagtgaagttggaagttggggaggggtggaggaggtggaggaggagaaggaggaggagtnaaaccccaattacgccggcggggagcccaagcgctctcggaccgcctacacgcgccagcaggtcttggagctggagaaggaatttcactacaaccgctacctgacacggcgccggagggtggagatcgcccacgcgctctgcctctccgagcgccagatcaagatctggttccagaaccggcgcatgaagtggaaaaaaggaccacaaagttgcccaacaccaagatccactcgggtggtgcggcaggctcagccggagggccccctggccggcccaatggaggcccccgcgcgctatagtgcccccgcacgcgggagccacgaacctcggggtgggggtgggcagtcagtgcagagtatatgggtggggggacaggagggggccctggggcctgggccccggaaaaatctatttgccctcccccacactttatatacgaataaacgcagaagagggggaggggaagctttatttatagaaatgacaatagagggccacggggaggccccccccagaagcaagattcaaatctcttgctttctttcttaaaaaaaaagaaaaagaaaaagcaagaagaaggaagaaagaaaaagacagaaagagaaataggaggaggctgcagctcctcgttttcagctttggcgaagatggatccacgtttcatctttaatcacgccaggtccaggcccatctgtcttgtttcctcttgccgccg

SEQ ID NO: 5099 - DNA, 1164 bp, Homo sapiens
  SIMILAR (722)..(1162): 971254mologous to Homo sapiens acinusS,accession number AF124727,Smith-Waterman Score=731.
tttcgaggatctccttggggacaatctgcccttcataaaaaccttcctttatcaaagacacctttgagttctttttggtagcacttggctcaagagcctcatctccaagtgggtctggtgctgcccttttccacagtgtggtgggggtctgggcagtcttgacatgacagtctgctgtccaagcatctcaaagccattgtcagtgggcatcagtctggccattgaagaaaggagggttaccttgttgaagttgccatccaaagttggttttccttgtttcctcgagttagcaaggaaggacctgggaggactagatgacccagtttggggcacagtttgtttggcttggtgtcctctcgactcaaacggtgaaagagggggtatgaccaacatctttagggggctgagaggctactgaactcctcttccagcttatttctggttaagctaatacacaggtgtgatacggagtagatgacttttccctgctctgaatgtttagttttatttttttctctaacttgcattgattctgcttcgtttttgccgtttgccgcttctgttttggtctctgtctgtctctgtgtctctctctgtctctctctctcactctatctgtgtctttggaggctaagctaagactgcccccatctaacctccttcccccctctctgtggggtgtctctctttctctttttttttcccctttttcttcttcatacagagctcgctgcccaaatcattcaagaggaagatctccgttgtctctaccaagggggtgccagctggaaacagtgacacagaggggggccagcctggtcggaaacgacgctggggagccagcacagccaccacacagaagaaaccttccatcagtatcaccactgaatcactaaagagcctcatccccgacatcaaacccctggcggggcaggaggctgttgtggatcttcatgctgatgactctcgcatctctgaggatgagacagagcgtaatggcgatgatgggacccatgacaaggggctgaaaatatgccggacagtcactcaggtagtacctgcagagggccaggagaatgggcagagggaagaagaggaagaagagaaggaacctgaagcagaacctcctgtaccttcccaggtgtcagtagaggtggccttgcc

SEQ ID NO: 5100 - DNA, 4034 bp, Homo sapiens
  SIMILAR (1)..(2748): 981254mologous to Homo sapiens acinusL,accession number AF124726,Smith-Waterman Score=4521.
atgtggagacggaaacatccgaggacatccggaggaacccggggagttctgagtggtaatcgaggggtagagtatggcagtgggcggggtcatctcggtacgttcgaagggcgttggcggaaattaccgaagatgcccgaagccgtcgggacggacccgagtacctcacgcaagatggcggagctggaggaggtgactctggacgggaagcctcttcaggcgctgcgggtgaccgacctgaaggccgcactggagcagcgaggcctagccaagagcgggcagaagagtgccctggtcaagcggctcaaaggggctctaatgctagaaaatttacagaaacactcaacaccccatgctgcattccagccaaattcccagattggtgaggaaatgagccagaacagtttcataaaacagtatctggaaaagcagcaggagctacttaggcagcgtctggaacgtgaagctcgagaagctgcagaacttgaagaagcttcagctgagtcggaggacgagatgatccatcctgagggagtggcttccctgctgcctcctgactttcagagcagcctggagagaccagagctggagctcagcagacattcgcccagaaaaagctcctcaatttctgaagagaaaggtgactctgatgatgagaaaccaaggaaaggagaaagacgatcatctagggtcagacaggcaagagcagctaaactgtctgagggcagccaacctgctgaggaggaagaggatcaagaaacaccttccagaaacctaagggtcagagcagatcgaaatttgaaaacagaggaggaagaagaggaggaggaggaggaggaagaagatgatgaagaagaggaaggtgatgatgagggacaaaaatctagggaggcaccaatcctgaaagagtttaaggaagaaggggaagagatacctagagtaaaaccagaggagatgatggatgagagacccaaaacaagatcccaggaacaggaggtgttagagagaggagggagatttacaagatcccaggaagaggctagaaaaagtcatctggccagacagcagcaggagaaggaaatgaaaacaacatctccccttgaggaggaagaaagagaaataaaatcttcacaaggcttaaaggaaaaatcgaagtctccttcccctcctcgactgactgaagatcgaaagaaggcctcacttgtagcgctgccagagcaaactgccagcgaggaggagactcctccacctttactaacaaaggaagcatcttctccaccacctcatccacagctccatagcgaagaagaaatagagcccatggaaggcccagccccccctgtcctcattcagttatctcctcctaatacagatgctgacaccagggagctattagtatctcagcatactgtccagttggtaggaggcctgtctcctttgtcaagtccttcagacaccaaagcagaatctccagcagagaaagtgccagaggagagtgtcctgcctctggttcagaaaagcacactggctgactactcagcccagaaggatcttgaacctgagtcagacagatctgctcagcccctccctctaaaaattgaggaattagcactggccaaaggaatcactgaagaatgtctgaaacagccatctttggaacagaaggaaggcagaagagcttctcatacccttctcccaagccacagattgaaacagtcagctgattcatcctctagccggtcctcctcatcttcctcctccagttctagatcaagatctcgctctcctgacagttcaggttctcggtctcattcaccgctcagatccaagcagagagatgtagcccaggcacgtactcatgccaaccctcgtggtagacccaagatgggctccagatcaacatcagagtccagatcaaggtcacgttcacgttctcgttcagcatcaagcaacagcagaaaatctctgagccctggagtctccagggacagcagcaccagctatactgaaaccaaagatccctcttctggtcaggaggttgcaactccaccagtgccacaactgcaggtctgtgagccaaaggagaggacttccacctcctcatcctctgtccaagcaaggcgtctgagtcagcctgaatcagctgaaaagcatgtgacccagaggttacagcctgagcgggggagcccaaagaagtgtgaagctgaagaggcagagccaccagctgccacacagccccaaacctcagagactcagacctctcatctgccagaatcagaaagaattcatcacactgttgaggagaaggaggaagtgaccatggacacaagtgaaaacagacctgaaaatgatgttccagaacctcccatgcctattgcagaccaagtcagcaatgatgaccgcccggagggcagtgttgaagatgaggagaagaaagagagctcgctgcccaaatcattcaagaggaagatctccgttgtctcagctaccaagggggtgccagctggaaacagtgacacagaggggggccagcctggtcggaaacgacgctggggagccagcacagccaccacacagaagaaaccttccatcagtatcaccactgaatcactaaagagcctcatccccgacatcaaacccctggcggggcaggaggctgttgtggatcttcatgctagatgactctcgcatctctggaggatggagacagagcgttaatggcgatagatggggacccatgacaaaggggcttgaaaatatgccggacagtcactcaggtagtacctgcagagggccaggagaatgggcagagggaagaagaggaagaagagaaggaacctgaagcagaacctcctgtacctccccaggtgtcagtagaggtggccttgcccccacctgcagagcatgaagtaaagaaagtgactttaggagataccttaactcgacgttccattagccagcagaagtccggagtttccattaccattgatgacccagtccgaactgcccaggtgccctccccaccccggggcaagattagcaacattgtccatatctccaatttggtccgtcctttcactttaggccagctaaaggagttgttggggcgcacaggaaccttggtggaagaggccttctggattgacaagatcaaatctcattgctttgtaacgtactcaacagtagaggaagctgttgccacccgcacagctctgcacggggtcaaatggccccagtccaatcccaaattcctttgtgctgactatgccgagcaagatgagctggattatcaccgaggcctcttggtggaccgtccctctgaaactaagacagaggagcagggaataccacggcccctgcaccccccacccccacccccggtccagccaccacagcacccccgggcagagcagcgggagcaggaacgggcagtgcgggaacagtgggcagaacgggaacgggaaatggagcggcgggagcggactcgatcagagcgtgaatgggatcgggacaaagttcgagaagggccccgttcccgatcaaggtcccgtgaccgccgccgcaaggaacgtgcgaagtctaaagaaaagaagagtgagaagaaagagaaagcccaggaggaaccacctgccaagctgctggatgaccttttccgaaagaccaaggcagctccctgcatctattggctcccactgactgacagccagatcgttcagaaagaggcagagcgggccgaacgggccaaggagcgggagaagcggcgaaaggagcaagaagaagaagagcaaaaggagcgggagaaggaagccgagcgggaacggaaccgacagctggagcgagagaaacgtcgggagcacagtcgggagagggacagggagagagagagagaaagggagcgggacaggggggaccgagatcgggatagggaaagggaccgagaacgaggcagggaaagggatcgcagggacaccaagcgccacagcagaagccggagtcggagcacacctgtgcgggaccggggtgggcgccgctag

SEQ ID NO: 5101 - DNA, 5982 bp, Homo sapiens
  SIMILAR (3)..(1841): 681254mologous to Mus musculus acinusL protein,accession number AF168782,Smith-Waterman Score=1976.
gaaaaagctcctcaatttctgaagagaaaggtgactctgatgatgagaaaccaaggaaaggagaaagacgatcatctagggtcagacaggcaagagcagctaaactgtctgagggcagccaacctgctgaggaggaagaggatcaagaaacaccttccagaaacctaagggtcagagcagatcgaaatttgaaaacagaggaggaagaagaggaggaggaggaggaggaagaagatgatgaagaagaggaaggtgatgatgagggacaaaaatctagggaggcaccaatcctgaaagagtttaaggaagaaggggaagagatacctagagtaaaaccagaggagatgatggatgagagacccaaaacaagatcccaggaacaggaggtgttagagagaggagggagatttacaagatcccaggaagaggctagaaaaagtcatctggccagacagcagcaggagaaggaaatgaaaacaacatctccccttgaggaggaagaaagagaaataaaatcttcacaaggcttaaaggaaaaatcgaagtctccttcccctcctcgactgactgaagatcgaaagaaggcctcacttgtagcgctgccagagcaaactgccagcgaggaggagactcctccacctttactaacaaaggaagcatcttctccaccacctcatccacagctccatagcgaagaagaaatagagcccatggaaggcccagcccccgctgtcctcattcagttatctcctcctaatacagatgctgacaccagggagctattagtatctcagcatactgtccagttggtaggaggcctgtctcctttgtcaagtccttcagacaccaaagcagaatctccagcagagaaagtgccagaggagagtgtcctgcctctggttcagaaaagcacactggctgactactcagcccagaaggatcttgaacctgagtcagacagatctgctcagcccctccctctaaaaattgaggaattagcactggccaaaggaatcactgaagaatgtctgaaacagccatctttggaacagaaggaaggcagaagagcttctcatacccttctcccaagccacagattgaaacagtcagctgattcatcctctagccggtcctcctcatcttcctcctccagttctagatcaagatctcgctctcctgacagttcaggttctcggtctcattcaccgctcagatccaagcagagagatgtagcccaggcacgtactcatgccaaccctcgtggtagacccaagatgggctccagatcaacatcagagtccagatcaaggtcacgttcacgttctcgttcagcatcaagcaacagcagaaaatctctgagccctggagtctccagggacagcagcaccagctatactgaaaccaaagatccctcttctggtcaggaggttgcaactccaccagtgccacaactgcaggtctgtgagccaaaggagaggacttccacctcctcatcctctgtccaagcaaggcgtctgagtcagcctgaatcagctgaaaagcatgtgacccagaggttacagcctgagcgggggagcccaaagaagtgtgaagctgaagaggcagagccaccagctgccacacagccccaaacctcagagactcagacctctcatctgccagaatcagaaagaattcatcacactgtctcccaccccccgcccagcacccccaacccccaaccattttctccatgctggtgtctccagatcctgaggatcagcaggcctttacttattaagcagttgattaaacacagtgaggagaaggaggaagtgaccatggacacaagtgaaaacagacctgaaaatgatgttccagaacctcccatgcctattgcagaccaagtcagcaatgatgaccgcccggagggcagtgttgaagatgaggagaagaaagagctggagtccctgaggagatgccagccacaactctccgaagagaagtattctgaccttgctgctgaatgtctgccaggtcctggggtattcacctacccccaggctaccttcatcagaggctccatgatcccactcgcagctaccaagggggtgccagctggaaacagtgacacagaggggggccagcctggtcggaaaccgacgctgggggacccagcacagcccaccacacagaagaaaccttccatcagtatcaccactgaatcactaaagagcctcatccccgacatcaaacccctggcggggcaggaggctgttgtggatcttcatgctgatgactctcgcatctctgaggatgagacagagcgtaatggcgatgatgggacccatgacaaggggctgaaaatatgccggacagtcactcaggtagtacctgcagagggccaggagaatgggcagagggaagaagaggaagaagagaaggaacctgaagcagaacctcctgtacctccccaggtgtcagtagaggtggccttgcccccacctgcagagcatgaagtaaaagaaagtgactttaggagataccttgaacttcgacgttccattagccagcagaagtccggagtttccattaccattgatgacccagtccgaactgcccaggtgcccttcccaccccggggcaagatttagcaacattgtccatatctccaatttggtccgtcctttcactttaggccagctaaaggagttgttggggcgcacaggaaccttggtggaagaggccttctggattgacaagatcaaatctcattgctttgtaacgtactcaacagtagaggaagctgttgccacccgcacagctctgcacggggtcaaatggccccagtccaatcccaaattcctttgtgctgactatgccgagcaagatgagctggattatcaccgaggcctcttggtggaccgtccctctgaaactaagacagaggagcagggaataccacggcccctgcaccccccacccccacccccggtccagccaccacagcacccccgggcagagcagcgggagcaggaacgggcagtgcgggaacagtgggcagaacgggaacgggaaatggagcggcgggagcggactcgatcagagcgtgaatgggatcgggacaaagttcgagaagggccccgttcccgatcaaggtcccgtgaccgccgccgcaaggaacgtgcgaagtctaaagaaaagaagagtgagaagaaagagaaagcccaggaggaaccacctgccaagctgctggatgaccttttccgaaagaccaaggcagctccctgcatctattggctcccactgactgacagccagatcgttcagaaagaggcagagcgggccgaacgggccaaggagcgggagaagcggcgaaaggagcaagaagaagaagagcaaaaggagcgggagaaggaagccgagcgggaacggaaccgacagctggagcgagagaaacgtcgggagcacagtcgggagagggacagggagagagagagagaaagggagcgggacaggggggaccgagatcgggatagggaaagggaccgagaacgaggcagggaaagggatcgcagggacaccaagcgccacagcagaagccggagtcggagcacacctgtgcgggaccgggacctgcagcggagcgcggcgcccgctccaatcggctcggggctgtgccccgggacccggcgacaagctcgactgtggcgcttcccccggcctgggcccctcgcagttccagggtcccgggaacacccagggcctgctctgctgcggactcgaaggagctgggtctggaaccagttctttgtcattgaggaatatgctggtccagagcctgttctcattggcaagctgcactcggatgttgaccggggagagggccgcaccaagtacctgttgaccggggagggggcaggcaccgtatttgtgattgatgaggccacaggcaatattcatgttaccaagagccttgaccgggaggaaaaggcgcaatatgtgctactggcccaagccgtggaccgagcctccaaccggcccctggagcccccatcagagttcatcatcaaagtgcaagacatcaacgacaatccacccatttttccccttgggccctaccatgccaccgtgcccgagatgtccaatgtcgggacatcagtgatccaggtgactgctcacgatgctgatgaccccagctatgggaacagtgccaagctggtgtacactgttctggatggactgcctttcttctctgtggacccccagactggagtggtgcgtacagccatccccaacatggaccgggagacacaggaggagttcttggtggtgatccaggccaaggacatgggcggccacatgggggggctgtcaggcagcactacggtgactgtcacgctcagcgatgtcaacgacaacccccccaagttcccacagagcctataccagttctccgtggtggagacagctggacctggcacactggtgggccggctccgggcccaggacccagacctgggggacaacgccctgatggcatacagcatcctggatggggaggggtctgaggccttcagcatcagcacagacttgcagggtcgagacgggctcctcactgtccgcaagcccctagactttgagagccagcgctcctactccttccgtgtcgaggccaccaacacgctcattgacccagcctatctgcggcgagggcccttcaaggatgtggcctctgtgcgtgtggcagtgcaagatgccccagagccacctgccttcacccaggctgcctaccacctgacagtgcctgagaacaaggccccggggaccctggtaggccagatctccgcggctgacctggactcccctgccagcccaatcagatactccatcctcccccactcagatccggagcgttgcttctctatccagcccgaggaaggcaccatccatacagcagcacccctggatcgcgaggctcgcgcctggcacaacctcactgtgctggctacagagctcgacagttctgcacaggcctcgcgcgtgcaagtggccatccagaccctggatgagaatgacaatgctccccagctggctgagccctacgatacttttgtgtgtgactctgcagctcctggccagctgattcaggtcatccgggccctggacagagatgaagttggcaacagtagccatgtctcctttcaaggtcctctgggccctgatgccaactttactgtccaggacaaccgagatggctccgccagcctgctgctgccctcccgccctgctccaccccgccatgccccctacttggttcccatagaactgtgggactgggggcagccggcgctgagcagcactgccacagtgactgttagtgtgtgccgctgccagcctgacggctctgtggcatcctgctggcctgaggctcacctctcagctgctgggctcagcaccggcgccctgcttgccatcatcacctgtgtgggtgccctgcttgccctggtggtgctcttcgtggccctgcggcggcagaagcaagaagcactgatggtactggaggaggaggacgtccgagagaacatcatcacctacgacgacgagggcggcggcgaggaggacaccgaggccttcgacatcacggccttgcagaacccggacggggcggcccccccggcgcccggccctcccgcgcgccgagacgtgttgccccgggcccgggtgtcgcgccagcccagaccccccggccccgccgacgtggcgcagctcctggcgctgcggctccgcgaggcggacgaggaccccggcgtacccccgtacgactcggtgcaggtgtacggctacgagggccgcggctcctcttgcggctccctcagctccctgggctccggcagcgaagccggcggcgcccccggccccgcggagccgctggacgactggggtccgctcttccgcaccctggccgagctgtatggggccaaggagcccccggccccctga

SEQ ID NO: 5102 - DNA, 942 bp, Homo sapiens
  SIMILAR (119)..(18): 381254mologous to Macaca fascicularis hypothetical protein,accession number AB055280,Smith-Waterman Score=66.
  misc_feature (1)...(942): n = a,t,c or g
atagctcanctgtaacttctcccatactctaccaatcctcctgcctcagcatccagactggctgtgattgcaggtgtgcaccaccacacccagctacattttttttttggtagagacagggtctcactgtgttacccagtctggtctcaaactcccggcctcaagcaatcctcccactggcctcacaatgttgggattacaggtataagccactgcacacggccttactatgctatcaattccatatatggaaaggtgttttccctttcagagctctttaaagctctgcagaagatttacatttgtttataggagctaaggagaaatcaggggcatgggaaattgagtgtgtaataaaaattaaactcttcatgttatataatcatgcataacttctatcttcattctctgaagttgcctagagcaccatcacagctaggaagcttccatcatgaattaccttatttccaaaagcaagtactcaaataattgtctcaagagaggaaggacaaaaactgttacaagctgaaatatttggggatttgtttgacttgactagggaaccccacaagttttccataataaatgccctgatttaagcccctgtgccctaacagtttaaaaccttaaatgcctaatgttaattgccttccccagttggttgacccttataagaaaacactgtgtggtattttaatgtggtaaacatgtgaatgaatgcctgtggctcagttaatcactccccacaactttgagctgtgatgttttactggtggaaggaactttaacaggtcttcgctcttgtcattagatatcaaaagaactgaaattagttggaattgtaagcagtgaatagatgtgttgttagaatgattccatcacgttatacattgtttaaaatgctaataaagtaacttgctttgtaagaaaaaaaaaaaaaaa

SEQ ID NO: 5103 - DNA, 1477 bp, Homo sapiens
  SIMILAR (1)..(423): 1001254mologous to Homo sapiens retinal short-chain dehydrogenase/reductase retSDR2,accession number AF126780,Smith- Waterman Score=710.
atgaaatttcttctggacatcctcctgcttctcccgttactgatcgtctgctccctagagtccttcgtgaagctttttattcctaagaggagaaaatcagtcaccggcgaaatcgtgctgattacaggagctgggcatggaattgggagactgactgcctatgaatttgctaaacttaaaagcaagctggttctctgggatataaataagcatggactggaggaaacagctgccaaatgcaagggactgggtgccaaggttcatacctttgtggtagactgcagcaaccgagaagatatttacagctctgcaaagaaggtgaaggcagaaattggagatgttagtattttagtaaataatgctggtgtagtctatacatcagatttgtttgctacacaagatcctcagattgaaaagactttttgaagttaatgtacttgcacatttctgggactacaaaggcatttcttcctgcaatgacgaagaataaccatggccatattgtcactgtggcttcggcagctggacatgtctcggtccccttcttactggcttactgttcaagcaagtttgctgctgttggatttcataaaactttgacagatgaactggctgccttacaaataactggagtcatatcttttatgtctgtgtcctaatttcgtaaacactggcttcatcaaaaatccaagtacaagtttgggacccacttcctcatgttccagagtgggtcccaaacttgtacctgaggaagtggtaaacaggctgatgcatgggattctgactgagcagaagatgatttttattccatcttctatagcttttttaacaacattggaaaggatccttcctgagcgtttcctggcagttttaaaacgaaaaatcagtgttaagatttgaagcagttattggatataaaatgaaaccgcattaagcacctagttttctgaaaactgatttaccacgtttaggttgacgtcatctaatactgccacaagtttaatgtgtgaacttctggtattttctaaatatcccccatttttttattatcatttttgaggctttggcagtcttcatttactaccacttgttctttagccaaaagctgattacatatgatataaacagagaaatacctttagaggtgactttaaggaaaatgaagaaaaagaaccaaaatgactttattaaaataatttccaagattatttgtggctcacctgaaggctttgcaaaatttgtaccataaccggttatttaacatatatttttatttttgattgcacttaaattttgtataatttgtgtttctttttctgttctacataaaatcagaaacttcaagctctctaaataaaatgaaggactatatctagtggtatttcacaatgaatatcatgaactctcaatgggtaggtttcatcctacccattgccactctggttcctgagagatacctcacatttcaatgccaaac

SEQ ID NO: 5104 - DNA, 1837 bp, Homo sapiens
  SIMILAR (866)..(1201): 941254mologous to Homo sapiens zinc finger protein,accession number X78926,Smith-Waterman Score=597.
  misc_feature (1)...(1837): n = a,t,c or g
attcatacaggagagaacccctatgaatgccatgaatgtgggaaagccttcagtcggaaataccagcttatttcacaccagagaactcatgcaggagagaagccttatgaatgcaccgactgtggaaaggcttttggtttaaagtcacagcttattatacaccagagaactcatacaggggagaaaccatttgaatgtagtgagtgtcagaaagcctttaatacaaagtcaaacctgattgtacatcagagaactcatacaggagagaaaccctatagttgtaatgaatgtggaaaagcctttacgttcaaatcacagctcattgtacataaaggagtgcacactggagtaaaaccctatggatgcagtcaatgtgcaaaaacctttagtttgaagtcccagctcattgtacatcagagaagtcacacaggagtaaaaccatatggatgcagtgagtgtgggaaagccttcaggagcaagtcataccttattatacatatgagaactcatacaggagagaaaccacatgagtgcagggaatgcgggaaatcctttagtttcaattcacaactcattgtgcatcagagaattcacacaggagaaaatccctatgaatgcagtgaatgtgggaaagcctttaataggaaagaccagctcatttcacatcagcgaactcatgcaggggaaaagccttatgggtgcagtgaatgtgggaaagcttttagcagcaagtcatacctaattatacacatgagaactcattcaggtgaaaaaccatatgaatgtaatgaatgtgggaaagccttcatttggaaatcactactcattgtacatgagcgaactcatgcaggggtcaacccttattaaatgcagtcaatgtgagaaatccttcagtggggaaattacgccttctttgttacaccagagaatgcacacaacagagaaaccatatgaatgcagtgagtgtggaaaagccttcattaggaattctcaactcattgtacatcaaagaactcattcaggagagaaaccctatgggtgcaatgaatgtgggaaaaccttctctcaaaaatcaattctcagtgcacatcagagaacacatacaggagagaagccttgtaagtgcactgaatgtgggaaagccttttgttggaagtcacagctcattatgcatcagagaactcatgtagatgacaaacattgataattttacgaaactctgaaaagtggattcacaagagatagaaacaatcatatataaagagaaactctgtaagtggaatcatcttgtcatcttccagaaaactcatactgaatagaaactttatgaatgcacagcatatggaaaggcatccacagaaagctgttctttacatgcaaaaagatagtagacaataccacggggaaaacctgaatttaggtancccactctgaaaatttttagccaggcaagtcataccctttttttaaaaagttccataccaggtgaggaaccatgttaaacgttgtaaagtcattttacctaacataagattcacaaagaggaaacttcatgaaccagatgaatatagaatagacttctttgaaattcatagtttacagaattttaatgagagaaattattgagctaatgaatggcagaattaacaaaattacaaacattttatgtatcggaagcatataccttggagggaccatgctatgagggaaagtgtaaatctagaaatgagaaacccctagggaaaaaatatatataggagtgaacatcttatgaatgtaccaaataaaccacagctggactgttaacctcaccttagaagcttcattctaaaaaaaa

SEQ ID NO: 5105 - DNA, 643 bp, Homo sapiens
  SIMILAR (225)..(314): 1001254mologous to Homo sapiens Human secreted protein, SEQ ID NO: 5416,accession number AAG01335,Smith-Waterman Score=172.
ccggaattcccgggtcgagcttctgtggtctctgcggagatgttcccgggaagcctgtctagagggcggatggcagctgttgagatggcgtggctccccggctcctgcgcccgcgtggctttcgcggcgggcgctgcggcccggtattggacagcctggcagggcagcgcggggccgaatccggctgccgtggctgaggctcatggatcactcttttgtggtagggccacatctgccagagcctggagtctgcgaaggccgggacccggttccccggcccacagtgggggtgtgcaaacccgagagaactgggtaagttggggtcggcttgcagtttggggtaccccgagggcggtgtacgtcggtaagattgtaacagtattactggaagacttattcgactggcctgatgatacttgtaataggaagtgccgtcagaagcgataactgacgacgtctaatgtctatctgaccgcagtcgctgaaacctctacaacttagttgaccgtaactgccagagccctgccctgaattcctgtccttactccctctttaagattgcgtacccactgcagagtgctgaagacggggtagccacgaggtgagaggctctctggtgtagggtttaacatggaacgtattt

SEQ ID NO: 5106 - DNA, 1387 bp, Homo sapiens
ggcacgagggcataacacaattaaggtgttcccaaaactggaaatccaaagcatccgagtgatgctctgaatcatgcgccgtgtggaaggaatgtgctggcaggcgcaaatcgccggctgagtgttccactgaaattaaactcaagtgctgacttctcgttttttacctccccaccccttccctcaagggtggtctccgccagctggacatgtccttgctctgccaactgtacagcctctacgagtcgattcaggagtacaagggggcatgccaggcagcctccagcccaaactggacttacgctctggagaacgggttcttcgatgaagaggaggaatattttccggagcaaaactccctgcacgacaggagggaccgaggccctcctcgggacttgtcactgcctgtctcctccctctccagcagcgactggattctggagtccatctagagggtcttgggagggatgtgactgttgggaagcccttcctactggacacgctgtcatcatttgctgcttctcttgcaagaaagcacctccgttgtggacggtcctcgggcacaggggatgagcgctaccagtttcatttgtaggcagggagttctccgcggatgcatggtggcagtctgctttgatggcagcagtttctgcttaggtgacctagaggtcctcagcagtatcctccacacctatttattgaggtgcacctgctggggattcataatgagaatataacaagaggatctcggtgaaaggccttagtgggtgttttgtgtgaggtggcttgtagctagctacttccttacaagaatggtagaagtattccaatcctgctttgtgttaggggttcttgccttccagtttggggatgtattaaaaccacccttttcactgcttcccttcctccaatatgctctgcagcttttcttgctgtttaaacctcgtcgcctcagctttatttatttgtaagctggcattactaactggcccagtgattcggtgaaagctttttactgaaaaagttaacatttctaagtcatcccaatcaactgggcttttttcaaccaaaattttatatcattcctttgtctatcagatacgagaggaaggaagataatacgaagacatgttgaatagtgaaaaaaaaaaaaaaagaacacaaaaactggggcaagccaatgtgatgtatcactcactgtaagatggcaaatgttttcatttttaagattccgaatgtaaactagtgtgctagaaagcaaaccacccgccactcaaaccagtaattaccttaagccttaatatatttattaaaatactttatgagaacattacactttgtaggttaaaaatgaggataaaatgctaaactatcaaacctcgtgccg

SEQ ID NO: 5107 - DNA, 459 bp, Homo sapiens
  SIMILAR (3)..(458): 861254mologous to Homo sapiens immunoglobulin lambda- chain,accession number M87790,Smith-Waterman Score=697.
  misc_feature (1)...(459): n = a,t,c or g
gacagtcagtcaccatctcctgcactggaaccagcagttatgtctcctggtaccaacaccacccaggcaaagcccccaaactcatgatttttgatgtcagtaagcggccctcaggggtccctgatcgcttctctgcctccgagtctggcaacacggcctccctgaccatctctgggctccaggctgacgatgaggctgattattattgttgctcgtatgtaggcaactacattcgggttttcggcggagggaccaagctgaccgtcctaggtcagcccaaggctgccccctcggtcactctgttcccgccctcctctgaggagcttcaagccaacaaggccacactggtgtgtctcataagtgacttctacccgggagccgtgacagtggcctggaaggcagatagcagccccgtcaaggcgggagtggagaccaccacaccctccaaacanagcaaca

SEQ ID NO: 5108 - DNA, 414 bp, Homo sapiens
  SIMILAR (412)..(2): 861254mologous to Homo sapiens immunoglobulin lambda light chain,accession number X57817,Smith-Waterman Score=621.
tctccactcccgccttgacggggctgctatctgccttccaggccactgtcacggctcccgggtagaagtcacttatgagacacaccagtgtggccttgttggcttgaagctcctcagaggagggcgggaacagagtgaccgagggggcagccttgggctgacctaggacggtcagcttggtccccccgccgaacaacggaccacgcaggccgtcatcccatgttgcgcagtaataatgagcctcatcctcagactggagcccacggatggtcagggaggctgaggtgccagacttggagccggagaatcggtcactgccccctgagggcctctgaccattgctatggatgatgagtttgggggccgttccgggaaactgctgataccagtctacaggactactcccgacgttgg

SEQ ID NO: 5109 - DNA, 659 bp, Homo sapiens
  SIMILAR (128)..(3): 831254mologous to Homo sapiens immunoglobulin lambda light chain,accession number X57810,Smith-Waterman Score=171.
  misc_feature (1)...(659): n = a,t,c or g
tcaggcgtcaggctcagatagctgctggccgcgtacttgttgttgctttgtttggagggtgtggtggtctccactcccgccttgacggggctgctatctgcttccaggccactgtcacggctcccgggtagaagtcacttatgagacacaccagtgtggccttgttggcttgaagctcctcagaggagggcgggaacagagtgaccgagggggcagccttgggctgacctaggacggtcaacttggtccctccgccgaagaccacagaggtaccactgctgtctgcagattgacagtgatagtcaccctcgtcttctgcctggactccactgatggtcaatgtggctgttgtccctgagctgtaggctgagaatcggtcagggatcccggagggcctctcagtgtctttatatatcaccaatacaggggcctgccctggcttctggtggtaccaataagtatattgctttggcaaaacatctgcagagcaggtgatcctggccgtctgtcctggggacactgacaccaagggtggttgtgtcagctcataggaggcctcagaacctgtgcagagactccccgagggggagaagtagagggatccaagaaatggtgagacacccagaccggacgcgtgggtcgccgnnnctgcgataata

SEQ ID NO: 5110 - DNA, 679 bp, Homo sapiens
  SIMILAR (46)..(2): 801254mologous to Homo sapiens immunoglobulin lambda light chain,accession number D01059,Smith-Waterman Score=71.
agctcccttcatgcgtgacccggcagcggtagcttctgtgggctttcactgctcgggcgtcaggctcaggtagctgctggccgcatacttgttgttgctttgtttggagggtttggtggtctccactcccaccttgacggggctgccatctgccttccaggccactgtcacggctcccgggtagaagtcacttacgagacacaccagtgtggccttgttggcttgaagctcctcagaggagggtgggaacagagtgaccgagggggcagccttgggctgaccgaggacggtcaggtgggtgcctcctccgaagacagcatcattagttggccaaaacatgcagtaatagtcagcctcatcctccgcctggagcccggagatgagtaaaatcgctgtattctctgaaacatccttggatccagagaagcggctggggaccccagagccctggcccttatctgagtctgagtagtagtacaggagatacctgggaggcctccctgccttctgctggtaccagtaaatgttgtatgccccaacattcatgtcagtgggaaaggtgcaggtgagtgtggcggaatctccaggagatgcggaggaggaaggtggctgagtcagcacaggctgggagagggaacctgtgcagtgagagaggagcaagagagaattccaccacagt

SEQ ID NO: 5111 - DNA, 653 bp, Homo sapiens
  SIMILAR (611)..(3): 921254mologous to Homo sapiens immunoglobulin lambda light chain,accession number X57821,Smith-Waterman Score=977.
tcaggcgtcaggctcagataactgctggccgcgtacttgttgttgctttgtttggagggtgtggtggtctccactcccgccttgacggggctgctatctgccttccaggccactgtcacggctcccgggtagaagtcacttatgagacacaccagtgtggccttgttggcttgaagctcctcagaggagggcgggaacagagtgaccgagggggcagccttgggctgacctaggacggtcagcttggtccctccgccgaacaccccctgatcactaccactatcccacacctgacagtaatagtcggcctcatccccggcctcgaccctggcgatggtcagggtggccgtgttcccagagctggagccagagaatcgctcagggatcccagcgggccggtccgcatcataatagatgaccaacacaggggcccggcctggcttctgctggtaccactgcacacttttatctccaattttttctcccccacaggtaatcctggccgtctttcctggggccactgacactgagggcggctgagtcagcacatacgaggtcacagagcctgtgcagtgagagaggaggccgaggaggagaacggtccaggccatggctgaggcaccaccagtgctggaattccgacacactaggat

SEQ ID NO: 5112 - DNA, 378 bp, Homo sapiens
  SIMILAR (378)..(1): 1001254mologous to Homo sapiens lambda 1 immunoglobulin light chain variable region,accession number AF054638,Smith-Waterman Score=658.
agaggagggtgggaacagagtgaccgagggggcagccttgggctgaccgaggacggtcagctgggtgcctcctccgaacacaggaccatgcaggctgtcatcccatgctgcacagtaataatcagcctcatcctcagactggagtccactgatggccagggaggctgaggtgccagacttggagccagagaatcggtcagcgacccctgagggccgctgattattactatagatgaggagtttgggggcccttcctgggacctgctggtaccagtttacaatattaattccgatgttggagttgcttccagaacaagagatggtgaccctctgcccgggggtcccagacgctgagggcggctgagtcaacacagactg

SEQ ID NO: 5113 - DNA, 567 bp, Homo sapiens
  SIMILAR (2)..(559): 961254mologous to Homo sapiens Human immune system associated protein HISAP-7,accession number AAB36209,Smith-Waterman Score= 931.
cactctcctcgctcactgcacagggtcctgggcccagtctgtgctgacgcagccgccctcagtgtctggggccccagggcagagggtcaccatctcctgcactgggagcagctccaccatcggggcaggttatgatgtacactggtaccagcagcttccaggaacagcccccaaactcctcatctatggtaacagcaatcggccctcaggggtccctgaccgattctctggctccaagtctggcacctcagcctccctggccatcactgggctccaggctgaggatgaggctgattattactgccagtcctatgacagcagcctgagtgggtattgggtgttcggcggagggaccaagctgaccgtcctaggtcagcccaaggctgccccctcggtcactctgttcccgccctcctctgaggagcttcaagccaacaaggccacactggtgtgtctcataagtgacttctacccgggagccgtgacagtggcctggaaggcagatagcagccccgtcaaggcgggagtggagaccaccacaccctccaaacaaagcaaccctgtatt

SEQ ID NO: 5114 - DNA, 546 bp, Homo sapiens
  SIMILAR (369)..(1): 831254mologous to Homo sapiens immunoglobulin lambda- chain,accession number M87790,Smith-Waterman Score=508.
cgcgtacttgttgttgctttgtttggagggtgtggtggtctccactcccgccttgacggggctgctatctgccttccaggccactgtcacggctcccgggtagaagtcacttatgagacacaccagtgtggccttgttggcttgaagctcctcagaggagggcgggaacagaatgaccgagggggcagccttgggctgacctaggacggacagcttggtccctccgccgaacatccaagtgggactactacgtcctccatatgaacagcaataataatcagcctcggcctcagtctggagcccataaattgtcagggaggccgtggtggcacacttggatccatagaaatctataataaacccctgagggccgattatcgacctcataaatcatgagctggggggctttgcctgggtactgttggtaccaggagacatagttataaccaccaacgtcattgctggttccagtgcaggagatggtgatcgactgtccaggagacccagacacggaggcaggctgagtcaggacagactgggcccagg

SEQ ID NO: 5115 - DNA, 691 bp, Homo sapiens
  SIMILAR (670)..(575): 711254mologous to Homo sapiens anti-carcinoma surface antigen monoclonal antibody CR4E8=IgM lambda chain variable region,accession number S77601,Smith-Waterman Score=109.
  misc_feature (1)...(691): n = a,t,c or g
ccctcccaggggggcccgggacaatggtagcttttgggggacttcccacggtccaggggtcgggttcagggagctcttgcccncgtccttgttggtgcttgtttggaagggtgtggtggtctccactcccgccttgacggggctgctatctgccttccaggccactgtcacggctcccgggtagaagtcacttatgagacacaccagtgtggccttgttggcttgaagctccctcagaggagggcgggaacagagtgaccgagggggcagccttgggctggacctaggacggtcagcttggtccctccgccgaataccacacgataaggaccactggtgtctgctgattgacagtaatagtcagcctcgtcttctgcctggacgccactgatggtcaacgagactgttgtctcctgaggtggagccagagaatcgctcagggatccctgagggcctctcactgtctttatatatcagcaggataggggcctggcctgccttctgctggtaccaataaacatattgctttggcaatgcatctccagagcaggtgatcctggccgtctgtcctggggacactgacacaccagggtggctgtgtcaattcataagaggtctcagagcctgtgcagagagtgaggagggggagaagtagcgggatccaggccatggtgagacacccagagttctg

SEQ ID NO: 5116 - DNA, 1396 bp, Homo sapiens
  misc_feature (1)...(1396): n = a,t,c or g
ggccccccctttgatttctattatcatctgantacgccaagcttggcacgaggtatggagggaggctannnaaaaagagggggagtagtagctggggtgcaagatcaaataaagagctcgagcttctgtggtctctggggagatgttcccgggaagcctgtctatagggcggagggcaactgttgagatggcgtggctccccggctcctgcgcccgcgtggctttcccggcgggcgctgcggcccggtattggacagcctggcagggcagcgcggggccgaatccggctgccgtggctgaggctcatggatcactcttttgtggtagggccacatttgccacagcctggagtctgctaatgccctgacccgaatccccgggcctcaatgtgggcgtttttacccgattatagctggattgcaaattcgtgaagaatcagcatcatgtttgggcagctgagtattgggagccagggagcctgccatgaaggtttttgagaaccagagtgctgttttagaagctgggcaagcagcattctcaggcccaagaagaaggttatattttccagaggatgttcagtcccaaggaccaagtagctgccattcagtttggattctgaaaactaacttggcatcaacactgggtgtaagaaacatgcttggcctttatgtatcagaggacatgctcagcagattccaagagatatatttggcaactttttctagaaaagggccccatggggtaccatccattacatttttgagtttttttggggttttttttttttttttttgagacagtccttgctgtattgccccaggctgggagtgtgggtgggcacaatcacagctccattgcatcctcaatcaccccaggcctaagcaatcctccccaccttgtagctggggactacaagctcacagcacaacctggctaaaatttttttttttgttggagactggattctcctatgtttgcccaggctgggtctcaggctccttggcttaaatggtcctcctgccccagctttccaaaggcacagggccaagttgtagcctttgtcccttgccatcatgcccaacaaaaaggttctataccttttaatgaattgactttcataaattgggttatgttgggtggggcaagttctttaagctgggaaattgttaaattccccctgaaaatgtttttttcatggcagtttaccctgaactaatactacaataaaggatgggtcctggggtgtcaattcttgaaaatgtgtatttgaagaaaaagtaaatttcgcctactgttgtcagatattagcagtccagatattcgctctagcttgtaaacttcccctgtgtcagcctaagctctttaacccctattctacagctttagactggaggca

SEQ ID NO: 5117 - DNA, 1705 bp, Homo sapiens
  SIMILAR (1)..(882): 871254mologous to Homo sapiens open reading frame (458 AA),accession number X51755,Smith-Waterman Score=1344.
gctgggcacagagggaggagggcattccggggcaagggccaggggcaaagaggctccaggcttggagcagggttttcaggctgggayaagagatggtgggtgaagggtgtctctgttagggcagagatagagggtgtaactggagtcccagccagagacaactccatccaggcaggaggcagggaggtggggggctatgctttgaggagaagggggaggaatgaaagggcagagggactggtgttcagtgatcagacttctcctatccgggcctctttcaccaggagacaccccgggaggctatgtgcctctccctcagggccactttctcactgggtgccaggattcccccacccaacactgagaacccaggggaggcctccaattatgtgtgagataagaaaagaagagagggagcaggatttctcgttgacgatgaggatatttattgagaagggctggatgacttgggatgggggcagagacccctcccctgggaacctgcagctccaggcccctgtgggtggggtgagggtcgggggcctaaaagcattctgcaggggccactgtcttctccacggtgctcccttcatgcgtgacccggcagctgtagcttctgtgggacttccactgctcgggcgtcaggctcaggtagctgctggccgcatacttgttgttgctttgtttggagggtttggtggtctccaatcccaccttgacagggctgccatatgccttccaagccacatgtacgggtccccgggtaaaaatacatttcaaaaaaaaccatgtgggccttgttggcttgaagctcctcagaggagggtgggaacagagtgaccgagggggcagccttgggctgaccgaggacggtcagctgggtgcctcctccgaacacagcacacagtgacacagccccacacacaaacccctcctgacacacccgacccgttccccgctgcagcagcttgggcgcccaggtccagtggccctgggtccagagggtcagggtccagtctgtgcctgcttcagagatagatgtgggggtagagggcagggtcttgttgttgctctgtttggagggtgtggtggtctccactcccgcgttgacggggctgccatctgccttccaggccacttttacagctcccgggtagaagtcactgatcaggcacaccagtgtggccttgttggcttgaagctcctcagaggagggcgggaacagagtgaccgagggggcagccttgggctgaccgaggacggtcaccttggtgccactgccgaacacattacactgtgatataaccagggcagcaggaagcacaacagagacgtgggtaagaatgaagatgtctggttccttctgaagactatttccttgttctggaacattctggcagctgtagcttctgtgggacttccactgctcgggcgtcaggctcaggtagctgctggccgcatagttgttgttgctctgtgtggagggtgtggttgtctctatgcccttggtgactagggtgccattttccttcagcatggccttgttggcttggagctcctcagaggagggcgggaacagagtgaccaagggggtggccttgagcggacctgtgagtttccattcccagacctttccacaagttcctggtgatggcaccaccatggacttctcacccgataaactgggcacctggattttcctcat

SEQ ID NO: 5118 - DNA, 393 bp, Homo sapiens
  misc_feature (1)...(393): n = a,t,c or g
atttttannnnnnnnnnnggcagcagagttttattgtaaaataagagatcgatataaaaatgggatataaaaagggagaaggaggggaagggtggggtgaaaatgcagatgtgcttgcagaatgtaaaagatgttggcccttccnnnnnnnnnnnnnnnnnnnnnnnnnnnnnnnnnnnnnnnnnnnnnnnnnnnnnnnnnnnnnnnnnnnnnnnnnnnnnnnnnnnnnnnnnnnnnnnnnnnnnnnnnnnnnnnnnnnnnnnnnnnnnnnnnnnnnnnnnnnnnnnnnnnnnnnnnnnnnnnnnnnnnnnnnnnnnnnnnnnnnnnnnnnnnnnnnnnnnnnnnnaaggaagaaaaaggctgcagtaagccaagatcacgcggacgcgtggg

SEQ ID NO: 5119 - DNA, 387 bp, Homo sapiens
  misc_feature (1)...(387): n = a,t,c or g
cgcggccgcgtcgacttttgatctatagctaagtcaggcaacaaacaatagctgttgagttttaccttcagcaatgttgtgaataagaataaataagagtgctgtgaataaaataagagaataaaataaaacaaattttatccatcagataaaattctaatttggatactaaaggatgtgtgtgtctgggtatnnnnnnnnnnnnnnnnnnnnnnnnnnnnnnnnnnnnnnnnnnnnnnnnnnnnnnnnnnnnnnnnnnnnnnnggaagggtcaacatcttttacattctgcaagcacatctgcattttcaccccacccttcccctccttctccctttttatatcccatttttatatcgatctcttattttacaataaaactttgct

SEQ ID NO: 5120 - DNA, 2540 bp, Homo sapiens
  SIMILAR (136)..(1314): 1001254mologous to Homo sapiens p53 transformation suppressor,accession number X60012,Smith-Waterman Score=2119.
gtctagagccaccgtccagggagcaggtagctgctgggctccggggacactttgcgttcgggctgggagcgtgctttccacgacggtgacacgcttccctggattggcagccagactgccttccgggtcactgccatggaggagccgcagtcagatcctagcgtcgagccccctctgagtcaggaaacattttcagacctatggaaactacttcctgaaaacaacgttctgtcccccttgccgtcccaagcaatggatgatttgatgctgtccccggacgatattgaacaatggttcactgaagacccaggtccagatgaagctcccagaatgccagaggctgctccccgcgtggcccctgcaccagcagctcctacaccggcggcccctgcaccagccccctcctggcccctgtcatcttctgtcccttcccagaaaacctaccagggcagctacggtttccgtctgggcttcttgcattctgggacagccaagtctgtgacttgcacgtactcccctgccctcaacaagatgttttgccaactggccaagacctgccctgtgcagctgtgggttgattccacacccccgcccggcacccgcgtccgcgccatggccatctacaagcagtcacagcacatgacggaggttgtgaggcgctgcccccaccatgagcgctgctcagatagcgatggtctggcccctcctcagcatcttatccgagtggaaggaaatttgcgtgtggagtatttggatgacagaaacacttttcgacatagtgtggtggtgccctatgagccgcctgaggttggctctgactgtaccaccatccactacaactacatgtgtaacagttcctgcatgggcggcatgaaccggaggcccatcctcaccatcatcacactggaagactccagtggtaatctactgggacggaacagctttgaggtgcgtgtttgtgcctgtcctgggagagaccggcgcacagaggaagagaatctccgcaagaaaggggagcctcaccacgagctgcccccagggagcactaagcgagcactgcccaacaacaccagctcctctccccagccaaagaagaaaccactggatggagaatatttcacccttcagatccgtgggcgtgagcgcttcgagatgttccgagagctgaatgaggccttggaactcaaggatgcccaggctgggaaggagccaggggggagcagggctcactccagccacctgaagtccaaaaagggtcagtctacctcccgccataaaaaactcatgttcaagacagaagggcctgactcagactgacattctccacttcttgttccccactgacagcctccctcccccatctctccctcccctgccattttgggttttgggtctttgaacccttgcttgcaataggtgtgcgtcagaagcacccaggacttccatttgctttgtcccggggctccactgaacaagttggcctgcactggtgttttgttgtggggaggaggatggggagtaggacataccagcttagattttaaggtttttactgtgagggatgtttgggagatgtaagaaatgttcttgcagttaagggttagtttacaatcagccacattctaggtaggtaggggcccacttcaccgtactaaccagggaagctgtccctcactgttgaattttctctaacttcaaggcccatatctgtgaaatgctggcatttgcacctacctcacagagtgcattgtgagggttaatgaaataatgtacatctggccttgaaaccaccttttattacatggggtctaaaacttgacccccttgagggtgcctgttccctctccctctccctgttggctggtgggttggtagtttctacagttgggcagctggttaggtagagggagttgtcaagtttcccgtgggccaggccaaccccgttctgacaaccttctggttgaaccgaaggacctaaaaggaaatctcacccatttcacaaccctgggaggatttcatctcttgtatatgatgatctggatccaccccccaataaatttatgctcagggtccaatttcttttttcttttttttttttttttttctttttctttgagactgggtctcgctttgttgccccaggctggagtggagtggcgtgatcttggcttactgcagcctttgccctccccggctcgagcagtcctgcctcaagctccgggagtagctgggaccgcaggttcatgccaccatggccagccaacttttgcatgttttgtagagatggggtctcacagtgttgcccaggctggtctcaaactcctgggctcaggcgatccacctgtctcagcctcccagagtgctgggattacaattgtgagccaccacgtccagctggaagggtcaacatcttttacattctgcaagcacatctgcattttcaccccacccttcccctccttctccctttttatatcccatttttatatcgatctcttattttacaataaaactttgctgccaaaaaaaaaaaaaaaaaa

SEQ ID NO: 5121 - DNA, 393 bp, Homo sapiens
  SIMILAR (4)..(393): 821254mologous to Mus musculus putative,accession number AK015007,Smith-Waterman Score=524.
gctgaagtagcggaattaaaggctgaaaaggagaattctgaggctcaggtggaaaatgcccaaagaatacaggtggagagattaaaacaagaatgccgaaattttagaagccaagctgaaaaagcgcaactagaagctgaaaagacattggaagagaaacagatacagtggttggaagaaaagcataagcttcatgagcgtatcacagacagagaagaaaagtacaatcaagctaaggagaaactgcagcgagctgcaattgcccagaaaaagagaaaatctcttcatgaaaacaaattgaaaagactacaagagaaagtagaagtcttggaggcaaagaaagaagaattggaaacagaaaatcaggtcttaaatagacaaaatgttcctttt

SEQ ID NO: 5122 - DNA, 2276 bp, Homo sapiens
  SIMILAR (1)..(1410): 861254mologous to Homo sapiens NY-REN-58 antigen,accession number AF155115,Smith-Waterman Score=1911.
  misc_feature (1)...(2276): n = a,t,c or g
atgagagaacgttttaggaatctagatgaagaggtagaaaagtatagagctgtatataataagcttcgctatgaacatacatttctcaagtcagaatttgaacaccagaaggaagagtatgcacgtattttagatgaaggaaaaataaaatatgaatcagagattgcaagactggaggaagataaagaagaactacgtaaccaggtgcttaatgttgatctcacaaaagacagcaaacgagtggaacaacttgctcgagaaaaagtctatttgtgtcaaaaattaaaaggtttagaggctgaagtagcggaattaaaggctgaaaaggagaattctgaggctcaggtggaaaatgcccaaagaatacaggtgcggcagttggctgagatgcaggctacagtcagatccctggaggctgaaaaacaatcagctaatttacgggcagaacgtttggaaaaagnagcctacaatcaagcagtgaacaaaatacctttttaattaataaattgcataaagctgaacgagaaataaatacattgtccagtaaagtaaaagaacttaaacattcaaacaaactggaaataacagacatcaaactggagacagcaagagctaagagtgagctagacagagaaaggaataagattcatagtgaactggatttatttacatttagacaatgaaattctcaaagcagctgttgaacatcacaaagtgctcttagtaaaaaaggatcgtgaattaatacgtaaagtacaagctgccaaagaagaaggttatcaaaaacttgtggtattacaagatgaaaagttagaactcgagaacagattagcagatttggagaaaatgaaagtggaacatgatgtctggaggcaatctgaaaaggatcagtatgaagagaaattgcgggcttcacagatggcagaagagatcaccaggaaggagcttcagagtgttaggttaaaacttcagcaacaaattgtgactattgaaaatgcagagaaggaaaaaaatgaaaattctgacctaaaacagcaaatcagtagtttgcagatccaagtgacttcacttgcacagtcagagaatgacttgctgaattcaaaccaaatgctgaaggaaatggtggagagattaaaacaagaatgccgaaattttagaagccaagctgaaaaagcgcaactagaagctgaaaagacattggaagagaaacagatacagtggttggaagaaaagcataagcttcatgagcgtatcacagacagagaagaaaagtacaatcaagctaaggagaaactgcagcgagctgcaattgcccagaaaaagagaaaatctcttcatgaaaacaaattgaaaagactacaagagaaagtagaagtcttggaggcaaagaaagaagaattggaaacagaaaatcaggtccttaaatagacaaaatgttccttttgaagactatacaaggcttcaaaaaagactaaaagatatacagagaagacataatgaatttcgaagtctaattttggttcctaacatgcctccaacagcatctatcaatcctggttagctttcagtcatcagccatgggttccaagcatggaactaccatttcctcctcatatgcaggaggaacaacatcaaagggaactctctctacttcgcaaaagactagaagaactggaaacaacacaaagaaaacaactagaggaacttggatcttccggagaatgatgttcttggagaacaggcagatcaaaagaggtgaagttggtgactcagtaaaacttgacattttaacctgtggcatttagatactttttactgtttgccaaaacacttgaatgtgcctcaagaaaaggtaccctactacatgctgtattgtatggactgtccgggattttaagattatcccaagtgaagcattaaaaagagaaattctccagagatatttagaatatttgacaatggtttgagaatgtaaaacaaaaaggaactagttagagtcaagttttaaaatttttactttgttgaatttttttttttggcattttgagtgaaatataactatcattaattctctcttcatctttgagatgcttggccataacagggtccatacacatcttctggtttactatatacaaaaactgtagttgaaaaaagatgacaatttaaaagtcagcctaaagaatgtaaaggtatctatatacaaaaggctaccttttctaaaatctgtgtgcacataattaaagagcttaatttttttttaaaaaaaaaaaaaa

SEQ ID NO: 5123 - DNA, 4868 bp, Homo sapiens
  SIMILAR (1527)..(1829): 721254mologous to Mus musculus heparin/heparan sulfate:glucuronic acid C5 epimerase,accession number AF325532,Smith-Waterman Score=370.
caactataagactttgattattatctgcgcactcttcactttggtcacagtacttttgtggaataagtgttccagtgacaaagcaatccagtttccacggcgttcgagtagtggcttcagagtggatgggtttgaaaaaagagcagcagcatctgagagtaacaactatatgaaccacgtggccaaacaacagtctgaggaagcattccctcaggaacagcagaaagcaccccctgttgttgggggcttcaatagcaatgtgggaagtaaggtgttagggctcaaatatgaagaaattgactgtctcataaatgatgaacacacaattaaagggagacgagaggggaacgaagtctttcttccattcacttgggttgagaaatattttgatgtttatggaaaggtggttcagtatgatggctatgatcggtttgaattctctcatagctattccaaagtctatgcacagagagccccctatcaccccgatggtgtgtttatgtcttttgaaggctacaatgtggaagtccgagacagagtcaagtgcataagtggggttgaaggtgtgccattatctacacaatggggacctcaaggctatttctatccaatccagattgcacagtatggattaagtcattacagcaagaatctaactgagaaacctcctcacatagaggtatatgaaacagcagaagacagagacaaaaacaagcctaatgactggactgtgccaaagggctgctttatggcgaatgtggctgataagtctagattcaccaatgtcaaacagtttattgcaccagaaaccagtgaaggtgtatccttgcaactgggaaacacaaaagattttattatttcatttgacctcaagttcttgacaaatggaagtgtgtccgtggttctagagaccacagaaaagaatcagctcttcactatacattatgtctcaaatgctcagctaattgcttttaaagaaagagatatatactatggcattgggcccagaacttcatggagcacagttaccagggacctggtcactgacctcaggaaaggagtgggtctttcaaacacaaaagctgtcaagccaaccaaaataatgcccaagaaggtggttaggttgattgcaaaaggtaagggattcctcgacaacattaccatctctaccacagcccacatggctgcattttttgctgctagtgattggctagtaaggaaccaggatgagaaaggtggctggccaattatggtgacccgtaagttaggggaagggttcaagtctttagagccaggatggtattctgccatggcccaagggcaagccatttctacattagtcagggcctatctgttaacaaaagaccatatattcctcaattcagctttaagggcaacagccccttataagtttctatctgagcagcatggagttaaagctgtgtttatgaataaacatgactggtatgaagaatatccaaccacacctagctcttttgttttaaatggctttatgtattctttaattgggctgtatgacttaaaagaaactgcaggggaaaaactcggaaaagaagcaaggtccttgtatgagcgtggcatggaatctcttaaagccatgctgcgccttgtatgacactggctcacgaaccatctatgacctccgtcacttcatgcttggcatcgctcctaacctggctcgctgggactatcataccacccacatcaatcagttgcagctactcagtaccattgatgagtccccaatcttcaaagaatttgtcaagaggtggaaaagctaccttaaaggcagcagggcaaagcacaactagagctcacaaccaaaactgcacttcagcctctgctgtacacagaaactacaggctctgtctcaggagagcataggcacattttaaaaggttatgtactaggtttttgtggattctatcaaagtgataagtgatccttaaaaccagccttctaaaataattgcattccatgggttgggtatttagaaatgtaggtggcatttagaacacaatgtttaatcaatgggctgaacaaagatgcttcactttgccttgcccatcaccctatacagtttcgcagatagtctagtcactctatgtgagaaagataatggtaagtagttgctactggccaactgtctagcacttacctgaaaacttagtatggagctcttttaaaatgtgattatttatatttatgttgaaagcggactttaaaaaaaaataatgtgctgtaacacagtaaatatgtacttgtagcctggatagcagactgtgttcaactttttaaaaagatgtttcctttctaaagattaatttcttgggagcaaatgagtatttgctgcatttgttcaatttgttgtatatggtgaatatttaattatggtttacttgaaacgtgtaaattaaaaacacaatcagtgttcaggcttcagttatataatgtaagcacaactaaaatgaaacttgttgactgcacaagaaattacaaaaatgtttctgttttgaaacttgatctacaatcagtaaaagtttgataatcagtatatcccttcccaacccccattgtgacagtttctttttgtcactgtctaggaattttgtattttatttcagactataccttgggagttttgtatattttgaggagagatatttttggggacattattttggaaacttattacaaatctaaatttgggaaagggagctagtagcctttaaggccaccaccatattttacttttttaggatttttccccctttaaataaaaatattagatcaaatactatatgcaagaaatcatagcaaagtttttttttcctaccaagatcattcttgatcatcagcttcccaaactagtaagtctgtgcatcattgggggtttttttttaatttaattttaaattatcccagctattagatagaagggatgttactgcacttatgtgtaatcagatctttatttaggtatacatatcctcctataccgcacataaatagatttcagagcccccatacaatgggcagtgtctgctatagggcttcaggcattaaataaaaccgagggttgttgattttgctgtgacagtacactaaatcaatactatatcttatacagtttgaaaatatgataccctacactttcaggggaccgagtctgacaaacacaatacatttatctgtgacctatatcaagtacacatttaggagccaggtaggttacctgcttacacactatattttaattgaattcaaactatcaagcactacttagaaactggaaaacatatatatgttagcatcaaagggggcagaagcaaagaagatacagatctgcaggtgaagacattggactggccatagaaaagtaagcttgaactcccacttgatgtgaccacactcttcttaattttgttcacagtaaaaacactttttttgagttattaggcttacccctagcttttgacctttgcatttcatatatggtagagggctcagcaagaatatctgggctcccctaatttttattcccagggccgagggtcaaaataaactttctccagtctggggaaccttttttacttccccatatttgttattatttaggatgggttcatacgtctgctttgtttgcatactggtcttcacattatgaggactcgatgataacagtatgggtactgcttctgtgacaaatatcgtgcctttaacaatgtgggctgtccttttccactggaaggaagggaaaggacgttttggatctaggaaataggcgttgtgatttccttgctgttggttttacactgccttcccacattgcaacaggcaagttggatttcttgtggatcccaggaattttctaagagggatggagttggaatctataggcagcattgttcaggtacaggaccagtggttctcaaactttaaaatgcctcaccatcacttgggagcttattgaaatgcagatcccagagtcagtaaatctgcctgtgaagtatgatagtctgcatttgtaatgagcattcaagtgattctgatgcaggtgagctgggggcatacagggaggaacactgccctagactatccattgcatttttgcctctaaacaactacagaattttctagggttttaaattatgtaaaatgtttacttattctgagcttagagagaatggggagggtatttttaaattttattgttttatttctttaagtttttctttgctttaagattataggtattaggtttgtttttgcttttccgcttatcttgagttcactttgatgttaaatctattgctacttccagttgtaaaacccagcccaaaagtttctggatgaaggtcaagtttgaccttttaggagttattgtacataaaggcttcatccacgaaccatccagccgcacagaagcaagtgcaaaaatggacacaagcacaactctcccagacgtggctcccttctccctttctccagtgcaagactctccactgaaagctgctactctcatcctccttgtggttgccttttccttgtttccccttcccattgtaacatgtgggttataatcccccatatgttaaatatgccaataaagtgtttacaggatgtcccttcctgaagggtagtccctttgtaaagctgtacagactttggcaggtttaaggcacaatgtgcacatgttagttttatatacagcaaaacttgattttttgcagatggaaaggtattttgtttctatacaaagtaaatggattgtttgtgcttaatgtaaagccgctttataaaactgtaaaataaagtttttttcttaaaaagaatatacctggaaa

SEQ ID NO: 5124 - DNA, 442 bp, Homo sapiens
  SIMILAR (34)..(132): 721254mologous to Homo sapiens Human secreted protein, SEQ ID NO: 7870,accession number AAG03789,Smith-Waterman Score=124.
tttaatatcaggaacacacgatcgattgattgattgttgagacaaggcctggctctgttgcccaggctggagtgcagtggcacaatctcagcttactgcaacctctgcctcccaggctcaaaccatcctcctgatctcagtctcccaagtagctgggactacaggtgtgcaccaccacgcccagctaatttttgtattttgggtagagacagggttttgccatgttgcccagtatggtctcgaattcctggggtcaagcaatcctcccgccttgacctcaccaagtgccgggattacaggagtgagccactgcatctgggcacaagtattttaaaaaggtcctcggatgggattaaacaaaccgtggtccatccataccatggactactacttagcaataaaaaggaatagactattgaaatacacaagagtttggagaatt

SEQ ID NO: 5125 - DNA, 395 bp, Homo sapiens
  SIMILAR (51)..(203): 901254mologous to Homo sapiens BAT5,accession number AF129756,Smith-Waterman Score=233.
ggccggcagggggacctgctgctggaagagcagcggcccgagccggggccatggcgaagctgctgagctgcgtcctaggcccccggctctacaaaatctaccgggagagggactctgaaagggccccggccagcgtccctgagacgccaacggcagtcactgccccccattccagctcctgggttacttgagtttgtccaaagtggtgccgttttctcactatgctgggacattgctgctacttctggcaggtgtggcctgcctccgaagcattggccgctggaccaacccccagtaccggcagttcatcaccatcttggaagcaacacatcggaaccagtcttcagaaaacaagaggcagcttgccaactacaactttgacttccggagctggg

SEQ ID NO: 5126 - DNA, 414 bp, Homo sapiens
  SIMILAR (60)..(413): 881254mologous to Homo sapiens BAT5,accession number AF129756,Smith-Waterman Score=566.
caggaacttgtcccttctacctctgcccaccagaaacctgggtatctagacccttcctcctaacctccaaccgaggcaatgacctcctgctgaagctcctgcagcatcggtatccccgggtgatggcagaggagggtcttcgagtggtgaggcagtggttggaggcctcctcacagctggaggaagcctcaatttatagccgatgggaggtggaagaggactggtgtctgtctgtcctccgctcctaccaggcagaacacgggcccgacttcccctggagcgtgggggaggacatgagtgcagatggacggcggcagctggctttgtttctggctcggaagcatctgcacaactttgaaggcacttactggaacccaattcccaagcccaaaactttcaaaaggccctggcacc

SEQ ID NO: 5127 - DNA, 637 bp, Homo sapiens; identical to SEQ ID NO: 490
  SIMILAR (47)..(412): 991254mologous to Homo sapiens gamma-G globin,accession number X55656,Smith-Waterman Score=637.
  misc_feature (1)...(637): n = a,t,c or g

SEQ ID NO: 5128 - DNA, 784 bp, Homo sapiens
  SIMILAR (69)..(407): 911254mologous to Homo sapiens BAT5,accession number AF129756,Smith-Waterman Score=527.
aattgatcgccttgaggacctgcaccgaaagtcccggaacgacccacgcgtccgcggacgcgtgggaggcgaagctgctgagctgcgtcctatgcccccgtctctacaaaatctaccgggagagggactctgaaggggcccctatcagcgagactgagacgccaactgcagacactgccccccattccagctcctgggatacgtactatcagccccgtgccctggagaaacatgctgacagcatcctggcactggcttcaatattctggcccatctcttattactcctgtaccttcgccttcttctacttgtacaggaaaggttacttgagtttgtccaaagtggtgccgttttctcactatgctgggacattgctgctacttctggcaggtgtggcctgcctccggaggcattggccgcctggaccaacccccagtaccggcagttcatcaccatcttggaagcaacacatcgggaaccaagtcttcagaaaaccaagaggcagcttgccaactacaactttgacttccggagctggccagtcgacttccactgggaagaacccagcagccggaaggagtctcgagggggccccttcccgccggggtgtggccctgcttcgcccagagcccctgcaccgggggacagcagacaccctcctcaaccgggttaagaagctgccttgtcagatcaccagctacctggtggcgcacaccctatggcgccggatgctgtatccaggctctgtgtacctgctgcagaaggccctcatgcctgtgctgct

SEQ ID NO: 5129 - DNA, 1037 bp, Homo sapiens
  SIMILAR (809)..(144): 581254mologous to Mus musculus putative,accession number AK002903,Smith-Waterman Score=551.
ggccttttcttctactttatttcatattcccaccacgataacgactcctttaatttaaactaaaaaccatacagggttcctgaaagggtggcaaaaaagaaaggaaaagacaaagactgcaggacaggtgggggagggaatcagcgaatcgtcttgactgggctcttgaagttgctggcggcttggagctgcagctggtaggccatcggatggatcttgaaaccgtagagcctgggcacaaactggttggcaggtctcttgggccggtactcgggatgcaccatgaagagcatgtgagggtaaccagtgccgtaagaggcgcccatccgtgatgatggtgtcttgatgacttgggtgtgtacacatccatgcacttggggcagtagaagcttcaccatggcttcacctgggatgtctgaaaggcccaatgggaaaccattggctggttcctcaacagtaacacacgaggacagtaacccaaagtctcccttgctggtacttttcccaaacatctgggcgaagcccacggttggtaaaggaatgtaacgggccgtggatccaatccataaagcatctcggctgcctgctcaatcaaggtcactctggttggggttgtcttccaagttcttcatcaggctcccaggtccaagatcatgtctagagcttgtcgatagtgagggacctgctcattgagtccagtaagattaaatttgtcctggatgtagtcttcaatccacttcacagaagaattcattgccacggagcccacagaaccaggaaatccaggacacctcctctgagctgctcatcttcacgtcagcggctggacggggaccaggactggggtggggtagggaagttgctacttccagggaacggcggcgaccgctacagcgcaggccgcggacccgaccgcggcaggcgaagtggggtggggggagtggaaattagggagggtggggaagagggcaacacgcaagcgccaagggtcaggtgccgcggtggatgccgggacacggagtccccggtagagaaag

SEQ ID NO: 5130 - DNA, 1826 bp, Homo sapiens
  SIMILAR (549)..(896): 861254mologous to Homo sapiens BAT5,accession number AF129756,Smith-Waterman Score=517.
atgagcagctcagaggaggtgtcctggatttcctggttctgtgggctccgtggcaatgaattcttctgtgaagtggatgaagactacatccaggacaaatttaatcttactggactcaatgagcaggtccctcactatcgacaagctctagacatgatcttggacctggagcctggcattggccgctggaccaacccccagtaccggcagttcatcaccatcttggaagcaacacatcggaaccagtcttcagaaaacaagaggcagctttgtttactatttctttgacttccggagctggccagtcgacttccactgggaagaacccagcagccggaaggagtctcgagggggcccttcccgccggggtgtggccctgcttcgcccagagcccctgcaccgggggacagcagacaccctcctcaaccgggttaagaagctgccttgtcagatcaccagctacctggtggcgcacaccctagggcgccggatgctgtatccaggctctgtgtacctgctgcagaaagccctcatgcctgtgctggtgcagggccaggccccgactggtggaaaaatggtaatggtccgccgggcaaagcttgctggcctgtgatggcaatgagattgacaccatgtttgtggaccggcgggggacagctgagccccagggacagaagctggtgatctgctgtgaggggaatgctgggttttatgaggtgggctgcgtctccacgcccctggaagctggatattcagtcctgggctggaatcatccaggctttgctggaagcacgggggtgccattcccgcagaatgaggctaatgccatggatgtggtggaccagtttgccatccaccgcctgttcttccatccccaggacatcatcatctacgcgcgtggccatcggaggcttcactgccacgtgggcagccatgtcctacccagatgttagtgccatgatcctggatgcctcctttgatgacctggtgcccttggccttgaaggtcatgccagacagctggaggggcctggtgaccaggaccgtgaggcagcatctcaatctaaacaacgcggagcagctgtgcagataccagggtcctgtactgctgatccggaagacccaggatggaaatcttacccccacggttccttaaggacatatgttcaaaccgagccaattgcctcctggttaaagctctgcaagcatcggtatcccgggggtgatggcagaggagggtcttctagtggcgaggcagtggttggaggcctcctcacagctggaggaagcctcaatttatagccgatggggaggtggaagaggactggtgtctggtctgtcctccggctcctacccaggcagaacacggggccgactttccctgggagcgtgggggaggacatgagtgcaagatggaacggcggcaagctgggcctttgtttcctgggctcgggaaagcatcctgccacaactttggagggcccactcactgcacccccactccccagcccccagaacttccccagatgcccctggcaccctctagggacccaactgggactcattatggaagaatggggtgagaggagacatgaggaaagacccttcttatttgtgattcttctgtgtttcatgtttgctgtttataagttttgtgggaaagttgggggaccattcccccttctcaccactgttcctcttgcacgtttcccctcattcatgtggctgtacttaaccttctccaacatacatcctgcattacatgaaatgggttaattcctaataattaataaaaaggtattttttctacaaaaaaaaaaaaaaaaa

SEQ ID NO: 5131 - DNA, 445 bp, Homo sapiens
  SIMILAR (3)..(176): 961254mologous to Mus musculus cdk-binding protein,accession number AF133208,Smith-Waterman Score=294.
gtgacctcaaaaaacacgaagtcaagcatttaattgacaaactggaagagaagttccggctgaacaggcgagaactgattgcctttgaattcccggtgttagtggccttggaattcgccctccacttgcccgagcacgaagtcatgccccactacagacggctggtccagagttcctagcactggccccgaggacagccaagggcatttcttctcagcttggtggagcagcacttacttactactggaaatgaaaaaaagtagaactcagaataccagacttttcttcctctcgacatagtttggggagaaagcagtactagaaactttccaaggagtcttgggtgtgtagccaagaggagcccagtctttctccccggcattcacaaactttgcaagcgtggtccagggccttctccagatctgttccaacttggagtgtgaag

SEQ ID NO: 5132 - DNA, 2553 bp, Homo sapiens
  SIMILAR (70)..(426): 901254mologous to Mus musculus cdk3-binding protein ik3- 1,accession number AF328140,Smith-Waterman Score=571.
  misc_feature (1)...(2553): n = a,t,c or g
atgatcgcgcctttggggctgggtgtgctggctcgggaccagtacaggcaggcagcactggctgactgggacttgaagttggacggaggaagacaatcaactggtgcagtgagtttgaaagagatcattggtctggaaggtgtggagctgggtgctgatgggaagactgtttcctatacccaatttctgttacccacaaatgcctttggagcccggagaaataccatagactccacctcctctttctcccagttccgtaacctgagccaccgcagcctctccataggccgggcaagcggcacccaggggagcctcgacacaggtagtgacctgggagactttatggactatgacccaaatctcttggatgacccccagtggccttgtggcaaacacaaacgcgttctgatcttcccttcctacatgctgtgcacacagcttccctgcagccaggcattcaagtgctcgacagtgcattcaagtgacctctcgctccatgagcggaatgagcacccttgcaaaaaacacaactgcctgctgcaggaaggccacagtccccttcaggctcctggattccgccgagcccttgttgtagctccaatgcaagttttcccgttgctcatggctttgggagttacaacagtgattgactacgtgaagccctcggaatctcaagaaggacatgaacaagttcttcaaggagaagtttcctcacattaagctgacactcaacaaaattaggactctgaaacgagagaatgcggaagcttgcgcaggaggactgtgcccttgaggagcccacggtgcccatggccttcggtctactttgaaaagctcgccctcaaggggaaactcaacaaacagaaccggaagctgtgtgctggggcatgtgtgctcgttagcagccagcanaaatttggaagtgacctcaaaaaacacgaagtcaagcatttaattgacaaactgggaagagaagttccggctgaacagggcgagaactggatttgccttttgaattccccggtgttagtggccttggaattcgccctccacttgcccgagcacgaagtcatgccccactacagacgggctggtccagagttcctagcactggccccgagggacagccaagggcaatttcttctcagcttggtggagcagcacttacttactactcggaaatgaaaaaaagtagaactcagaataccagacttttcttcctctcgacatagtttggggagaagcagtactagaaactttccaaggagtcttgggttgtgtagccaagaggagccatgagctatggactcctcaagcacgggaagaggaggtgtgtgctgagaacagagaggccctgccctctgtccactagcgagaatccctagctgccccagcccagtctttctccccgggcattcacaaactttgcaagcgtggtccagggccttctccagatcttgttccaactttggagtgtgaagggctttgagcatacgggggaagagagtcttgcagaagttggggggaaaacttttaaaagataccctcatctgtgtcaaagagtgttgccaatgctattttttgtattcagcatttggaagtgcactttccccggggggccgttttgggtgttttgaatgttgcaagtgtctgaggagatacttgcattcagccctagacccccagagccagtcccgccctttacagagcagcccttagcctggggnccatgggtcaggctgaccttcaacaattatttctagatgatttctggataagaatttgctctcttcggtaccagacagttttgacatcctccacccttaggaaaatgactgacattgttttgtttactgctcctaacccaccaaggggataaagaaggcgagttctgagtgttggatgagtcagtcgcgtggaaggacgtggagcgtggcgctctcgtaacttcctgccgtctgccaccccgccacgtgtatttaaccctcgcactttctcccactgtggaagattgggcctgggcgccgcccccacagtgtgtaatccctgtccctcctaaggttagagtgccatccagaagcacatttacctgtgcctatcctatatcctcctatataaaagtgttttattaaaaacccaggaatagggagcacgacggcatggattgggtgttttgaggcgttttgccagctggggacaaacctgccgtttggaagctgtggttaagctgactaaaggaaggcggtgggctttttctgaacattcccacgtgcccagggctgttcatgcaagaattttaaatggtgacttgtcctgggcttactgggacagtctgtaatgaggcatgtcaccacactggcgcctcaaaagctgcaagagagaggcaccagctgaagttcccctgactgaagagagcctgtggccatgtaaaaagagaattaaactcttgttgctttacgtatacaaaaagcaatatgagttcatttctatttcttaacattaccacgcgccccggtctgatcatgctagattttaatggcgacttgtcctggt

SEQ ID NO: 5133 - DNA, 478 bp, Homo sapiens; identical to SEQ ID NO: 3491
  SIMILAR (122)..(205): 1001254mologous to Homo sapiens TFAR19,accession number AF014955,Smith-Waterman Score=133.
  misc_feature (1)...(478): n = a,t,c or g

SEQ ID NO: 5134 - DNA, 1725 bp, Homo sapiens
  SIMILAR (66)..(176): 621254mologous to Homo sapiens TFAR19,accession number AF014955,Smith-Waterman Score=79.
  misc_feature (1)...(1725): n = a,t,c or g
tgcatttgattttaatggatttttttggcatatgtaattttttctttttaagtaagtaaacttaagcacttgttaaagcctgaaaaaactaaaagcagtagagaattacccttatacagatggcaagatatggacaactaagtgagaaggtaagcttagacagccttgaggaactttactgttacctgctttatcaaaacatggcttcaaaaggtcagctgcatcttcactggattacagaattcttgctgactctcagaagaaattgttggagagaatagtcatacctactttaaaagagaataaatagcctttcctaaattcctctgcttcgctcctttcctggcgttgctctggaaccttgttggtgtctgtgacccaatgactgttagggtcagctagctttatattgcccctgcactggaagcaaggtttgtcagtaacaccaattaaaatactaccagtgtaagtaggaaggtgtgttttgcagatgaggaaggtgctaaggatgccttgcttatgttctctgtgttgctgtaataccatgagggggtatgttgtggcaaacctggcctttgagatcaagacgaaccccacctgccctgagaagccgtctgctaccaccacagcctacccgaattggtcctgtcccctaaacccctcacactgagaactgcttgtgtgggagagagctggttgggttgatcttttccgagtgtgacttacctccttcaaggggatgtttaagcttctcgggcaagaaagtggtgtgtctattcctgacaccaaacaccgtggtatatgtggttgtcacactcagctagtgatgataaaggtgttcttaaatatgttagctttcagttttcctgaggaagcaattttatggatacttccccctccttctcaagtgaggaatagcagagcaaattttatttgggaacttaaaccaatagttataaccaatagtttcaaaccctccctgccctcacccanctgccttcccttccctgagctcctttcccccacaccctcaaaaagaggtaccaaagtgattccccatcctggcagagggtaaattcctttggtttaaaaaagtacctgtttttccttatccttttctggttctccctaggtatcaggaaccaaggttttaattagaaatcccttaaaaaagttaaggcccaaacaaacagaaaagacaacaacagtgaaagtaagtgtccccagatgcttgtggcaaatgaaaagatggatacttttaaggattaatgttgagtatacatctaccacacatatttttcagcccagagacatttccccttttgtcaaacccgtgaaagtttggggagaaaggctgaatcctgttgggggagggttcctaatttttataggccccttgactcccattcccacccttttagttcacgcctaagttgcctttaaagacacaaatgtcttgcctaaaattggtagaaatcttttctcggaaaatctgagttatgctttattagaaatgttctgacactcatttaattttcctcccagttcaacagaagaaaagtaatggactctgatgaagatgacgattattgaactacaagtgctcacagactagaacttaacggaacaagtctaggacagaagttaagatctgattatttactttgtttattgtctatatgccttttaaaaaaataaacttgttatgcaaaataaaaaaaaaaa

SEQ ID NO: 5135 - DNA, 980 bp, Homo sapiens
  SIMILAR (48)..(251): 691254mologous to Homo sapiens RNA polymerase II termination factor,accession number AF073771,Smith-Waterman Score=208.
ggcaatcccctcttctttttggaactgcactggaacccatcacttagaatccaagcttgtgaccgcatttaccgagtagggccagcagaaaggatgtttccatacccagatttgtttgtgggggaacggtagaagaaagtatcttacacttccaagaaaaaaagatagatttggcaaaacaatttctatcagggtctggagaatctgtcaccaagctcaccttgtctgacctcagagtccttattggcatctaccctcctgtggatagggtctcagaatagcaccattgctgctgatgatgggagaaccagttactaccttctctaacacaggctccatcctatctcttcatctcttcttgccagggatgttgcacctgtaaccatctttttatgggtggagcagagagtcaatccctgcagccaccctgcagccagccatctctgcagttctctcagtgcaggcagttcttcctctcaggctgaagatcaaaggagatgctttgtacatgaacagatgctgagtatctgttatcattgtattggttagtgtcagtgtatcatttagtatttgtatcactgtacccatttagtgttggatatcactcagtcatttaatattggttatcaccatacagcttaatatttgtatcatttggttcatgtattcgtttagtatttctaattataacatttcctatttgtaggatttgtataatatttgggtcatttttaatagtatttgtatttttacaaatttgcagtatttgtagcatttagtatcattgtttcatttagtatttggtacaattctaataaaatactaatccagtccaatactaatccaatccaatactaataatactattggtacaatccaatactaataatactattggtacaatccaatactaataatactaacagtagtattgatacaatctaataaataatgtgtttgacactgtagcagaaaaaaaa

SEQ ID NO: 5136 - DNA, 1417 bp, Homo sapiens
  SIMILAR (48)..(422): 791254mologous to Homo sapiens dJ30M3.3 (novel protein similar to C. elegans Y63D3A.4),accession number AL031775,Smith- Waterman Score=494.
attcggaacgaggagtcagtggacagttttaatgactgtttgtcctgctgcaggtgaatgtgtcaggaaatgagctttgccttatgacatcccatttggagagcaccagagggcatgctgcggaacgaatgaatcagttaaaaatggttttaaagaaaatgcaagaggctccagagtcagctacagttatatttgcaggagatacaaatctaagggatcgagaggttaccagatgtggtggtttacccaacaacattgtggatgtctgggagtttttgggcaaacctaaacattgccacgtatacattgggatacacaaactgaactcctaatcttgggaataactgcctgcttgtaaacttcgttttgatcgaatatttttcagaagcagcagcagaagagggacacattattccccgaagtttggaccttcttggattagaaaaactggactgtggtagatttcctagtgatcactggggtcttctgtgcaacttaggatataatattgtaaaatgctttttcaagtgtggggttttgcccctgattgttgcaaatacaatttccaccttctgggaaaggtaggtttgctgtggagggaaataatgtactaggatccattgtcacagaaaaaccaactatgatttatggttgtgttttcagaattcaacattaaagatttaatgtttatttaaacgaacacattcctgcattcaggatgtgaggccatttaataaaaagggcacaaagccctgtcagagagttttcaacgggtggctaaaagcttgccagctgggattcccaaacaggtcccccattggtctctgagctaatgtttatatttttccattcaggcaccgaaatagttaatatttaaaataagtcttcaaaagaaaacataagagattattgagttcttgggactggatcctttatttcataagttcagatcatcttaaatgaaaatgccatgattatctgcagttaagtagatgaccagcctatcccacatccagacctggatttttgtccagcccaattaccataattgggaaagcctataattgaaacccttatggccttaaaaatcccttaactcccttttgattccatgtttgtagtcatgttgtcaacagaggcaaagttaagcttgatgatggttaaaatcgggtttgatagcacccatgggacatttttctaccaaaaataaatgcatgaagagacatagccttttagttttgctaattgtgaaatgggaaatgctttacaggaagtaaatgcaaattacttttaagtgtgctttaaagaaaaatattttccccacaagagaaatttaaataaagaattttatttgtttatggtttgttttagtatgtttttgtgtccatgatgagattaaattttttatctgcttcct

SEQ ID NO: 5137 - DNA, 532 bp, Homo sapiens
  SIMILAR (193)..(273): 881254mologous to Homo sapiens profilin,accession number J03191,Smith-Waterman Score=122.
  misc_feature (1)...(532): n = a,t,c or g
ccgtntggcccccgttcccggnaaaacgttcgtcaacatcacgccagctaagtggntgtcctgntggcaangaccgntcaagttttacgtgaatggnctgacacttggggcccagaaatgttcggtgatccgggactcactgctgcaggatggggaatttagcatggatcttcgtacccaagagcaaccgcgctagtcctgctgatgggcaaagaaggtgtccacggtggtttgatcaacaagaaatgttatgaaatggccttcccacttcaggcgttcccagtactgacctcgtctgtcccttccccttcaccgctccccacagctttgcacccctttccnnnccatacacacacaaaccattttattttttgggccattaccccataccccttattgctgccaaaaccacatgggctgggggccagggctggatggacagacacctccccctacccatatccctcccgtgtgtggttggaaaacttttgttttttggggttttttttttctgaataaaaaagattctact

SEQ ID NO: 5138 - DNA, 456 bp, Homo sapiens
  SIMILAR (174)..(395): 671254mologous to Mus musculus putative,accession number AK014795,Smith-Waterman Score=240.
ggttagcatttcatttggagctgagaaaaatgttgtgagaagggtacatgacatttacactgttaggacaaatgctcagattctggaatcaatgtagtcttaaacagaagtgttactttgtggttatttttcctctgtagtgaaatatggttttgagtttgatttttcatatccaggaattgccacaagcagtctgtgagatccttgggcttcaaggcagtgaagttacaacaccagattcagacgttggtgaagacgaaaatgttgtcatgactccttgtcctacatctgcatttcaaagtaatgccttgcctacactctctgccagtggagccagaaatgacagcccaacacagataccagtgtcctcagatgtctgcagattaacacctgcatgatcactggtcttgcttttttgggaagagacactttggtgcaaccctttttcaagtactt

SEQ ID NO: 5139 - DNA, 1686 bp, Homo sapiens
  SIMILAR (244)..(1545): 951254mologous to Homo sapiens fetal liver non-specific cross -reactive antigen precursor protein,accession number J04539,Smith- Waterman Score=2172.
atgacccagttccctatggataaacgtcagggtcgttcccgatctgtggccatcaccaacactgccgtgactagtctagaatgggtgccatttcatgcatttgcaattcccagaagtacactggttagtcagcagaggctcagcacagaaagaggaaggacagcacagctgacagccgtgctcagagagtttctggatcctaggcttatctccacagaggagaacacacaagcagcagagaccatgggaaccctctcagcccctccctgcacacagcgcatcaaatggaaggggctcctgctcacagcatcacttttaaacttctggaacctgcccaccactgcccaagtcacgattgaagccgagccaaccaaagtttccgaggggaaggatgttcttctacttgtccacaatttgccccagaatcttaccggctacatctggtacaaagggcaaatgagggacctctaccattacattacatcatatgtagtagacggtgaaataattatatatgggcctgcatatagtggacgagaaacagcatattccaatgcatccctgctgatccagaatgtcacccgggaggacgcaggatcctacaccttacacatcataaagggagatgatgggactagaggagtaactggacgtttcaccttcaccttacacctggagactcctaagccctccatctccagcagcaacttaaatcccagggagaccatggaggctgtgagcttaacctgtgaccctgagactccagacgcaagctacctgtggtggatgaatggtcagagcctccctatgactcacagcttgaagctgtccgaaaccaacaggaccctctttctattgggtgtcacaaagtatactgcaggaccctatgaatgtgaaatacggaacccagtgagtgccagccgcagtgacccagtcaccctgaatctcctccatcattccttgcactctgctctatctttagaggtcactggttcaacgaagctgcccaagccctacatcaccatcaacaacttaaaccccagggagaataaggatgtcttaaacttcacctgtgaacctaagagtgagaactacacctacatttggtggctaaatggtcagagcctcccggtcagtcccagggtaaagcgacccattgaaaacaggatcctcattctacccagtgtcacgagaaatgaaacaggaccctatcaatgtgaaatacgggaccgatatggtggcatccgcagtgacccagtcaccctgaatgtcctctatggtccagacctccccagaatttacccttcattcacctattaccgttcaggagaagtcctctacttgtcctgttctgcggactctaacccaccggcacagtattcttggacaattaatgaaaagtttcagctaccaggacaaaagctctttatccgccatattactacaaagcatagcgggctctatgtttgctctgttcgtaactcagccactggcaaggaaagctccaaatccatgacagtcgaagtctctgggccgtacaagcccatggcccaaatcttcagctgcagagctgagacagaacatgggatacctggcatcccttaccttcttccagtccactgcaatgtctactggcatggcccatttacccctgaggacacccatctgctgacccatagtttctaa

SEQ ID NO: 5140 - DNA, 775 bp, Homo sapiens
  SIMILAR (176)..(571): 441254mologous to Homo sapiens gamma-G globin,accession number X55656,Smith-Waterman Score=173.
  misc_feature (1)...(775): n = a,t,c or g
gacactcgctttttggaacgtctgaggttatcaataagctccgtagtccagacgccatgggtcatttcacagaggaggacaagggtactatcacaagcctgtggggcaaaggtgaatgtggaagatgctggaggagaaaccctgggaaggctcctggttgtctacccatggacccagaaggttctttgacagctttggcaacctgtcctctgcctctgccatcatgggcaaccccaaagtcaaggcacatgggcaagaaggtgctgacttccttgggagatgccataaagcacctgggatgatctcaaggggcaccttttgcccaagcctgaagtgaactgcacttgtgacaaagctgcattgttggatcctgaggaactttcaagcttcctgggggaaatgttgctgggtgacccgtttttgggcaatcccattttcgggcaaaagaatttcacccctgaaggttgcaaggctttcctggggcagaaagatgggtgacttggagttggccaagtgcccttgttccttccagataccactgaagctcaattgcccatgaatgcagagcttttcaaggatatggctttattcttgcaagcaattacaaataataaatctatttctgctaagagatcaccaaannnnnatnntnnnnnnncccccggattttttatttagcgggccgcacctttttccccttttagggggggtaaatttatattgggccttgggccggggttttcaaaagcggggggannnnnnnnnnaaagagccc

SEQ ID NO: 5141 - DNA, 1160 bp, Homo sapiens
  SIMILAR (281)..(679): 451254mologous to Homo sapiens profilin,accession number J03191,Smith-Waterman Score=157.
  misc_feature (1)...(1160): n = a,t,c or g
gatttttaaaattgcatttgcaaagttcggtgtctgggctggcgagtgggggagggagggaatggggagcaggaagtggagtgcgagggctgctgcacagcgagcggagccgcggtccggacggcagcgcgtgccccgagctctccgcctccccccggcccgccagccgaggcagctcgagcccagtccgcggccgccagcagcagcgcccgagagcagccccagtagcagcgccatggccgtgttggaaccgcctacatcgacaacctcatggcggacgggaccctgcgtgacaggcgccatagtgcgctatcaagactctgaacctccagtctgggcacgccgtccccgggaaaacggttcgtcaacatccacgccagcttgaggtgggttgtccttggttggcaaagacccggtcaagttttttacggtgaatgggcttgacactttgggggggccagaaaatgttcggtgatccggggactcacttgcttgcaggatggggaattttagcaatggatcttcgttaccaagagccacccggtggggcccccacctttcaatgttcactgttcaccaagactgaacaaagacggctaagtcctggctgatggggcaaaggaaggtgtccacggtgggttgaccaaacaagaaatgttatgaaatggcctcccacctttcggggtttcccagtactgaccatcgtctgtcccttccccttcaccgctccccaacagcttttgcacccctttcctccccatacacacaccacccatttttattttttgggccattaccccataccccttattgctgccaaaaccacatggggctggggggccagggcttgatgggacagacaccttcccctacccatattccctcccgtgtgtggtatggaaaacttttgttttttggggttttttttttttctgaataaaaaagattctcctacccnnnnnnnnnnnnnnnnnnnnnngggggggcccttttaaaaaaacccctgggggggccaaaattaaccgggggagggaaagaaaaaatttttccctaaaaggggggccaaaaaaaacccacctgggaaattttggaaaaaaacctttctttggggggggaaaaaaatgggccaaaccccccaaaaaaaattaaagccttaaggg

SEQ ID NO: 5142 - DNA, 407 bp, Homo sapiens
  misc_feature (1)...(407): n = a,t,c or g
gggccaccaggcatgggcgcccaaggctggcggatttttcagnnnnnnnnnnnnatnnnnnnnnnnnnnnnnnnnnnnnnnnnnnnnnnnnnnnnnnnnnnnnnnnnnnnnnnnnnnnnnnnnnnnnnnnnnnnnnnnnnnnnnnnnnnnnnnnnnnnnnnnnnnnnnnnnaggaaaaccttcttctttttaaaatgctctctatataaacaaaaactgtggtggataagtgtggccatacacagaagtctctctagaaaggtaatcctatcaagcgtttttataaaaaagcaaagtgatttttatcagcttccttttttcaataaaagctgttttaaggaagtattcagtatttctgtatattcaatggaaacaaacacatggaatctgtactactcatatacaat

SEQ ID NO: 5143 - DNA, 1787 bp, Homo sapiens
  SIMILAR (1)..(183): 611254mologous to Plasmodium vivax pva1,accession number X92485,Smith-Waterman Score=177.
gaatcttcctgcctcagcctcccaagtagctgggaccacaggcatgggcgaccatggctggctgatttttcagtttttttttttatagaaacagtctcacaatgttgcctaggctcggtctcaaactcctggcctcaagcaatccttccgccttggcctcccaaagtgctgggattacaggcgtgagccactgtgcatggccaggaaaaccttcttctttttaaaatgctctctatataaacaaaaactgtggtggataagtgtggccatacacagaagtctctctagaaaggtaatcctatcaagcgtttttataaaaaaagcaaaagtgatttttaatcagcttccttttttcaataaaaggctgttttaagggaggtattcagtatttctggtatattcaatggggaacaaacacaggggatctgtactactcatatacaatgacattaggaaagggtttagctaaattcttgtgtggcaaaatcacaaggtttatcgtttatcaaggaagacctttcatgtacattatcagagtgtgcacctgaattaccaagggctttacctttcatggggagaaaaggacagattccctgccttattcatttgcctctagattttgagatctaaatgccgggttccactttaagggtgctaccatgatgaggcaactgttacttatttgcagtcctaaatgaattgccagctggggaagtcaccaagcaggtttccttgagctctgggcttgccaaaaacacaactcagggaaaccaatcaagtacgtttttcttctcttctctttttaaaaggattgctaatccttaaggataaattataattttaatgaaagtcctttttttcaatactaagaaacaacaagtgttccagaaaggaaatctgtctcatcatgtgttactttctgttactttcaaattagcagtcactcaatgcaagaacttatcaagttcgatttctctcatttatgctagcttcctcatgaataacataattgcttttacaaaaaaatgtagttttcaaaagaaattaaaatataagatttaacaaagaaattatttctcaaaactttttttaaaaaggccctcataatcggatcctcaaataccgtgtgcaaaaccagaggatttaaaatgtttcttaagatctcatcagcccctttctaacattttctctctcctcttgccccgtatcctacacaatggactgtgtatggatgaaaattttctctgaaagaataaataagttttcttttgattaaagacaagtggaaactttatactcaaactcagaaaactagagcataatgaatcattcccagatcaattttaaaaatagatttattcaagaatgacatttctctcaaaaaaaatgttaaattgtagacatatagctgccttcattgctaaactgtgcaaacatcaaggatgactttcggtgtatctctgtcaccgtgtttattgaatctataaaaacaacaagcatctctcctctcccttaagctcaccaggcttttctttgaagtcacctctctcccccaccaatctttgactactaaattcagagatggtcctttgctgtttgaagctctgaattactacttatagacagtatttcttctcagtcaattcctacccacaaaccatccatcttaagcggcatcagtacctcctcctcaatcacttttcacacatgttctaccctagaagtcagctacgtatagaaggtaataatacatgaataggaactggtttcctctaggctgtatgtac

SEQ ID NO: 5144 - DNA, 621 bp, Homo sapiens; identical to SEQ ID NO: 1161
  SIMILAR (263)..(379): 741254mologous to Mus musculus putative,accession number AK012063,Smith-Waterman Score=159.

SEQ ID NO: 5145 - DNA, 798 bp, Homo sapiens
  SIMILAR (1)..(414): 681254mologous to Mus musculus putative,accession number AK012063,Smith-Waterman Score=449.
catcctgtccggttttttgtacatagagggccccatgtgatttctccttggaagtggtgagccagtggtacgagctggtggtgtttacagcaagcatggagatctatggctctgctgtggcagataaactggacaatagcagaagcattcttaagaggagatattacagacagcactgcactttggagttgggcagctacatcaaggacctctctgtggtccacagtgacctctccagcattgtgatcctggataactccccagggggcttacaggagccatccagacaatgccatccccatcaaatcctggttcagtgaccccagcgacacagcccttctcaacctgctcccaatgctggatgccctcaggttcaccgctgatgttcgttccgtgctgagccgaaaccttcacccaacatcggcctctgactgggaccacaggcggaaccctaggagagccgaatcagtgtttgtgaaagaggcaggactggcccagagtgacagacatacggtgatccaggaggctcaaagagaagccaagtcagctttgttgtgatttgattttttttaaaaaactcttgtacaaaactgatctaattcttcactcctgctccaagggctgggctgtgggtgggatactgggattttgggccactggattttccctaaatttgtcccccctttactctccctctatttttctctccttagactccctcagacctgtaaccagctttgtgtcttttttccttttctctcttttaaaccatgcattataactttgaaaccaaaaaaa

SEQ ID NO: 5146 - DNA, 1484 bp, Homo sapiens
  SIMILAR (74)..(727): 671254mologous to Mus musculus putative,accession number AK012063,Smith-Waterman Score=652.
  misc_feature (1)...(1484): n = a,t,c or g
gtggaattcggcggagctgggccgcgggggccccggggccggcggtgccggggtcatcgggatgatgcggacgcagtgtctgctggggctgcgcacgttcgtggccttcgccgccaagctctggagcttcttcatttaccttctgcggaggcagatccgcacggtaattcagtaccaaactgttcgatatgatatcctccccttatctcctgtgtcccggaatcggctagcccaggtgaagaggaagatcctggtgctggatctggatgagacacttattcactcccaccatgatggggtcctgaggcccacagtccggcctggtacgcctcctgacttcatcctcaaggtggtaatagacaaacatcctgtccggttttttgtacataagaggccccatgtggatttcttcctgggaagtgggtgagccagtggtacgagctggtggtgtttacagcaagcatgggagatctatgggctctgctgtgggcagattaaactgggacaatagcagaagcattctttaaggagggagatatttacagacagcctgcacctttggagttggggcagctacatcaagggacctctctgttggttccacagtgacctctccaagcattgtgatcctgggataactccccaggggcttacaggagccatccagggtacgggggaaggtgacaatgccatccccatcaaatcctgggtttcagtgaccccaagccgacacagcccttctcaacctgctcccaatgctggatgccctcaggttcaccgctgatgttcgttcccgtgctgagccgaaaccttcaccaacatcggctctggtgacaagctgctccccctccacctgagttggggtggggggggaaaagggagggcgagcccttgggaatgccgtctgatgccctgtccaaatgtgaggatctgccgtggcagggtctgcccctcccacccctctctgcccctggggancccctacactccacttgggagtctggatggacacatgggcccaggggctctgaaacaaccctcactcctttaactttcgtgttcacactcccatggaaacccccagactgggaacacaggcgggaagccctaggagagcccgaatcaggggttggtgaagaggcaggactggcccagagtgacagacatacgggtgatcccaggaggctcaaagagaagccaagtcagctttgttgtgatttgattttttttaaaaaaactcttgtaccaaacttgatctaaattcttcactcctgctccaaagggctgggctgtgggtgggatactggggatttttgggccactgggattttccctaaatttgtccccccctttactctccctctatttttctcgtccttagacgtccctcagacgctgtaaccaggctttgtgtcttttttcccttttctctcttttaccccatgcattataactttgaaaccaaaaaaaaaaaaaaaaaaagc

SEQ ID NO: 5147 - DNA, 465 bp, Homo sapiens
  SIMILAR (3)..(41): 611254mologous to Homo sapiens Human secreted protein encoded by gene 44 clone HTDAD22,accession number AAY02693,Smith-Waterman Score=42.
  misc_feature (1)...(465): n = a,t,c or g
tgaggcagagtctcgctctgtcccccaggctggagtgcagcggcccgatcttggctggctgcatgctccacctcccaggttcatgccattttcctgcttcagcctcacaagtagctgggacgacacacgcccgccaccacacccagctaattttttgcatttttagtagagaatggtctgtgttagccaggatggtctcgatctcctgaccttgtgatccgcctgccttggcctcccaaagtgctgggattacaggcgtgacaaccngcacctggcctattcagggaaggtttcaagcagaaagatgaactgagttggcttttggaagangattcacaaggacttcccacaggcagaattgaaataagggcattctagatggacaaagggcacagattgagcagcaatgggggacagtgttgactgggggacgctgaggggctgctgtggctggaatggagggct

SEQ ID NO: 5148 - DNA, 1468 bp, Homo sapiens
  SIMILAR (87)..(425): 521254mologous to Homo sapiens Human secreted protein, SEQ ID NO: 7878,accession number AAG03797,Smith-Waterman Score=266.
accatttatttaaaagatcttcctcctcccactaaattgcagtaggactttagtaataaatcagaggacagtatatgtgggggcctgtctcttcctctctattctgttccatgggctatcttgtttttgggtttttttcttttattttttttttttgtgatgaagtcttgctcttgtcaaccaggctggagtgcaatggcacaatctcgggttcactgcaacctctgcctcccgggttcaagccattcccctgtctcagcctcccgagtagctgggactacaggtgcccgcaacaaggcccggctaatttttttgtatttttttttagtagagatggggtttcaccacattagccaggatggtctcgatctcctgacctcgtgatccgcccgccttggcctcccaaagtgctgggattacaggcgtgacaacctgcgcctggccagaccattttagaattgggaaattttagtgagaaaaaatgcactgtaaatatgctttagttttaattcagttgggatgcactacctagcgaaaattgagaaactatatacttctcagagaaatatctgacatctattgtcattccattgctattttttttccccagagacttccataatttaaaataaaatcctagatccaagttcttgttttttggcataaatacttaatctattttaaatttataaaatctgagcttctaggatccagcttgtgtcaaccctttatttagcatatataactataaatcacttattacagatgctaaatagatcaccttttacagatgctgaaaatgtttggggatatgtttgttgacaagggtaaatgggaaatgaggaaactttattacttcagttttcaggatatatgggatctaggatcccaaataaatggattaatcttcattggtttctcaaattcaggttgaaatacaaattaatagcctttattgattttacttttatgagtcattgtagacatctataaatataaacagggcctgtacccaaaggatgccagaatactaggtatttttatttatcgtaaacataccacgagtgctgttgccactaccatctatttgtttgtaaataaaaagtgtttgttttcaaagccatctttaaatagttctttaaaaataggtcttttttttatattttggaaaaggcattgtttttaaagtaaagataaaatgggtaaagtcccctaattgtatttacctgtaatatccttataacatgcagatgaatgctttataagttaaatatgatgtattttttcatacttctggattatactataattcatatgaaatcttgatattagtccccacacggaaaaagtgaactgcagttgatatttggtgtttaagatagcaccattgtttaaataccgcctatgtactcccaaatgaataaaacataattccccgtcctctgagagcaaaaaaaagtcgacgcgg

SEQ ID NO: 5149 - DNA, 1498 bp, Homo sapiens
  SIMILAR (4)..(645): 701254mologous to Homo sapiens ZXDA, ZXDB (zinc finger X- linked protein),accession number AL031115,Smith-Waterman Score=765.
agctgtggctggaccttcaccagcatgtccaaacttctaaggcacagaaggaaacatgacgatgaccggaggtttacctgccctgtcgagggctgtgggaaatcattcaccagagcagagcatctgaaaggccacagcataacccacctatgcacaaagccgttcgagtgtcctgtggaaagatgttgcgcgagggtctccgctcgtagcagtctgtacattcactctaaaaaacacgtgcaggatgtgggtgctccgaaaagccgttgcccagtttctacctgcaacagactcttcacctccaagcacagcatgaaggcgcacatggtcagacagcacagccggcgccaagatctcttacctcagctagaagctccgagttctcttactcccagcagtgaactcagcagcccaggccaaagagagctcactaacatggatcttgctgcactcttctctgacacacctgccaatgctagtggttctgcaggtgggtcagatgaggctctgaactccggaatcctgactattgacgtcacttctgtgagctcctctctgggagggaacctccctgctaataatagctccctagggccgatggaacccctggtcctggtggcccacagtgatattcccccaagcctgggacagccctctggttctcgggacagcagccacggttctgcagcagggcagcttcagtgtggatgacgtgcagactgtgagtgcaggagcattaggctgtctggtggctctgcccatgaagaacttgagtgacgacccactggctttgacctaccaatagtaacttagcagcacatatcaccacaccgacctcttcgagcaccccccgagaaaatgccagtgtcccggaactgctggctccaatcaaggtggagccggactcgccttctcgcccaggagcagttgggcagcaggaaggaagccatgggctgccccagtccacgttgcccagtccagcagagcagcacggtgcccaggacacagagctcagtgcaggcactggcaacttctatttggtatgaagcactctattcagtcaccaccatataggtcacttctctcatactcggtcttgaggatattctggattaatccctttcctatgccagacgtttctggtttaacaaaaggacgcagccccggactacaagtctggaactgacaagttccttatgacccttgacaaatcacccttaaccccatctgagccttaaattctcatttatttcctgcataaggagatttggctaaatgctttctgaggtcctttggagtcctgtggctccatggtaatgtgctcctttccttgaagattgggggttttgtaatgttgagatactttgcctctatgcttgtcagctcatgaccagtcctagaagaggagtcgagacataagccaccttcagaggttcaatggaaactttaaaaccataccaaactcttttttaaaattagaattaacaagaaaaaaaaa

SEQ ID NO: 5150 - DNA, 484 bp, Homo sapiens
  SIMILAR (34)..(192): 541254mologous to Homo sapiens Similar to DKFZP727C091 protein,accession number BC006271,Smith-Waterman Score=167.
agctctgatgacgatttggatgaatatacccttagaaaaaatgtggcagttaactgtagtactgaatggaagtggcttgtagacagagcacgagttggcagccgatggacttggcttcaagctcagatttcagacctagaatgcaaaatccaacaactaacagacattcacaggcaaattcgtgcctccaaggggatagtggtcctagaagaatgtcagcttccaaaagatattttgaaaaaacaaatgcaatttgcagaccaagcagcttcactaaacattctagggaatcctcaggttccccaggagtgtcaagatcctgtaccggaacaagattttgaaatgtcaccaagcagccctactttacttcttcgaaacatcgaaaaacaggtaaagtcaaagtaaggatatcagtggtatgaaatgacttttcattgattttgtaaactattcaaataaacatcattatatgtgaaaaaaaaaa

SEQ ID NO: 5151 - DNA, 637 bp, Homo sapiens; identical to SEQ ID NO: 490
  SIMILAR (47)..(412): 991254mologous to Homo sapiens gamma-G globin,accession number X55656,Smith-Waterman Score=637.
  misc_feature (1)...(637): n = a,t,c or g

SEQ ID NO: 5152 - DNA, 1852 bp, Homo sapiens
ttaatcttttaaaaggccctgataggtctggcctcttccatagttctcttgcctcatcttgcatgatgctttcccttgtctcatcttgcatgatgctttcccttgttctctgtgttctgtaactggatctctggtcctcagtcgagttcctctacgaggaacacaccagaaatctgccatcgccacctccacaaaaattgctctcagcaatatgaaatcctcaaacatcatactgatgcttactttaagaagcagcagctgtttttcgatgtttcgaagaagtaaagtagggctgcttggtgacatttcaaaatcttgttccggtacaggatcttgacactcctggggaacctgaggattccctagaatgtttagtgaagctgcttggtctgcaaattgcatttgttttttcaaaatatcttttggaagctgacattcttctaggaccactatccccctggtccagaggggagcccactgtcctgaagggagagactcaggactggcagcattcaccaaaagctgactgaagaagccttgggcctttagtaaacattggccgtagacaggcagtacttgctgtggccctggggcagtggtggccatgggaagggactgctctacaactgtctgatcttcaacaaacactgccacattttttctaagggtatattcatccaaatcgtcatcagagctgctatcagttgcatcggaatccaaaccctcttcaacatgagacaacagccctgtagcagaaaatgcaaatctttggatttccgcagctgtacaccgtgcaaagccattttttgcatcatcccacaatttattctctgcagtcaatgtgttaacttctggcttaatttcagtgcatttaggtaaactattacccaaaattgtggtaggttcatgaaatgtcttcattttggggagttgatgtttcatagacaatttcatctgctgaccatagtgcttaacaacatgctttgccaggagcatctgcaaatgtttctgagttcttctagcctggctaagtaaaattttctgtttgcttacacaatgaagtaaacgagcatgtacttcctcctctttttcagcagctgaagaactaacaggcacatttgagtggccaggtacaattttgttttgagtacagtgcaataaaccctttttaatctcagcatcagtaactttatccaaaagtgcattctcttgataccatttacagttttgtagttgtactttatctacattagtgtctttggttatatttgaatccagaataatttgtacatctttcatgcactggctcgtggtatctgatagaggctcctttttgatgaactcttcagaatgagaaagacagattttactgagctgaatgttgctgccattatacagtatgtttttcagcttattgcaactgggctcccctaatttcttttgtttataattctcattgtgtttatttaatgtagaattagctctcattaaaaaaacagtctggtaatgttttgaagactgaggggagccaaaatgttttaaattcacaaaattagtattaagagtaggttcaggagttggaaatccaagcatctgagaaaaggtgtctccctttagcttttcatctacagttctgggactttccatgtagagcatcttgtcagactccatggtacttggcaaagatgaaaagctgataccctttgctgttgcctccctcagagctggggtcatggcgattcctgtagataagtattggaaacctgctggggcgccctggctcccctccgccgccgcaccttcggtccggccgtggtgggggctgctgaggtgatctctagctgccacgaaa

SEQ ID NO: 5153 - DNA, 384 bp, Homo sapiens
  misc_feature (1)...(384): n = a,t,c or g
ccctcttctcaaatnnnnnnnnnnnnnnnnnnnnnnnnnnnnnnnnnnnnnnnnnnnnnnnnnnnnntacagggaagcccaccaagtaaggaaccaaggcctgccaatggctgtgtaagtgacccgtttcagaaatatccnnnnnnnnnnnnnnnnnnnnnnnnnnnnnnnnnnnnnnnnnnnnnnnnnnnnnnnnnnnnnnnnnnnnnnnnnnnnnnnnnnnnnnnnnnnnnnnnnnnnnnnnnnnnnnnnnnnnnnnnnnnnnnnnnnnnnnnnnnnnnnnnnnnnnnnnnnnnnnnnnnnnnnnnnnnnnnnnnnnnnnnnnnnnnnnnnnnnnnnnnnnnnnnnnnnnnnnnnnnnnaagcctgggtgaatgaaaccttg

SEQ ID NO: 5154 - DNA, 1416 bp, Homo sapiens
  SIMILAR (539)..(694): 571254mologous to Homo sapiens Human secreted protein, SEQ ID NO: 4433,accession number AAG00352,Smith-Waterman Score=162.
  misc_feature (1)...(1416): n = a,t,c or g
gctttcctgtcttctctgtgaatataatccatatattagactgttcacaatgtaccaaaggacactgagggcacattcaatttcttttttttttccagcttttcccttactgtgcttctactgtgctttttctcctgcagtgtataatgtgctgtcaggcttatcatgaaaatttcttatttcggttgtatcttaatctttagaagttccacttggttttctgttgtatctttcctttatcttattatattcatgctttcctttaagtaatagagttcttctttgccatcgagatccatttctatcatttctggatctgtttctattgcctgctttttctcctgattatgtacagtttttgtttctttgatgccacacaattttctattagacattagacattgtgaatgttacactgtaaatgcctggatttttttttttttttttttttttttgagacaaggtttcattcacccaggcttgaggcttgagtgcagtggcatgatctcagcttactgcagcctcaacctcctggactcaggtgagaggaactacaggtacatgccaccatgcctggctagttttcatattttctgtagagacagggtttcaccatgttgcccagcctgatcttcaactcctgcctgcctcggcctcccaaagtgctaagattacaggtgtgagccgccatgcctggcctggaggatatttctgaaacgggtcacttacacagccattggcaggccttggttccttacttggtgggcttccctgtaaggctgcttgagtgttctcttgacatgacagctggcttcctccagagtgagtaatttgagaagaggcaaggtggggggccataatgccttttatgacctagtcttagaaaatgacaacactttcatctccacaatgtcctactggctacacaggtaaaaccctattcaatgcaggaaggnnnnnnnnnnnnnnnnnnnnnnnatttgagaagaggcaaggtggggggccataatgccttttatgacctagtcttagaaaatgacaacactttcatctccacaatgtcctactggctacacaggtaaaaccctatnnnnnnnnnnnnnnnnnnnnnnnnnnnnnnnnnnnnnnnnnnnnnnnnnnnnnnnnnnnnnnnnnnnnnnnnnnngacacaatgagtaaactttccctacatataaataagaaagtgacagaaaaataattttgctcctgagaaaaattttctaatgaatacacatatatttgttcaaattctcaagttatttgactctgccaaattttcctctttctttataggtcacgttatcatactccagagattggaaaggggagatatttatttagtaagttggagactatagattaatttcttaccccacgcgtccgcccacgcgtccg

SEQ ID NO: 5155 - DNA, 658 bp, Homo sapiens
  SIMILAR (15)..(404): 551254mologous to Homo sapiens dJ447F3.4.1 (novel protein similar to synaptotagmin 1 (SYT1, P65) (isoform 1)),accession number AL050348,Smith-Waterman Score=280.
ctttggcgggaaggccccaagtggaaccagctcgcctgaatgaatctaccactttcgtgtcggtatctcgacccaccatagcctgtggtatggttggcaccatagtaagattctacatcaagtcaccaccacctctttaagtatgcagctgaccccagggataagcactggctgggctgagcagcatcacatgcgggcaacagggggccaagatggcctacctcctcatcgaggaggacattccgggaccttgcggcccagtgatgattacagaggatgccctggatctgaagctagagggaattgaaatccctttgtccctaccctcctggatggtggagaagatgagaaagtatatggagacactacggacagagaatgagcatcgtgctgttgaagcaccttccacagacctgaggccgggtccccctggccacacttggcagccttccttccaaaagccctcttcctacaacgtggctgaggccaccgctgggactgctcctagatggatctcagcgggcattaagctgtgcctgagcgagtttgtagtgactcgactgcacagcacccccagactagcatgtggttctatatttgtaaagttattgggataagaaacaattaaacagtttgtagtaaacacaaaaagtcgacg

SEQ ID NO: 5156 - DNA, 1256 bp, Homo sapiens
  SIMILAR (1)..(636): 991254mologous to Bacillus amyloliquefaciens precursor (AA - 29 to 443),accession number X52988,Smith-Waterman Score=1116.
gtcggcgacaactcaatcgacagctggaaaaacgcgggccgtgtctttaaagacagcgataagttcgacgccaacgatccgatcctgaaagatcagacgcaagaatggtccggttctgcaacctttacatctgacggaaaaatccgtttattctacactgactattccggtaaacattacggcaaacaaagcctgacaacagcgcaggtaaatgtgtcaaaatctgatgacacactcaaaatcaacggagtggaagatcacaaaacgatttttgacggagacggaaaaacatatcagaacgttcagcagtttatcgatgaaggcaattatacatccggcgacaaccatacgctgagagaccctcactacgttgaagacaaaggccataaataccttgtattcgaagccaacacgggaacagaaaacggataccaaggcgaagaatctttatttaacaaagcgtactacggcggcggcacgaacttcttccgtaaagaaagccagaagcttcagcagagcgctaaaaaacgcgatgctgagttagcgaacggcgccctcggtatcatagagttaaataatgattacacattgaaaaaagtaatgaagccgctgatcacttcaaacacggtgaatgaaggcaaggaggagcctggaagacctgcaggggaggtctccatgggatgccttgcttctgagaagggaggcaaaagcagcaggtcaccagaagaccctgagaaacttccgatagccaagcctaataatgcctatgaatttggtcagattataaatgctctcagtaccaggaaggataaagaagcctgtgcacatcttttagccatcactgcaccaaaagatttgccgatgtttttaagtaacaaacttgaaggggatacattccttctcctcattcagtctctgaaaaataatcttattgaaaaagatccctcattggtgtatcagcatcttttatacctgagtaaagcagaaaggtttaagggattttgccgatttcggaaccaccatcaaacaggattttcgcctgctggggcaaaccagcgtggaccgcttgctgcaactctctcagggccaggcggtgaagggcaatcagctgttgcccgtctcactggtgaaaagaaaaaccaccctggcgcccaatacgcaaaccgcctctccccgcgcgttggccgattcattaatgcagctggcacgacaggtttcccgactggaaagcgggcagtgagcgcaacgcaattaat

SEQ ID NO: 5157 - DNA, 2481 bp, Homo sapiens
  SIMILAR (10)..(1197): 861254mologous to Homo sapiens infertility-related sperm protein,accession number AF311312,Smith-Waterman Score=1749.
ggggcggccggcaaggggcgcgccgcagcggggccagaccccggaggccggcgcggacaagcgagccacggcgggcctctgcggcggcggcggcgggcggcggcgccaccgggcatccgggcggcgggcagggcgcggagaaccctgccggcctgaagagccagggccaacgagctgttccgaagcgggcagttgcccgaggcggccggcaagtactcggcggcaatcgcgctcctggagccagcaggaagtgaaattgcagatgatctaagtatcttatattcaaatagagcagcatgttacctaaaagaaggaaactgcagtggctgcattcaagattgtaacagggctctggaacttcatccattctctatgaaacctcttctgaggcgggcgatggcctatgaaactctagagcagtatgggaaagcttatgtggattataaaacagtgttgcagatagactgtggactccagctagcaaatgacagtgttaacaggctatcaagaattttaatggagctggatggaccaaattggcgggagaagctgtcacttattcctgctgtgcctgcttctgtgccactgcaagcttggcatccggcaaaagagatgatctcaaaacaagcaggagactccagcagccatcgccagcagggcatcacagatgaaaaaacatttaaagcccttaaggaagaaggaaatcaatgtgtaaatgacaaaaactataaagacgccctcagtaaatacagcgaatgcttaaagattaacaataaggaatgtgccatatatacaaacagagctctctgttacttgaagctgtgccagtttgaagaagcaaagcaggactgtgatcaggcacttcagctagctgatgggaacgtgaaagccttctatagacgagctctggctcataaaggactcaagaattatcagaaaagcttaattgatctcaataaagttatcctactagatccaagtattattgaggcaaagatggaactggaagaggtaactagactccttaatcttaaggataagacagcaccattcaacaaagaaaaggagagaaggaaaattgagattcaagaggtgaatgaaggcaaggaggagcctggaagacctgcaggggaggtctccacgggatgccttgcttctgagaagggaggcaaaagcagcagggtcaccagaagaccctgagaaacttccgatagccaagcctaataatgcctatgaatttggtcagattataaatgctctcagtaccaggaaggataaagaagcctgtgcacatcttttagccatcactgcaccaaaagatttgccgatgtttttaagtaacaaacttgaaggggatacattccttctcctcattcagtctctgaaaaataatcttattgaaaaagatccctcattggtgtatcagcatcttttatacctgagtaaagcagaaaggtttaagatgatgttgacactaattagcaagggccaaaaggagctaattgaacagctgtttgaggacctttcagacacaccaaacaaccattttactttagaagatatacaggccctaaaaaggcagtatgagctttaaatcaagataattgttagatttcttccatgcatgtatgtgttccaggaatgttaatgagatggtattgtaaaagagttgcatggataaaacttgggcctagaaaagtttggtctgcactataaaacattttacttattttcctacatagaacatgtatattctacaatctgctttttattagttgtaaatattttcttatgtaccagaaccaaataagtatatttagaacttgttaaaaatacattttaatttatgatatacatattattttaattacttgttaaaattttgagttaagttgcatttctttgggctatgaaggagtcctcttaagtttgatagaaatgaatttcttgtaacattcttttttaaaagtggaagtcattaacagtgattattatatcacttatatcctgctaagatacacataaatccccatttggtactagtacctgtggattaccagtccggttaaaatgaaatgcaacactggaagtcttataaccatgaaatgattattaaattgtttattaatttagagctataagaggaacttattttttctaatacggaagcattgcctaataattaagaacaaaaattgccaaaaatttctaccactttttactagattttaaaaagctactttcttttatattgcctatataagcaaaaaaccaaccactgtattaaagcaaactaagcctgcatttatatctgaattattacctccatattttaccaaacatttgaatgtcccccttcccccttttttgttttctgcttttatgactgtatttattcctttactgtaaaagaatatgaagaactcatacatgttgaaagctcctttgttgactgggtcaaagtgaaggaatttcaatctc

SEQ ID NO: 5158 - DNA, 454 bp, Homo sapiens
  SIMILAR (1)..(201): 831254mologous to Homo sapiens Chimeric acid/basic fibroblast growth factor,accession number AAW01746,Smith-Waterman Score=290.
atggccgagggcgaaattacaacattcaccgccctcaccgaaaagtttaatctgcctcccgggaattacaagaagcccaaactcctctactgcagcaacgggggccacttcctgaggattcttccggatggcacagtggatgggacaagggacaggagccgaccagcacattcagctgcaactcagtgcggaaagcgtgggggaggtgtatataaagagtaccgagactggccagtactttggcaatggacaccgacgggcttttatacggctcacagacaccaaatgaggaatgtttgttcctggaaaggctggaggagaaaccattacaacacctatatatccaagaagcatgcagagaagaattggtttgttggcctcaagcggtcctcggactcactatggccagaaagcaatcttgtttctccccctgccagtctcttctgattaataa

SEQ ID NO: 5159 - DNA, 153 bp, Homo sapiens
  SIMILAR (1)..(117): 921254mologous to synthetic construct acidic fibroblast growth factor,accession number A00069,Smith-Waterman Score=200.
tttaatctgcctccagggaattacaagaagcccaaactcctctactgtagcaacgggggccacttcctgaggatccttccggatggcacagtggatgggacaaggatggacaccgacgggcttttatacggctcacagacaccaaatgaggaa

SEQ ID NO: 5160 - DNA, 531 bp, Homo sapiens
  SIMILAR (1)..(186): 931254mologous to Sus scrofa acidic fibroblast growth factor,accession number X60317,Smith-Waterman Score=308.
atggctgaaggggaaatcaccaccttcacagccctgaccgagaagtttaatctgcctccagggaattacaagaagcccaaactcctctactgtagcaacgggggccacttcctgaggatccttccggatggcacagtggatgggacaagggacaggagcgaccagcacagtggtcttaattattcatggaccatgcaccagaggttgcaggctctaagaacaaatgaccacttcgctggtgctcacgctgtaccctcagatgcacaggtaatggggatggacgctggcgtttacacgaggaaaccaatacctacctccaccaccatcacattgcaaacgaccaaaagcacatatgttcatgatgctttgttcagagctggcccgaaaatgaatccatatgagagtcacgtgacaggagctggctatgagacttacttaagacagcaatgggaatgtccccaggttaataaactagagcatgttcaaaacagagcagggaactaccaacctcttccttctaagaagatctga

SEQ ID NO: 5161 - DNA, 513 bp, Homo sapiens
  SIMILAR (294)..(482): 981254mologous to Homo sapiens Chimeric acid/basic fibroblast growth factor,accession number AAW01746,Smith-Waterman Score=344.
cagcagactcttgggggattccttagtgagtgagttcactgctcaaagaagggctttgccacttctgcagggaagccagccacgggccagcagtcttgaaagcgccacaagcagcagctgctgagccatggctgaaggggaaatcaccaccttcacagccctgaccgagaagtttaatctgcctccagggaattacaagaagcccaaactcctctactgtagcaacgggggccacttcctgaggatccttccggatggcacagtggatgggacaagggacaggagcgaccagcacacagacaccaaatgaggaatgtttgttcctggaaaggctggaggagaaccattacaacacctatatatccaagaagcatgcagagaagaattggtttgttggcctcaagaagaatgggagctgcaaacgcggtcctcggactcactatggccagaaagcaatcttgtttctccccctgccagtctcttataattccagagatctgttctgggaaggag

SEQ ID NO: 5162 - DNA, 757 bp, Homo sapiens
  SIMILAR (78)..(389): 481254mologous to Homo sapiens gamma-G globin,accession number X55656,Smith-Waterman Score=180.
  misc_feature (1)...(757): n = a,t,c or g
gacactcgctttttggaacgtctgaggttatcaataagctcctagtccagacgcccatgggtcatttcacagaggaggacaaggctactatcacaagcctgtggggcaaggtgaatgtggaaagatgctggaggagaaaccctgggaaggctcctggttgtctacccatggacccagaggttctttgacagctttggcaacctgtcctctgcctctgccatccatgggcaacccccaaagtcaaggcacatggcaagaaggtgctgacttccttgggagatgccataaagcacctgggatgatctcaagggcacctttgcccaagctgacgtgaactgcacttgtgacaaagctgcatgtggattcctgagaacttcaagctcctgggaaaatgtgctggtgaccgttttgggcaatcccattttcggcaaagaattcacccctgaaggttgcaaggcttcctgggcagaaagatgggtgacttggagttggccagtgccctgttcctccaggataccactgaagcctctttgccccatnatgcagagcttttcaaggataaggcttttattcttgcaagcaattacaaataataaatctatttctgctaagagatcaccaaannnnnatnntnnnnnnncccccggattttttatttagcgggccgcacctttttccccttttagggggggtaaatttatattgggccttgggccggggttttcaaaagcggggggannnnnnnnnnaaagagccc

SEQ ID NO: 5163 - DNA, 4025 bp, Homo sapiens
  SIMILAR (1)..(186): 931254mologous to synthetic construct beta-endothelial cell growth factor,accession number A00328,Smith-Waterman Score=308.
  misc_feature (1)...(4025): n = a,t,c or g
atggctgaaggggaaatcaccaccttcacagccctgaccgagaagtttaatctgcctccagggaattacaagaagcccaaactcctctactgtagcaacgggggccacttcctgaggatccttccggatggcacagtggatgggacaagggacaggagcgaccagcacagtggtcttaattattcatggaccatgcaccagaggttgcaggctctaagaacaaatgaccacttcgctggtgctcacgctgtaccctcagatgcacaggtaatggggatggatgctggcgtttacacgagctcaaaaacaattgcagcttttgttattgtgttgctgtatcactcccaggttcatttgtctgtatccctaatcatgcagaagccccaagtgcagggaccatggctggcgctgagccagcagctgcaagaggatgtaggtctggaaaactggaatgaagtcacactagagagctggacaccaagccagctacacaagccgctcagcctggttcagctgcaagctcagtgcggaaagcgtgggggaggtgtatataaagagtaccgagactggccagtactttggccatggacacccgacgggcttttatacggctcacagacaccaaatgagggaatgttttgttcctgggagggctggaggagaaccattacaacacctatatatccaagatagcatgcagagaagaattggtttgttggcctcaagaagaatgggagctgcaaacgcggtcctcggactcactatggccagaaagcaatcttgtttctccccctgccagtctcttctgattaaagagatctgttctgggtgttgaccactccagagaagtttcgaggggtcctcacctgggttgaccccaaaaatgttcccttgaccattgggctgcgctaacccccagcccacagagcctgaatttgtaaggcaacttgcttctaaatgcccagttcacttctttgcagagcctttttacccctggcacagttttaggaccagaggggaccaaattgcttctaggagtcaactgggctgggccagtctgggtctgggtttggatctccaattgcctcttgcaggctgagtccctccatgcaaaagtggggctaaatgaagtgtgttaaggggtcggctaagtgggacattagtaactgcacactatttccctctactgagtaaaccctatctgtgattcccccaaacatctggcatggctcccttttgtccttcctgtgccctgcaaatattagcaaagaagcttcatgccaggttaggaaggcagcattccatgaccagaaacagggacaaagaaatccccccttcagaacagaggcatttaaaatggaaaagagagattggattttggtgggtaacttagaaggatggcatctccatgtagaataaatgaagaaagggaggcccagccgcaggaaggcagaataaatccttgggagtcattaccacgcctttgacctttcccaagggttactcagcagcagagagccctgggtgacttcaggtggagagcactagaagtggtttcctgataacaagcaaggatatcagagctgggaaattcatgtggatctggggactgagtgttggagttgcagagaaagaaagggaaactggctgaaggggatgccgttaaaagagggatgatttcagaaggagaaggaaaaagawagtaatgccacacattrtgcttggcccctggtaagcagaggctttggggtcctagcccagtgcttctccaacactgaagtgcttgcagatcatctggggacctggtttgattggagattctgattcagtgggttgggggcagagtttctgcagttccatcaggtcccccccaggtgcaggtgctgacaatactgctgccttacccgccatacattaaggagcagggtcctggtcctaaagagttattcaaatgaaggtggttcgacgccccgaacctcacctgacctcaactaacccttaaaaatgcacacctcatgagtctacctgagcattcaggcagcactgacaatagttatgcctgtactaaggagcatgattttaagatgctttggcccaatgcctataaaatgcccatttcgaagatatacaaaaacatacttcaaaaatgttaaacccttaccaacagcttttcccaggagaccgtttgtattaccattacttgtataaatacacttcctgcttaaacttgacccaggtggctagcaaattagaaacaccattccatcctctaacatatgatacctgatgcccatgtaaaggcctttaataagtcattgaaatttactgtgagactgtatgttttaattgccatttaaaaatatatagcttgaaagcagttaaactgattagtattcaggcactgagaatgatagtaataggatacaatgtataagctactcacttatctgatacttatttacctataaaatgagatttttgttttccactgtgctattacaaattttcttttgaaagtaggaactcttaagtcaatggtaattgtgaataaaaattgatgagagtgttagctcctgtttcatatgaaattgaaggtaattgttaactaaaaacaattccttaggtaactggaactgtcatatttaggaatgggaagggaaaatgacagtttgtgaaagttcaaagcaatagtgcaattgaagaattgacctaagtaagctgacattatggttaataatagtattttagatttgtgcagcaaaataatttcataacttttttgtttttgttacttggataagatcaatctgttttattttagtaaatctttgcaggccaagttaggggaaaatgcagtgtggccttaacgtctctttagtatgaagatttggccagaaaaagatacccagagaggaaatctaagataattataatggtccatactttttattgtatgaatcaaactcaaggcataacattgggccaagggaaaattaaataccattgctaacttgtggaatgggaagtctgtggatttcgggagatgccaaagcattgtagtaaaaacaccaatgtgacctcgaccatctcagcccaggatatcattcatatatctgtttcaatgactattaaggtgcctactgtgtgctaggcactgtactggatactggggaccttgtctgtctggtttgctgctgtatcttctcccagggcattatatttatgatgaaagatgctgtggattcaattctttcagtccaggaataaacacagactttgtaggttcctgctgaataaagcaaatcccagaaacccagatttttggaagaatcagcaacccccagcataaaataaacccctatcaaaatgtcagaggacatggcaaggtaaacttagcattttcaactttagaaccgggtcagcttcagggggactgctttcaaaatcagccaaagagcctgtcagatcttccttagaagggaagaggttggtagttcccctgctctgttttgaacatgctctaggtttattaacctggggaccattccccattgctgtcttaagtaagtctcattagcccagctccctgtcacccgtgacctcctcatatggatccattttccgggccccagcctctgaaaccaaagccatccatgaaccatatgtgccttttgggcccgntttgccaatgtgatggtggtgaaggtaggtattggtttcccttggaaggcatgataagaaagattcacaatggcccaacagtgtgtatgaacaaaaaaactgatttggagcatcagcctagtactgaaggtccttgcctttgtgtcagaggcaaaggaacccaaggcgccaagtcctcagccttgagtgtactgctgacaactaaactcacaggctgcaaagccagacctctgatgaagatgcctgttatttcacatcactgtctttttgtgtatcatagtctgcacctttacaaatattaataaatgttccgaataataggtgaaaaaaaaaaaaagaaaaaa

SEQ ID NO: 5164 - DNA, 1472 bp, Homo sapiens
  SIMILAR (326)..(1255): 781254mologous to Homo sapiens Similar to diptheria toxin resistance protein required for diphthamide biosynthesis (Saccharomyces)-like 2,accession number BC001389,Smith-Waterman Score=1163.
atggagtcgatgtttagcagccctgccgaggcggcgctgcagcgagagaccggggtgccaggactgcttactcctcttccggacctggacggagtgtacgagctggagcgagtcgctggatttgtccgcgacctggggtgtgaacgagttgccttgcagttccctgaccagctattgggagatgctgtggctgtggctgcacgactggaggagacgacagggtcaaagatgttcattctgggtgacacagcctacggcagctgctgcgtggatgtgctgggtgctgagcaagctggagctcaggctctcatacattttggccctgcctgcttaagccctccagcccgcccactgcccgttgccttcgtgctttcgtcaacgttctgtggccttggaactctgtgtcaagacctttggggcccaaaacccagaccccaaagcgcctgtggtgctgctgagtgagccggcctgtgcccatgccctggaggctttggctactctcctgcgcccacggtacctggacctgctagtctccagcccagcttttccccaaccagtgggttccctgagtccagagcctatgcccctagagcgttttgggcgccgcttcccccttgccccagggaggcgtctagaagagtatggtgccttctatgtagggggctctaaggccagccctgacccagaccttgacccagacctgagtcggctgctcttggggtgggcaccaggtcaacccttctcctcctgctgtccagatacagggaagactcaggatgagggtgcccgggctggagggctaagggcacgaagacgatatctggtagagagggccagagatgcccgcgtggtagggctgctggcaggcacactgggtgtagcccaacaccgtgaggcactggcccacttgcggaacctgactcaggctgctggcaagcgtagctatgtgttggccctggggcggcccacccctgccaagcttgccaacttccctgaggtggatgtctttgtgctattagcctgtcctctgggtgctctagcccccccagttatctggtaggttattccagcctatactggcaccatgtgagctggaagctgcctgcaaccctgcctggccacctccaggcctggctccccacctcacacattatgcggacttattgcctggctctcccttccacgtggctctcccaccacctgagtcagagctgtgggaaaccccagacgtgtcactcattactggagatctccgacccccacctgcctggaagtcatcaaatgatcatggaagcttggctctgaccccacggccccagctggagctggctgagagcagtcctgcagcctcattccttagttcccggagctggcaagggctggagccccgcctgggtcagacgccagtgacagaagctgtgagtggaagacgagggattgccatcgcctatgaggatgagggaagcggctga

SEQ ID NO: 5165 - DNA, 423 bp, Homo sapiens
  SIMILAR (37)..(309): 471254mologous to Homo sapiens hypothetical protein,accession number Y10936,Smith-Waterman Score=171.
  misc_feature (1)...(423): n = a,t,c or g
cccacgcgtccgcccacgcgtccgaggacgcatgggcaggaatgccctctgcttgatcctgtggattttctactgttcagaaccagggccggggaccctctgagaagggtgnnnnnnnnnnnnnaataaaaatctcatttttttctccattaagccccaaccccctccttgccttgctttccaccccagggaccccccaggagggagcaaacggccgctattttgggacccatttaagggccccccaattttggcccccatcctttccttaacccaaattttttttcgctggagctgttttttcccaaaaagccgcatcgcccaaggttgggccctttcttaacttgccacacgaaaggttttacctttttaagaaatgggggcctgccaggccaaagggggaatcggacttttttttaataa

SEQ ID NO: 5166 - DNA, 920 bp, Homo sapiens
  SIMILAR (3)..(695): 731254mologous to Drosophila melanogaster RNA polymerase III second-largest subunit,accession number X58826,Smith-Waterman Score =913.
gtgtttgtggcttgatcgtcccccaggaagacatgccattttgtgattctggcatctgtccggacatcatcatgaacccacacggcttcccatcacgaatgacggtggggaagctcattgagctgctggctggcaaggccggtgtgctggacggcagattccactacggcactgcgtttggaggcagtaaagtgaaggatgtgtgtgaggacctcgttcgccatggttataactacttggggaaagactatgttacatccggcatcacaggtgagcccttagaagcatacatctattttggccccgtgtactatcagaagctgaaacacatggtgctagataaaatgcatgcccgggcccggggcccacgagccgtccttaccagaataataacacatttgtctaataacttgtttcaaaggcaacccactgaaggacggtctcgtgatggtggcttgcgtctcggggaaatggaacgtgactgtttaatcggttatggagccagtatgcttttgctagagagactaatgatttcaagtgatgcctttgaggttgatgtctgtgggcagtgtggacttctggggtattctggctggtgccattactgcaagtcatcctgccacgtgtcttccctccgtattccgtatgcctgcaagctgctcttccaggaactacagtctatgaacatcatccccagcactgccaggactggcagtgtacaactgtacaacttcatcaggcaagggttaggaaaggcaaaccctgagtttcctttcgaagagagtttggaaactaggaccaagtgcagaacccataggattttgcaaaagcgatttgtgaaagctgccctgtttaacaatgatgggcggaaggaaggtggtggacttagtgagcacacttccctggaacaaccattttag

SEQ ID NO: 5167 - DNA, 952 bp, Homo sapiens
  SIMILAR (16)..(195): 871254mologous to Mus musculus putative,accession number AK012532,Smith-Waterman Score=294.
gtggcttgcgtctcgggaaaattggacgtgacttgtttaatcggttatggagccagtatgcttttgctagagagactaatgatttcaagtgatgcctttgaggttgatgtctgtgggcagtgtggacttctggggtattctggctggtgccattactgcaagtcatcctgccacgtgtcttccctcccgtattccgtatgcctgcaagctgctcttccaggaactacagtctatgaacatcatccccaggttaaaactgtccaagtacaacgaatgaggatggaaaaaatgattattaaagagaacaagtgatacatccaatgcaacggaaagcagaagggatttaggactacgtctcctcctgtgaagaattcccttgcgtattctctctctaaaacaaccaaaaaaaaatggagaggctttttatatactctaagactggctaaacaaccttgatcattgagcctcgagccatgggagagatgcctgcccctgtggactgccaaggctgcttgattccacagatggatgtgaccctaaaggataaataagcctattaccttatgtgcctgatctcttgacattcactcattagaagaccttactccttcaagcaaatgtttggggtcaaatttacccatatcttctggctaaccatattcaagattcttctgaaacttggaggatgtaaagaatccatttgatttggtcagcctggcttttgtcgtggtggctggctcggataaattttcccaaccaattaaatcttgcctttacacaccccaaactttgtaattttagtcttggtgaaatataatgaatttgttcctaccttgtcaagcaagaatgtcgtcttctcctatggactcaattgctattattttaaacctgcatgattgtaccatgcaatactattcgttaaatatctgaatctaaaaaaaaaaaaaaaaaa

SEQ ID NO: 5168 - DNA, 679 bp, Homo sapiens
  SIMILAR (1)..(204): 981254mologous to Plasmid F Protein E,accession number M12987,Smith-Waterman Score=357.
aaccggtttacgcagtttcggcttagtgaaacaaaagaaatcaccaatccgtatgccatgcgtttatacgaatccctgtgtcagtatcgtaagccggatggctcaggcatcgtctctctgaaaatcgactggatcatagagcgttaccagctgcctcaaagttaccagcgtatgcctgacttccgccgccgcttcctgcagatgatgatgcagtatctgtactacggaggaacagaatccatggagatccccaccactgacatcctggaggtgagactcgggagagggggagggggcctgggcaagggtgcccagcggctcggtctcccattcacccccttcagagggaaggtggctcttcctctccatctgacaggaagagcagttcccagaaagaggaactgtgcacaccactgagcccagcctcagtgcgtgtcccagcggggatggttaggcccaggagtatcagaaggtagtggggcctgagggtggaggcagcagggcacacggcactcgggagctttctgttcggtgctgtctgggccactggtctggccatgggtccccaagacctgctctgcctccctaccagctgctgtcagctgccagcctgttccagctggatgccctgcagaggcactgcgagatcctgtgctcccagaccctcagcatggagagt

SEQ ID NO: 5169 - DNA, 2064 bp, Homo sapiens
  SIMILAR (1934)..(2014): 741254mologous to Rattus norvegicus CCA3,accession number AB000216,Smith-Waterman Score=110.
atgacagcctccataaggaggtatcacacgtgtgctacagatggagaaccagactcgagtgtgcttgtcggaggggatggtgacctgaccctgctggtggcagccctgggtttggacctgggtctgcccttcatgctgctgccgcccctcatggagtggatgcgcgtggccatcacctacgcagagcaccgccgcagcctcaccgtggacagcggcgacatccggcaggcagcccggctgctgctgcctgacccgaacactgtttcagttccttccgggaggctggatgcccgagcagctactgaaaaattcaaccaggacctgggtttccgcatgctcaactgtgggaggacggacctcatcaaccaagccatcgaggccttgggtccggatggggttaacaccatggatgaccagggtatgacgccactgatgtacgcctgcgctgctggggacgaagcgatggtccagatgttgattgatgctggggcaaacttggacatccaggttccaagcaactcccccaggcacccttccatccaccccgacagccggcactggacctcactgacattcgctgtgctgcatggacacatctctgtggtccagttgctgctggatgctggtgcccatgtcgagggctcggcagtgaacggcggcgaggacagctatgcggagacgcccctgcagctggcctctgcggcagggaactatgagctggtcagtttgttgctgagccgaggcgccgaccccctcctcagcatgctggaggcccacggcatgggctcctccctccacgaggacatgaactgcttcagccactcagctgcccacggccacagaggtatatggggattggtgaccctgggacccctggcctgcctggaggaggaagaccatgaaactccgagccctcgggtaccccagagcagcccgtcggggcaggagggcactgggggacagctcaggaacgtcctgaggaagctcctgacgcagccacagcaggctaaagcggacgtgctgtccctggaggagatcctggccgagggtgtggaggaaagtgatgcgtcgagccagggcagtggcagcgaggggcccgtgcggctgagccggacccgcaccaaggccctacaggaggccatgtactacagcgctgagcacggctacgtggacatcaccatggagctgagggcactgggagtcccctggaagctgcacatctggatcgagtctctgaggacctcgttctcgcagtcgcggtactcggtggtgcagagcctcctgcgggacttcagctccatcagagaggaggagtacaacgaggagctggtgaccgagggcttgcagctcatgttcgacatcctcaagaccagcaaaaacgactccgtcatccagcaactggctaccatcttcacccactgctatggcagcagtcccatccccagcatcccagagatccggaagaccctgccggccaggctagatccacactttttgaacaataaggagatgtcagatgtgaccttcctggtggaaggaaagctgttttatgcacataaagtcctgctggtgacagcttctaacaggttcaagacactaatgaccaataaatcagaacaggatggggacagcagcaagaccatcgagatcagcgacatgaagtaccacatttttcagatgatgatgcagtatctgtactacggaggaacagaatccatggagatccccaccactgacatcctggagctgctgtcagctgccagcctgttccagctggatgccctgcagaggcactgcgagatcctgtgctcccagaccctcagcatggagagtgccgtgaacacctacaaatatgccaagatccacaatgccccagaactggccctgttctgtgagggcttcttcctcaagcacatgaaggccctactggagcaggatgccttccggcagctcatctacggccgcagcagcaaagtgcagggcctggatccactgcaggacctgcagaacaccctggcagagcgcgtgcactctgtctacatcacctcccgggtcagcagctga

SEQ ID NO: 5170 - DNA, 1237 bp, Homo sapiens
  SIMILAR (5)..(115): 751254mologous to Homo sapiens PRO2822,accession number AF119900,Smith-Waterman Score=149.
tttattttacgagatggagtcttgctctattgcccaggctggagtgcagtggctcagtctcggcttactgcaagctccgcctcccaggttcatgtcattctcctgcctcagcctcttgcgagctgatgttttttaagatctgaagtttgatatatacagtcattaattcagagttaagactgcagaagtagatgaagaaattctggaattccttaatttatttgtggcagcactcagaatgcacggcttcacaagagactgcatttttttctcctttgcaactaatagggctgtgcaatattaaactcatcacggcttggaagattcctgtgaatatttcaatactgtccagtcttaaagctgcagagaatcgggctttgcagaacactccactgtttttaatggcatgaatttaacagtgtttggcatggtgtcactgcccaacactttcagataactcaactgaagaagttgaccctatcttctgcaaaataacatgagtatatacttgagaaaagcctcaacatttttttttggctgccatttttaagctacctcaaaggagataacagaaaaacaaggagtactgatgatggaagcatctggtccctcttgcagagtgatgaatgattttattggtggcagctgggtggcaggacaatccagggcatccagttatgcctgatccccaataagtgaaatctttgttcattttctttttatacacccgtctgcttcctaaaacctggacaccatttaatgggtgcccttgggtcaaatcttaaatgatcttactttcataattctttggattctaggcttgccagagtcaagacgaactcctaacctcatggggatgggacaaactgggaagatgtaaaataagtaaggctttcctggggcccaaaaagccctcttccttacagaaaatcaaattttaaaagaacattgaccctcaaaacaataaaactgtccctggttatgcaatagaaatagcctatataaatggaatcatatccttaatgaacacctcctgtggctacccaacttttcacacatcttactgattataggccttgctgtgaatgctttcttgctctatctgaagtattcccaccagagttgtttccaactttatttcctatattatgaaaaatgaagtttttttaacattgttaacaaagtatatgaaagataatgtatactgtattaaataaaccattatacaaaaataaaa

SEQ ID NO: 5171 - DNA, 465 bp, Homo sapiens
  SIMILAR (187)..(465): 1001254mologous to Homo sapiens Human PANC1A associated with pancreatic cancer,accession number AAW26654,Smith-Waterman Score= 523.
attagaaagcccttgacccgcgctgcaggaattcggcacgagcgcgattctgagaggtgggcttttagtccctccagacctcggctttagtgctgtctccgcttttctttcaccttcacagaggttcgtgtcttcctaaaagaaggttttattgggaggtaaaggtcaatgcgtaggggtagagtaagaattctgcttggtcagaatcgtgatggcattgtgttcagcactgatgactattttcaccatcaagatgggtacaggtataatgttaatcaacttggtgatgcccatgactggaaccagaacagagcaaaacaagctatcgatcagggaagatctccagttataatagataacactaatatacaagcttgggaaatgaagccatatgtggaagtggccataggaaaaggatacagagtagagtttcatgaacctgaaacttggtggaaatttgatcct

SEQ ID NO: 5172 - DNA, 1617 bp, Homo sapiens
  SIMILAR (1)..(1386): 1001254mologous to Homo sapiens Human PANC1A associated with pancreatic cancer,accession number AAW26654,Smith-Waterman Score= 2547.
atgtcttatggtgaaattgaaggtaaattcttgggacctagagaagaagtaacgagtgagccacgctgtaaaaaattgaagtcaaccacagagtcgtatgtttttcacaatcatagtaatgctgattttcacagaatccaagagaaaactggaaatgattgggtccctgtgaccatcattgatgtcagaggacatagttatttgcaggagaacaaaatcaaaactacagatttgcatagacctttgcatgatgagatgcctggtaatagaccagatgttattgaatccattgattcacaggttttacaggaagcacgtcctccattagtatccgcagacgatgagatatatagcacaagtaaagcatttataggacccatttacaaaccccctgagaaaaagaaacgtaatgaagggaggaatgaggcacatgttctaaatggtataaatgacagaggaggacaaaaagagaaacagaaatttaactctgaaaaatcagagattgacaatgaattattccagttttacaaagaaattgaagagcttgaaaaggaaaaagatggttttgagaacagttgtaaagaatctgaaccttctcaggaacaatttgttccattttatgagggtcataataatggtctcttaaaacctgatgaagaaaagaaagatcttagtaataaagctatgccatcacattgtgattatcagcagaacttggggaatgagccagacaaatatccctgtaatggacaagtaatacctacattttgtgacacttcatttacttctttcaggcctgaatggcagtcagtatatccttttatagtgccctatggtccccctcttcccagtttgaactatcatttaaacattcagagattcagtggtccaccaaatccaccatcaaatattttccaagcccaagatgactctcagatacaaaatggatattatgtaaataattgtcatgttaactggaattgcatgacttttgatcagaacaatgaatatactgactgtagtgagaataggagtagtgttcatccctctggaaatggctgcagtatgcaagatcgatatgtgagtaatggtttctgtgaagtcagagaaagatgctggaaagatcattgtatggacaagcataatggaacagacaggtttgtgaaccagcagtttcaagaggaaaagttaaataaattgcagaagttacttattcttttaagaggtctgcctggttctgggaaaacaacattgtctcgaattctgcttggtcagaatcgtgatggcattgtgttcagcactgatgactattttcaccatcaagatgggtacaggtataatgttaatcaacttggtgatgcccatgactggaaccagaacagagcaaccagcagactaatggggatgaggttctggtacaagatgatgaacaccagtatgtcagacaatgacttgggagctggaatcaaggacatgaccaagagcagcaagaacaaaagggagactgacacattgatcactttctcaacctttgatctcttgagaggtgatttgacggaattctgcatgaattttgtttcaaatccagtgcaaacaactatgccaataatccgctga

SEQ ID NO: 5173 - DNA, 350 bp, Homo sapiens
  misc_feature (1)...(350): n = a,t,c or g
ncctcagggaactggctatgagcactcagaggagtcattgagctcacacgtcataatcaaaaagctcatgccatgttattaaatgcgttctgaagctcaatcagggcctcaccgtagagaagtggttattagtcatcgctatggaaccagacctccaggtttcaaataccagctccaacactnnnnnnnnnnnnnnnnnnnnnnnnnnnnnnnnnnnnnnnnnnnnnnnnnnnnnnnnnnnnnnnnnnnnnnnnnnnnnnnnnnnnnnnnnnnnnnnnnncaaaaccatacgtgtgtgccctggcacgcatgtgcgtatgtatcatttaatagagtgccctgctcgtgcc

SEQ ID NO: 5174 - DNA, 2115 bp, Homo sapiens
  SIMILAR (169)..(1917): 1001254mologous to Homo sapiens Human PANC1A associated with pancreatic cancer,accession number AAW26654,Smith-Waterman Score= 3209.
gcggggaggtgaggtttgttaccgcgattctgagaggtgggcttttagtccctccagacctcggctttagtgctgtctccgcttttctttcaccttcacagaggttcgtgtcttcctaaaagaaggttttattgggaggtaaaggtcaatgcgtaggggtagagtaagatgtcttatggtgaaattgaaggtaaattcttgggacctagagaagaagtaacgagtgagccacgctgtaaaaaattgaagtcaaccacagagtcgtatgtttttcacaatcatagtaatgctgattttcacagaatccaagagaaaactggaaatgattgggtccctgtgaccatcattgatgtcagaggacatagttatttgcaggagaacaaaatcaaaactacagatttgcatagacctttgcatgatgagatgcctggtaatagaccagatgttattgaatccattgattcacaggttttacaggaagcacgtcctccattagtatccgcagacgatgagatatatagcacaagtaaagcatttataggacccatttacaaaccccctgagaaaaagaaacgtaatgaagggaggaatgaggcacatgttctaaatggtataaatgacagaggaggacaaaaagagaaacagaaatttaactctgaaaaatcagagattgacaatgaattattccagttttacaaagaaattgaagagcttgaaaaggaaaaagatggttttgagaacagttgtaaagaatctgaaccttctcaggaacaatttgttccattttatgagggtcataataatggtctcttaaaacctgatgaagaaaagaaagatcttagtaataaagctatgccatcacattgtgattatcagcagaacttggggaatgagccagacaaatatccctgtaatggacaagtaatacctacattttgtgacacttcatttacttctttcaggcctgaatggcagtcagtatatccttttatagtgccctatggtccccctcttcccagtttgaactatcatttaaacattcagagattcagtggtccaccaaatccaccatcaaatattttccaagcccaagatgactctcagatacaaaatggatattatgtaaataattgtcatgttaactggaattgcatgacttttgatcagaacaatgaatatactgactgtagtgagaataggagtagtgttcatccctctggaaatggctgcagtatgcaagatcgatatgtgagtaatggtttctgtgaagtcagagaaagatgctggaaagatcattgtatggacaagcataatggaacagacaggtttgtgaaccagcagtttcaagaggaaaagttaaataaattgcagaagttacttattcttttaagaggtctgcctggttctgggaaaacaacattgtctcgaattctgcttggtcagaatcgtgatggcattgtgttcagcactgatgactattttcaccatcaagatgggtacaggtataatgttaatcaacttggtgatgcccatgactggaaccagaacagagcaaaacaagctatcgatcagggaagatctccagttataatagataacactaatatacaagcttgggaaatgaagccatatgtggaagtggccataggaaaaggatacagagtagagtttcatgaacctgaaacttggtggaaatttgatcctgaagaattagaaaagaggaataaacatggtgtgtctcgaaagaagattgctcagatgttggatcgttatgaatatcaaatgtccatttctattgtaatgaattcagtggaaccatcacacaaaagcacacaaagacctcctcctccacaggggagacagaggtggggaggctctcttggctcacataatcgtgtctgtgtcacaaataatcattaaattagctattttcagctaacacatttgttgttgcacttgaaaaagagttagtgagcctgtcttggagtttaagtagtttcaaataaaaaaaggctacagtgcctcacaaaggatgttcccagcaagttgtttaaattcccagcaagttgttaaagtgtaaataaaaatatatgaaattgtaaaaaaaaaaaaaaa

SEQ ID NO: 5175 - DNA, 948 bp, Homo sapiens
  SIMILAR (233)..(364): 841254mologous to Homo sapiens Human PANC1A associated with pancreatic cancer,accession number AAW26654,Smith-Waterman Score= 208.
gttagcatctgtaattgtgtagatttaagtgtaaagtgatttgaaatctgaaatctttgtaagattattcagctcttgtgctggtctgttcgtgatatactttcaggtaagtatcagaaatccatttaataacctttcctgtgtgatttatttcacttggttatatttatttctgatagtttatttctgatggttatagattttgtaaatggcacctttatgatttcttttattaacagaattctgcttggtcagaatccgtgatggcattgtgttcagcactgatgactattttcaccatcaagatgggtacaggtataatgttaatcaacttggtgatgcccatgactggaaccagaacagaggtttgttttgggctaagtgtcccaggatagaatatttggctaggagtcaaaagacctagattttattttcagcttaggtttttaccagctgaatgactgtaggcaagccgtttaaatagctttgagacctaatttctccatctgttagaggtggtgataattatacttgccctacctgatcagggtttttgtgaaaagcagagaatttagataaaacgctttgtaaactgtaaatgagtttatccagtataagctggtaaaataatagcagcatgggatattttaagaggctttattttatacttgatgagtaaattcagagaactttgaatctgtaccattgttatgtagtcccaaagttatttccccgagaataatgctaatgttttccaaggcttaatatactggttgtgaatattaaaagtttttccccattggatattgcccctacaagaaaccctactttaatacattttttagcggacatggggccatttccgggttatccataatagggggtcctaacccggggctacacttttgaatttcttggggactttaaaaaaaaagcaaaaaaaaaaaa

SEQ ID NO: 5176 - DNA, 871 bp, Homo sapiens
  SIMILAR (4)..(219): 691254mologous to Homo sapiens Human secreted protein, SEQ ID NO: 7870,accession number AAG03789,Smith-Waterman Score=246.
tttttaagatggagtctggctctgttgcccaagctggagtgccgtggcacaatctcagctcactgcaacctccgccccccgggttccagtgatcctcctgcctcagcctcccaaatagctgcaaccacaggcgtgcaccaccacaaccggctaatccctgcatttttagtagagacagggttttgccatgttgaccaggctggtcttgaactcctgaccccgtgatccacccgcctcggcctcccaaagtgctgggattacaggcgtgagccaccgcacccagacccctcttgtccattcttttcatggatgaggaggctgaggcccaagctggtcaggggggtgccaggactggggctccgacattttctctcccaggggattctcaggatccctctatgggaacatgatcagtggctttaaggggccaggggctttccctccagccagccctggactcacaggcctcagagaacctggagaagccagcctcgcatggctgggattttcatcgggagaatcccactggccatgtactgggctctctcccagtccctgagattgggctctgggctcagcgctgagcaggacccaaggaagtggcttaagtctttgtggccaggcggtgtctgctgtagaaagcagtgtggcatgtggccaggtggtactgtggtcagggagagaggttgcctggggctgtccaggcttcagcctgggaaagggagcacccggggaaccaagacaaggtgcagggctggagacagctttgggctcggctgtcggggaagcatattggcaggaggggcctcctagatgtctggtcagagatggccagggggcacgaaatcgtcgacccgggaattcagggcga

SEQ ID NO: 5177 - DNA, 784 bp, Homo sapiens
  SIMILAR (447)..(713): 771254mologous to Homo sapiens Human secreted protein, SEQ ID NO: 7870,accession number AAG03789,Smith-Waterman Score=345.
gatcatgtactataaatcacagcattgtggatgcaatgggattagacatgaagaaaaattttatatttttaataaagactggttactaaccttaaggaatatacttagactctgaaagtaaaaggaaagtgcaatgaccatatttgttcattcatctgcctattttcaaatctaatgatgatttggttgatgcaaatatgtccctaatctaggctataaatgataaaaacaaaaatgtttaaagttctaacttttgttagcagtatacacctaagaattttccaagtattacaaaatacttggaaggaaagactttaatataccactttcaaaatcctatgtacccaaaccagcaatgaagtggtgggatatataacgttaccttgggcaaaatttaagaaaataaagacacaatagctctaatttttttttttttttttttttttttgagacggagtctcgctctattgcccaggcttgcatgcagtggtgctatctcagctcactgcaatcactgcctcctgggttcaagcgattctcctgcctcagcctcccaagtagctgggatgacaggtgcccgccaccatgcctggctaattattgtatttttagtagagacagggttttgccatgttggccaggctggtctcgaactcctgatctcaggtgatccacctgcctcggcctcccaaagtactgggattacaggcatgatctaaattctttatacccttcaagggcaggaaaccagtatctctgaaaagcttgtttgttttaatacaat

SEQ ID NO: 5178 - DNA, 374 bp, Homo sapiens
  SIMILAR (32)..(133): 821254mologous to Homo sapiens LIM mineralization protein 2,accession number AF345905,Smith-Waterman Score=154.
  misc_feature (1)...(374): n = a,t,c or g
aaagaggcccctggtcttaaaaaggaaaacaactcgttttgtttgtgcaatatgtcagatcaacatggaaggaaagacattgtgctccaagaaggacaggcctatctgcaagagccatgccttctttcatgtgtgagccctttatgaacacagctgccgcggtggccaataaagagaggggcctggagtcgtggccatgcatttttgggtagggctggcaatggttaccttaaccctgggtcntggaaaaagcntggggntncnngggnnntgnnccanccaccttatcctcccaccccactccctccaccaccacagcacaccggtgctggccacaccagccccctttcacctccagtgccacaataaacctg

SEQ ID NO: 5179 - DNA, 412 bp, Homo sapiens
  misc_feature (1)...(412): n = a,t,c or g
atgcggcacgagataattcctcttgctgtgatggttcgtcctcaatgacaggtcccttatagtatttaggtacaacaaggtcttttgtgcttggaatgcccttgaaaaagctgcctcacctgtttgtgaagggatccccaaacataaagggagnnnnnnnnnnnnnnnnnnnnnnnnnnnnnnnnnnnnnnnnnnnnnnnnnnnnnnnnnnnnnnnnnnnnnnnnnnnnnnnnnnnnnnnnnnnnnnnnnnnnnnnnnnnnnnnnnnnnnnnnnnnnnnnnnnnnnnnnnnnnnnnnnnnnnnnnnnnnnnnnnnnnnnnnnnnnnnnnnnnnnnnnnnnnnnnnnnnnnnnnnnnnnnnnnnnnnnnnnnnnnnnnnnnnnnnnnnnnnnnnnnnnnnnnnccctcgtgcc

SEQ ID NO: 5180 - DNA, 424 bp, Homo sapiens
  misc_feature (1)...(424): n = a,t,c or g
cagttatgcgaagatcggcacgagataattcctcttgctgtgatggttcgtcctcaatgacaggtcccttatagtatttaggtacaacaaggtcttttgtgcttggaatgcccttgaaaaagctgcctcacctgtttgtgaagggaaccccaaagagnnnnnnnnnnnnnnnnnnnnnnnnnnnnnnnnnnnnnnnnnnnnnnnnnnnnnnnnnnnnnnnnnnnnnnnnnnnnnnnnnnnnnnnnnnnnnnnnnnnnnnnnnnnnnnnnnnnnnnnnnnnnnnnnnnnnnnnnnnnnnnnnnnnnnnnnnnnnnnnnnnnnnnnnnnnnnnnnnnnnnnnnnnnnnnnnnnnnnnnnnnnnnnnnnnnnnnnnnnnnnnnnnnnnnnnnnnnnnnnnnnnnnnnnnnnnnnnnnccctcgtgcc

SEQ ID NO: 5181 - DNA, 591 bp, Homo sapiens
  SIMILAR (35)..(139): 741254mologous to Homo sapiens Human myelin oligodendrocyte glycoprotein gene,accession number AAZ29204,Smith-Waterman Score= 125.
ctgcctccccaggttcatgccaattctccctgcctctacctcccaagtagctgggaatacaggtgcccaccaccatgcccggctaatttttgtattcttagtagaggtggggtttcaccatgttggccaggctggtctcttaactccttacctcaaatgatccacccacctcggcctcccaaagtgctgggattatagatgtgagccactgcacccagccctttcctctccctttctctttggggttcccttcacaacaaggtgaggcagcttttttcaagggcattccaagcacaaaagaccttgttgtaccttaaatacttataagggacctgtcattgaggacgaaccatcacagcaagaggaattatctcgtgccgcatcttcgcataactgaccaggatccctggcaaggatgtctcaatgcagaaagttggctaagtgaactgcagtatctaccctggacctaaaagaacttgctaatgttttcaagactacaattcagaggctgtctgatttaatctttgcatttacaaaaacaccctttttacgtacattaaatgtggaataaaactaaaaaaaaagtcgacg

SEQ ID NO: 5182 - DNA, 523 bp, Homo sapiens
  misc_feature (1)...(523): n = a,t,c or g
ggganccgtcagtcttnttcctgtggttccctctcatttgtcccagttactaactacggaaatagcatcctctgctggtgctaagtgtgattaggaagaagcctggggagaggcgagtctggaattttggtcncaagagggaaggacttggagaggagaattagttttctaggctcattggcatttagtttccctaggaaaggggtcaaaacttcaagacactggtggtggtgggagatcaggaaaataacttggcctagctcaaacaatattggataatcccctccttgggggagagggattagagtgtgctcctactggccccttggagcctcccctagcttacacagttaacttgattttaaaatccaaggccnggagagnngaatnnnaaaagcaatatttttcatcacatgccaaaaacgggggatagagagaaggagtggcagcctaggcccctccgatattttttattctgattagccattttaaaccaacgaggaataaaaagaaatcctgatct

SEQ ID NO: 5183 - DNA, 439 bp, Homo sapiens
  SIMILAR (81)..(326): 711254mologous to Homo sapiens unnamed protein product,accession number AK023130,Smith-Waterman Score=262.
ctgacacccaaagatgaagtacagctgaagaccacctacagcaaatccaacgggcagcccaagagcttaggtcagctcccctggccaaccagacacgcaatggaagcctatcttatgacagcttgctcacaccttcagacagccctgattttgagtcagtgcaggcagggctgagccagacccacctttaggctatacctctcccttcctgtcagccaggctggccagcaacgggaagctgagaggcaccacgtttggtgccaactggcccaacacaccgagagccctcaccagtccgttacgacaatctgtcgcgccacattgtggatctctcagtagccccacgaggggaggagtcaagaaggtgtcaggggttggtggtacacctatgagatttcggtgtgagcttcggacctcccctccccaacgcctctgccct

SEQ ID NO: 5184 - DNA, 454 bp, Homo sapiens
  misc_feature (1)...(454): n = a,t,c or g
agcaagaagtttcctcaggggactggctctgagcactcagagaagttattggactcacacatcataatcaaaaagctcatgccatgttattaaatgcgttctgaagctcaatcagggcctcaccgtagagaagtggttattagtcatcgctatggaaccagacctccaggtttcaaataccagctccaacactnnnnnnnnnnnnnnnnnnnnnnnnnnnnnnnnnnnnnnnnnnnnnnnnnnnnnnnnnnnnnnnnnnnnnnnnnnnnnnnnnnnnnnnnnnnnnnnnnnnnaaaccagacgtgtgtgtgctggcacgcatgtgcgtatgtatcatctaatagagtgccctggtctataggaagtgctatacgaagtgtttgctgctatccactaccattccctgccctgtgcgctccatgtctctgaatttccaccgcactggactagtgat

SEQ ID NO: 5185 - DNA, 540 bp, Homo sapiens
  SIMILAR (247)..(495): 961254mologous to Homo sapiens hypothetical protein,accession number AL117662,Smith-Waterman Score=405.
atgtacaagtatcggccgggttacagtagcagcagtacgtcagctgccatgccgcattcctccagcgccaaggtactgagtactctaagagccaggctggcccagcaacgggaagctgagaggcacccacgtttggtgccaactggcccaacacaccgagagccctcaccagtccgttacgacaatctgtcgcgccacattgtggcctctctccaggaacgagagaagttgctgcgccagtcacccccactcccgggccgcccaacagccccatacctgggccgatcgatgtcttacagcagccaaaaagcccaacctggtgtctctgagacagaagaagtggccttgcagccattactgacacccaaagatgaagtacagctgaagaccacctacagcaaatccaacgggcagcccaagagcttaggctcagcctcccctggcccaggccagccacctctcagtagccccacgaggggaggagtcaagaagttactaactacggaaatagcatcctctgctggtgctaagtgtgattag

SEQ ID NO: 5186 - DNA, 1555 bp, Homo sapiens
  SIMILAR (7)..(465): 771254mologous to Homo sapiens C1-inhibitor,accession number M14036,Smith-Waterman Score=598.
atgccgtattcactaaacctggccataagggacacctttgtgaatgcctctcggaccctgtacagcagcagccccagagtcctaagcaacaacagtgacgccaacttggagctcatcaacacctgggtggccaagaacaccaacaacaagatcagccggctgctagacagtctgccctccgatacccgccttgtcctcctcaatgctatctacctgagtgccaagtggaagacaacatttgatcccaagaaaaccagaatggaaccctttcacttcaaaaactcagttataaaagtgcccatgatgaatagcaagaagtaccctgtggcccatttcattgaccaaactttgaaagccaagttgagtcgtggggacagcttgaaggagccaacctcaattgcagagagcagccgtcaccccagctaccgctcagagcccagcttggaaccagagagcttccgttctcctacctttggcaaaagttttcacttcgatccactatccagtggctcacgctcctccagcctcaagtcagcccagggcacaggctttgagctgggccagttgcaatccattcgttcagagggcaccacctccacctcctataagagcctggccaaccagacacgcaatggaagcctatcttatgacagcttgctcacaccttcagacagccctgattttgagtcagtgcaggcagggcctgagccagacccacctttaggctatacctctcccttcctgtcagccaggctggcccagcaacgggaagctgagaggcacccacgtttggtgccaactggcccaacacaccgagagccctcaccagtccgttacgacaatctgtcgcgccacattgtggcctctctccaggaacgagagaagttgctgcgccagtcacccccactcccgggccgtgaggaagaaccaggcttgggggactcaggcattcagtcaacaccaggctcgggccatgcccctcgtactagttcctcctcagatgattcaaagagatcacctttggggcaagactccactgggacggccagctgttccccgttttggcaagccagatgggctataggggccggggagtagggttccctgaaccaggcccaacagccccatacctgggccgatcgatgtcttacagcagccaaatagcccaacctggtgtctctgagacagaagaagtggacttgcggccattactgacacccaaagatgaagtacagctgaagaccacctacagcaaatccaacgggcagcccaagagcttaggctcagcctcccctggcccaggccagccacctctcagtagccccacgaggggaggagtcaagaaggtgtcaggggttggtggtaccacctatgagatttcggaatttgatcatcactgcccctgggtgaataactgtattggtcgccggaactaccgttattttttccttttcctcctttccctgacagcccacattatgggtgtgtttggctttggcctcctttatgtcctctaccacatagaggaactctcaggggtccgcacggctgtcac

SEQ ID NO: 5187 - DNA, 1826 bp, Homo sapiens
  SIMILAR (296)..(625): 991254mologous to Homo sapiens hypothetical protein,accession number AL117662,Smith-Waterman Score=566.
acgcgtcgggaagctgagaggcacccacgtttggtgccaactggcccaacacaccgagagccctcaccagtccgttacgacaatctgtcgcgccacattgtggcctctctccaggaacgagagaagttgctgcgccagtcacccccactcccgggccgtgaggaagaaccaggcttgggggactcaggcattcagtcaacaccaggctcgggccatgcccctcgtactagttcctcctcagatgattcaaagagatcacctttgggcaagactccactgggacgcccagctgtcccccggttttggcaagccagatgggctaaggggccggggagtagggtcccctgaaccaggcccaacagccccatacctgggccgatcgatgtcttacagcagccaaaaagcccaacctggtgtctctgagacagaagaagtggccttgcagccattactgacacccaaagatgaagtacagctgaagaccacctacagcaaatccaacgggcagcccaagagcttaggctcagcctcccctggcccaggccagccacctctcagtagccccacgaggggaggagtcaagaaggtgtcaggggttggtggtaccacctatgagatttcggtgtgagccttcggcacctcccctccccaacgcctctgcgcctacaccaaaagggcccccaggtggccaaccttccttccctccaaggggcttcccctcccgtgcatggacattttttaaaccaccgattccaagaggatgaggagtgttttctaaaatgcagtaggcttgggggagtcggagagttggggccctgagacgtggggtagcaaccccccctttttatctttttaagaccttcccttccttgatccctggaccagactcagtggacatttgtgcaattgctcggccctggagggaaccagatcatttttaaaccagaaataatttttttttaattattgttacggattctatttttttcctcttctgcgttaccagggtgtgtgtgtacatataatatatatatatatatatattataaatatcaaagaaattatatatctatcctgggatgggaaaatgagggagggatacatatacggaggggggatcttactcttcccattcctcagaccagcaggaaaagaggggagacgtcagtctttttcctgtggttccctctcatttgtcccagttactaactacggaaatagcatcctctgctggtgctaagtgtgattaggaagaagcctggggagaggtgagtctggaattttggtcacaagagggaaggacttggagaggagaattagttttctaggctcattggcatttagtttccctaggaaaggggtcaaaacttcaagacactggtggtggtgggagatcaggaaaataacttggcctagcctcaaaccaatattggataatcccccctccttgggggagagggattagagtgtgctcctactggccccttggagcctcccctgagcttacacagttaacttgattttaaaatccaaggcccaggagagaagaatcccaaaaagcaatatttttcatcacatgccaaaaacgggggatagagagaaggagtggcaggcctagggcccctccgattgtcccttgggggttaccccctcagcccacctcactatggtgctgggtagaggggatacctgggttctaacctctaaataggggagatcccagcctccacaaagaggcccttttattttttattctgattagccattttaaaccaacgaggaataaaaagaaatcctgatctaaccagcaaaaaaaaaaaaaaaaa

SEQ ID NO: 5188 - DNA, 2265 bp, Homo sapiens
  SIMILAR (3)..(1289): 931254mologous to Homo sapiens NY-REN-62 antigen,accession number AF155117,Smith-Waterman Score=2017.
gcccaacatggctggagcgcggcggaggtgagccggccgcccgcccgcagacgccccagcctactgcgcccgagtcccgcggccccagtggcgcctcagctctgcggtgccgaggcccaacggctcgatcgctgcccgccgccagcatgttgggcgccccggacgagagctccgtgcgggtggctgtcagaataagaccacagcttgccaaagagaagattgaaggatgccatatttgtacatctgtcacaccaggagagcctcaggtcttcctagggaaagataaggcttttacttttgactatgtatttgacattgactcccagcaagagcagatctacattcaatgtatagaaaaactaattgaaggttgctttgaaggatacaatgctacagtttttgcttatggacaaacctggagctggtaaaacatacacaatgggaacaggatttgatgttaacattgttgaggaagaactgggtattatttctccgagctgttaaacacctttttaaagagtattgaagaaaaaaaacacatagcaattaaaaatgggcttcctgctccagattttaaagtgaatgcccaattcttagagctctataatgaagaggtccttgacttatttgataccactcgtgatattgatgcaaaaagtaaaaaatcaaatataagaattcatgaagattcaactggagggaatttatactgtgggcgtttaccaacacgtactgtgaatacagaatcagagatgatgcagtgtttgaagttgggtgctttatcccggacaactgccagtacccagatgaatgttcagagctctcgttcacatgccatttttaccattcatgtgtgtcaaaccagagtgtgtccccaaatagatgctgacaatgcaactgataataaaattatttctgaatcagcacagatgaatgaatttgaaaccctgactgcaaagttccattttgttgatctcgcaggatctgaaagactgaagcgtactggagctacaggcgagagggcaaaagaaggcatttctatcaactgtggacttttggcacttggcaatgtaataagtgccttgggagacaagagcaagagggccacacatgtcccctatagagattccaagctaacaagactactacaggattccctcgggggtaatagccaaacaatcatgatagcatgtgtcagcccttcagacagagactttatggaaacgttaaacaccctgaaatacgccaatcgagctagaaatatcaagaataaggtgatggtcaatcaggacagagctagtcagcaaatcaatgcacttcgtagtgaaatcacacgacttcagatggagctcatggagtacaaaaccaggtaaaagaataattgacgaagagggtgtggaaagcatcaatgacatgtttcatgagaatgctatgctacagactgaaaataataacctgcgtgtaagaattaaagccatgcaagagacggttgatgcattgaggtccagaattacacagcttgttagtgatcaggccaaccatgttcttgccagagcaggtgaaggaaatgaggagattagtaatatgattcatagttatataaaagaaatcgaagatctcagggcaaaattattagaaagtgaagcagtgaatgagaaccttcgaaaaaaacttgacaagagccacagcaagagcgccatatttcagcggatcatcaactttttctcctaccatactatcctcagacaaagaaaccattgaaattatagacctagcaaaaaaaagatttagagaagttgaaaagaaaagaaaagaggaagaaaaaaagtgtggctggtaaagaggataatacagacactgaccaagagaagaaagaagaaaagggtgtttcggaaagagaaaacaatgaattagaagtggaagaaagtcaagaagtgagtgatcatgaggatgaagaagaggaggaggaggaggaggaagatgacattgatgggggtgaaagttctgatgaatcagattctgaatcagatgaaaaagccaattatcaagcagacttggcaaacattacttgtgaaattgcaattaagcgaaagctgattgatgaactagaaaacagccagaaaagactgcagactctgaaaaagcagtatgaagagaagctaatgatgctgcaacataaaattcgggatactcagcttgaaagagaccaggtgcttcaaaacttatgctcggtagaatcttactcagaagaaaaaaaaaaaaaaa

SEQ ID NO: 5189 - DNA, 750 bp, Homo sapiens
  SIMILAR (517)..(750): 591254mologous to Homo sapiens CG015alt2,accession number AX080013,Smith-Waterman Score=225.
ggaagatcagggcttgtattcaataagaatggaaggggccaggggatgccttgcaaaaagccttgcactgtgaggtgcaggtagaggcttttattctggtgagaggacatggactctctctctcccctcaggtaactgtgctcctgtaccagcggggaggctggtggtctcatgcctgagcccactccaacctcaacggtgtgtggcaccacggcggccactaccgaagccgctaccaggatggtgtctactgggctgagtttcgtggtggggcatattctctcaggaaggccgccatgctcattcggcccctgaagctgtgactctgtgttcctctgtcccctaggccttagaggacattggtcagcaggagcccaagttgttctggccacaccttctttgtggctcagtgccaatgtgtcccacagaacttcccactgtggatctgtgaccctggggcgctgaaaatgggacccaggaatcccccccgtcaatatcttggcctcagatggctccccaaggtcattcatatctcggtttgagctcatatcttactaataacacaaagtagccacagaccgtgtctggtttgtatctgcacctggcaggggtcactccctgggcccgccctcctcgtcctccacctcaggtaactgtgccctgtaccagcggggaggctggtggtaccatgcctgtgcccactccaacctcaacggtgtgtggcaccacggcggccactaccgaagccgc

SEQ ID NO: 5190 - DNA, 1188 bp, Homo sapiens
  SIMILAR (30)..(548): 821254mologous to Homo sapiens angiopoietin-related protein 5,accession number AF230330,Smith-Waterman Score=734.
gcccttttttttgttcgacaatttcttaccgcctgtgcccggaaggggcggccggccagaagaaggtcctgccgccacccccactggtgcctgtggttccggtccgtcttgtgggtagcaccagagacaccagtaggatgcgggacccagccccagagccccagagagaccagacccagagacagcaggagcccatggcttctcccatgcctgcaggtcaccctgcggaccccaccaagcctgtgggcccgtggcaggattgtgcagaggcccgccaggcaggccatgaacagagtggagtgtatgaactgcgagtgggccgtcacgtagtgtcagtatggtgtgagcagcaactggagggtggaggctggactgtgatccagcggaggcaagatggttcagtcaacgtcttcacttacctggcagcactataaggcgggctttgggcggccagacggagaatactggctggcgccttgaacccgagcatcactctgaccagccgtggggaccatgagctgctggttctcaaggaggactggggggggccgtggagcacgtgcccactatgatggcttctccctggaacccgagagcgaccactaccgcctgcggcttggccagtaccatggtgatgctggagactctctttcctggcacaatgacaagcccttcagcaccgtggatagggaccgagactcctattctggtaaactgtgccctgtaccagcggcgaggctggtggtaccatgctctgtgcccactccaacctcaacggtgtgtggcaccacggcggccactaccgaagccgctaccaggatggtgtctactgggctgagtttcgtggtggggcatattctctcaggaaggccgccatgctcatttggcccctgaagctgtgactctgtgttcctctgtcccctaggccctagaggacattggtcagcaggagcccaagttgttctggccacaccttctttgtggcttaatgccaatgtgtcccacagaacttcccactgtggttcttgggaccctgggcgctgaaaatggggaccccagaatccccccccgccatatcttgggcctcaaaagggcttccccaaggtcattcatatctcggtttgagctcatatcttataataacacaaagtagccacagaccgaattccaccacagtggactaggagt

SEQ ID NO: 5191 - DNA, 800 bp, Homo sapiens
  SIMILAR (114)..(278): 581254mologous to Homo sapiens Human myelin oligodendrocyte glycoprotein gene,accession number AAZ29204,Smith-Waterman Score= 145.
ccaaggcagtgtctctctctgtcacccaggctggagtgcagtggttcgatctcattgcaatctccgcctcccaggtttaatcgattctcgtgcctcagcctcccgagtagctgggattacaggcaagtgccaccacgcccggctaatttttgtatttttagtagagacagggtttcgccatgttggccaggctggtctccaactcctaacctgaagtgatccgcccaccttggcttcccaaagtgctgggattacaggcgtgacaacccgcgcccagccgagattaattcttaataaattaagaagagagaaaacctgtcaaggttcgaaaatatgcactgaaggaatcagatctggtagttaaaaataagtcacttcacagaacactgtaccctgacgcaatatccacccagggaaaattaatgagcacatcaatgtaatacatcctgaataaataatgacatcaacaatagccactttgtctaatcctacccctaaatgtcaagcattttgtcatattactacatgactttccagtgtctgctacttgtgcaggtgaatctgtaggtatttgcatataatccagttaaaactgtgatctgattgaattgtaaacagaattgacaagagaaacttattgtagtgcctaatatcacttacattttaagaagacagtatgtagcagcaatttaaaatgctcagtaaactatagtacaaatggacatctatactatttagcaaaccaacattcctttaatatctctatatcatagtgacacaaatgaggaattactttacat

SEQ ID NO: 5192 - DNA, 3082 bp, Homo sapiens
  SIMILAR (2014)..(1835): 1001254mologous to Homo sapiens Amino acid sequence of a human secreted protein,accession number AAY19484,Smith-Waterman Score=310.
atggtggttagtctttattttcccacacatcctgattcatttcctgtccttctctgtcttgttctatgccctgggcggctgatccttagggactgcaatccccccagactcccatttgtaaattgacttcctgcttgggtttggtcaatggaatgccctggcacagctttggagggaagaagagagaagacaatgtatttcttcactgctcccactctgatttgggctatgttttattggcagggactgcatcccttcaagattttagcttcttccagaagtcccctcctccatgactctagctctcactaggctccagaaatactatttcttcctcttgccctcttaggcctagggtaacagctacctgctattgctaacctctgggtgccacaaaattgcttgttgggtctcataatcttgcatatacctctgtaagtagtccctacattaaagtcccttgaaccatctgatttagatttttttactggctaggactctgactgaggtgctggtgtgaggcctagaattactgcagctattttgataccattagaatgcacagtcaaggataaagctttcatgtaaggaagggtatagcagagaaaattatagaaaaatgaagcagaatcttaatcaaattgtacttaaagtcagataacttctggatgcaactcactgaagtaagaataggtggatatttcttaaatatgacaaaaatatatacatttctaacaagaagcctttcatgtttaagggataaacactagaagcatttccattaaaattaggaaaaagacaagaatgccagttatttccacaattatttaacattgttctagaagtactagttaatgcagtcaaccaagagaaagaaatgtaatattgatattggaaaggaaggggcaggcaagattatcattaccacaaatgaagcaaatctaagagaatcaactaaagactacttgaaacctttggaactccataaaaaggctggttatgaaatcaatagaataaaaactgatcactttcatatataaaaacaacaaacaaaatgtaaaataagaaaaaaaatctaaattacaatagccatgggaaaagataagctccttttgaataaacttaacaaaaaaatctgtaagacatatccattcattcagtaaatatggattgataacctacagtgtgccaggcaatgttctaggagttatttttatttaaaaaatttagaaactgctgagaaaaataaagacaaataagtagaaaaactgggttgttggatagaaagatattcctgtaaagatgccaattatcactcagttaacttataaattatgtgcaacacaaattgaaattaaaaacggtagtttttaggggactataacaaaataacagattttagtctctaaataaatacatgtgaacaggcaggtaatgataaaaaagatgagttatgagagaccttacccttcagatattgaaacatattatgaagatactatagttaaaacagtttgttatttaagaagaaagaaaagataacagattaaaagaatataataaagaataaagaaatagatacaaacatatgtggatgtttagattatgataattatggtaaagatggcactttattttttattttttgggtattatacattttatttaaagacttcaaagtaaaaaaaaaaaaaaaaaaggtacagaaatacagattacattatgatgaccacagtagtattctacatgacaaaaataaaaacagatttaagtaaatgtacgggcactgaaacaggcatttacttaacatccaatccaggctgcatatgcacaaaaaggatctgaccacatgcttatgcaaaataaagtttttcttagaaagccaaaattccaaccattctgactgtccgctgcctattcccctgttgagtattttgagcgaacttctatagaatataagaacaattggcatggcacttaaagactgcaaaaaacagaacacaattaaaaacatttataatgcatttctgtataaaattacacaccgtaaatcttattagttaaaaaaagatttaaaaacaaaagaccaccctggaataatggttaaaacctcatcatagaaaaatgctcatcattttgcacattattgatagaaactactgagaggttttcttggggggctgggtggaaaggtagatacctaacttaaagattcattcaaaatttgctttaaattgtgggtaataactcactgcttaccccttctcaaaatgttttatcatgaatactctaatatttaaccacaggacaaacataaagaataacctgaagaaggtatttctcaaagtgaggtcgaaggccccaaaagaagtctaaggtgggctcactagtgtgcattttaaaccaacttcctaggtgattatttcacattccaaaatctgagaactaatgccctatgggaaacagcaccacttaaaagcaaggccataaacatatttctgacatgagatacagaattctaagtttatgatttgaagtgaatactgctttttgttttaaaacaagtttcagatgttaagagaaacatattaaataaacatgtgcatgtatataaacattttcctttgaggttttcattgctttcagacttatgttatctgaaggaaagagagtacacagctagaaactttggaaaaatgacatttccaatgaaatgtagcatccacccctccaaaaaaagataatttattaaatgcctacaaattttgaaacatttgaaatttaaactaggacactttcctaaaattaagttttactaagattaaaaaattttaagtaatttagataatcatgtttactttttaagtcccttttcattaaaaatatatttaaaataaacaacagaaggatgctatatttggcacccctttaaataataagctgctgaacactaatattaataaaaaataatccaaggaactctgcctctgaaatgtattctactatgtgttacatgtgttatccagttaataaaaactcactgaaagagctgatgaattccacgcacactggactacggctc

SEQ ID NO: 5193 - DNA, 8160 bp, Homo sapiens
  SIMILAR (7369)..(8157): 941254mologous to Escherichia coli permease,accession number M58000,Smith-Waterman Score=1216.
atgactaaacactatgattacatcgccatcggcggcggcagcggcggtatcgcctccatcaaccgcgcggctatgtacggccagaaatgtgcgctgattgaagccaaagagctgggcggcacctgcgtaaatgttggctgtgtgccgaaaaaagtgatgtggcacgcggcgcaaatccgtgaagcgatccatatgtacggcccggattatggttttgataccactatcaataaattcaactgggaaacgttgatcgccagccgtaccgcctatatcgaccgtattcatacttcctatgaaaacgtgctcggtaaaaataacgttgatgtaatcaaaggctttgcccgcttcgttgatgccaaaacgctggaggtaaacggcgaaaccatcacggccgatcatattctgatcgccacaggcggtcgtccgagccacccggatattccgggcgtggaatacggtattgattctgatggcttcttcgcccttcctgctttgccagagcgcgtggcggttgttggcgcgggttacatcgccgttgagctggcgggcgtgattaacggcctcggcgcgaaaacgcatctgtttgtgcgtaaacatgcgccgctgcgcagcttcgacccgatgatttccgaaaaccagagccggagcggcgctgttcgtgatgagattcagttctacgccacaggtgcgcgtccggatctggcaaaagagatgggctttatcggtggcaaaatgccgacgcactgggggccacatgatggcgatgcggggatccgcaaagatgccgctatggtcgcggatatgcgtgtaaaatgcgcggaacgttgcgaccgcatctcactgatgcacgccggaaaagtgcttgccagcggtacaccgcaggaactggttgagaaacgcggagccgccagtctggaagaggcatttatcgcctatttgcaggaagcggcagggcagagcaacgaagccgaagcgccgcaccgtgctacagccgccgcgaagcgctggaactgcgacgcgatccagtacgttcggacgctggcgctgatgggaacggtgatcctgatgctgataatgggttacggcatcagtatgatgtggaaaacctgcgctttaaagtgctggagggatttttgtggatcggacttcagattgataaaggggacgccgcgtagctccgacgacagcataaaaatcttgccgccaattttaaaaacatcgaactccgggccaaaaggccagcaaagctcgacaaagggtaactcaagcatggcaactgactcaacacaatgtgtaaaaaaaagccgtggccgcccaaaagtgttcgacagggatgccgcgcttgataaggccatgaaattgttctggcaacacggttatgaagcgacttctcttgcggacctcgtcgaagcgaccggagccaaagcgcccacgctatacgcggaatttaccaacaaagaggggttatttcgtgccgttctcgaccgctatatcgatcgttttgccgctaagcatgaagcacagctgttttgtgaagagaaaagcgtggagtctgcgctggctgactattttgctgccatcgccaactgctttaccagcaaagacaccccggcaggctgcttcatgatcaacaactgcaccaccctctccccagattcaggagatatcgccaatacgttgaaatcacgccatgcgatgcaagagcgcactttgcagcagtttttatgtcaacgacaagcgcgcggggaaatcccgccccactgtgacgtgacacatctggcagaattccttaattgtattattcaggggatgtcgatcagcgcacgcgaaggtgcatcgctggaaaaactgattgcccctgaacctcgcacccctcctgcctcgttcaggaagctccgcacctatccggccgccaccctcagcacaggcacggcagccgatgaaatctacgtatggcgtggacagacgccattcgtgatgtcgatagctgccacaaggcaacggtcttctcacccgacctggttcaacggtaatacgcaacacgcgcccaacttctgccgctttgctcggtttgccttcagcgtcgaacgcctgggcaatcgccgggccgcgtttttcgatttcacgatccggttgcgcttccgccagaatggggtcccaaacgagagattcgacgtaaacgtccgctcccaactaagttctcaggcgctgacaacgacaagaattcctcacacaatacgtagcgcttcaatcactaaaccgctttcacagccctcgacctgccgcgatatgtccgccgcccaccgtcaggccattgccgacattacgccgaaatatatggaagatctggatcaacgctggatggactatggcgttaagttcctcgacaagatggcgaagagcgataaaccattcttcctctactacggcactcaattcgccactttcgctccaggatgccctgccagatccagcgcgtggaggctaacctccacgatttcaattagcggtatggagcttcccatggccccggcttttcccattccgaggcaaaacccttggtcgatggccccagcttgccttttgactggcacttcgggccacaacggcggcagtggcgcgaagggcgaggacaggggggtctttggggggcggcctcctatcacggagtttcccttcggttccacttggaacttccgcgtgtgcggcttacggagtccggtaaccgcgctatgccgaggcgaaggcgggcaaccccagggcgcgcaggtccaacagcggccgggtaaaatcaccggggaaaatttccgacaaggaaactccaggggggggcatcaaaacgcccagggacacggacaccccctggtacaacgccacacagggggccccaggcacaagaagggggccacagaacaccccgggtacaccagcgcacccgcaaatccatccgcagagctgaaaatctacgatacctcatcacaaccacttagccagatcttaagccaggttcagcaggatggcgcgagtattgtggtcggtccgttgctgaaaaataacgttgaagagttgctgaagctttcaaaagccctctacaacattgactggcatcgccacgcgcaggtgaagtgcaacggcttgcagatcaatatgttgatggctgccgccgtctgcgccgtcattgccagcaacctcggcatgttcgtggtaatggccgaaatcatggccctgtgcgcgcaacagcaaagagggcaactgtggtttgcgctggggcgtcttggcactctgctgctggcgattgcttgctggctgctgtggcagcgttacggcacgctggatctgcgcctgctggatatgcgtatgcaacagctgccgctcggttccgatatctggctgctcggagtgattggctttggcctgctggccgggattattccgctgcacggctgggtgccgcaggcacatgcgaacgcctctgcgccagctgccgcgttgttttctacggttcatgtgtacaaacgcgtaattctgaccggtgaccatatcaccgactccacttccagccaggacgaatacaaccaaccgcaggttaacatctcgctcgatagcgctggtggtaacatcatgtctaacttcactaaggacaacatcggcaaaccgatggcaaccctgtttgtggagtacaaagacagcggtaagaaagatgcaaatggtcgtgcggttctggtgaaacaggaagaggtgattaacatcgccaacatccagtctcgtctgggtaacagcttccgtatcaccggcatcaacaacccgaacgaagcccgtcagctgtcactgctgctgcgtgccggtgcgttgatcgcgccgattcagattgttgaagaacgtaccattggcccaaccctgggtatgcagaacatccgatggggctacggccgttcccagcctgcggagctgacaaaactgtcgctgttttgctatatcgccaactatctggtgcgtaaaggcgacgaagtacgtaataacctgcgcggcttcctgaaaccgatgggcgtgattctggtgttggcagtgttactgctggcacagccagaccttggtacggtggtggtgttgtttgtgactacgctggcgatgttgttcctggcgggagcgaaattgtggcagttcattgccattatcggtatgggcatttcagcggttgtgttgctgatactcgccgaaccgtaccgtatccgccgtgttaccgcattctggaacccgtgggaagatccctttggcagcggctatcagttaacgcaatcgctgatggcgtttggtcgcggcgaactttgggggcaaggtttaggtaactcggtacaaaaactggagtatctgccggaagcgcacactgactttattttcgccattatcggcgaagaactggggtatgtcggtgtggtgctggcacttttaatggtattcttcgtcgcttttcgcgcgatgtcgattggccgtaaagcattagaaattgaccaccgtttttccggttttctcgcctgttctattggcatctggtttagcttccaggcgctggttaacgttcgcgcgggggccggggatgtaccgaccaagtacaactcactgagttgcttcaaagaaacgcgaaatgcgatattgggccgcctgatgacgcctgctcatgggcatgtctggctggatggcgagcacattcaacattacgccagtaaagaggttgcacgccggattggtctgttggcgcaaaatgctaccacgccgggcgatatcaccgtgcaggagctggtggcgcgtggacgttatccgcatcaaccgctgtttacccgctggcgcaaagaggatgaagaagcggtaacgaaagcaatgcaggccacgggaataactcatctggcagatcaaagcgtgataccctttcggtccaggctagttaaaaacagaaaggcagcctggcatagtggtagcagagacacagcagcaactctcatgctgtttgtgctggggtggctgggccgacggaggggtctaggctgttgtgggatctggggtggtttcagtcaacaaggtctcccgcctgccatgcagaaagtcatgtataagggactcgtccccgaggataaaacattgagagaaataaaagtgaccagtggggccaagatcatggtggttggctccaccatcaatgatgttttagcagtaaacacacccaaagatgctgcgcagcaggatgcaaaggccgaagagaacaagaaggagcctctctgcaggcagaaactacattgttgcttattcactttagtggcaagtattattgtgccagctgcttttgttttggaagatgtggacttcgaccaaatggtttcactggaagcaaatcgtagttcttacaatgcatcctttccctcaagctttgaactctcagcaagttcccactcggatgatgatgtcatcatagccaaagagggaactagcgtttcaattgagtgtcttctcacagccagtcactatgaagatgtccattggcacaattcaaaaggacagcaactggatggcagaagcagagtaattgctctagtcccagttactccagcgatccagcccaatgcgcgtatacggcgtcaccgagtggttgccgagcgtcagcggcaaataggcgcgaatttcttgcgtggaaaactcaccgttattgcggctgtcgtccatattgaagccgcgctcgagataatagttcactcgcaaggcaaccgtttcgttgaaggacagtaccaagctgtccagcacgctgtcgtgcggataccggtagggccaggccgtggctccggtgcgggttcactggtggcctacgcgctgaaaatcaccgacctcgatccgctggaatttgaccgtgctactgtaagggttctgaatggtgacaatacgcggcagatcgtgtttgtccgccagatgcaggtagcgcattacgccaaatgcagtttcgttcgacacgccgatataacgaatttttcccgcgcgttggtactctgccagtgcgtccagcgtatccagcagcgaaaccgcaggcgcagaatccgtccagctataaccgagtttgccgaagcagttggtcgggcgctgcggccagtgcacctgataaagatcgaggttaatgccctgagcgacggcatagtcgagttgtgcgtgggcgtcggcttcgctgttctgttcattctcagcgggaaatcggccaaacatcggtaccacagaaaactgggaataaacagggtaaacgccaattgtcccggtttttacgtcaatcgcatcttagcgccttacattaatgaagctatccgcatgttgacccaaggtgaacgggtagagcacattgatgccgcgctagtgaaatttggttttccggtaggcccaatccaacttttggatgaggtaggaatcgacaccgggactaaaattattcctgtactggaagccgcttatggagaacgttttagcgcgcctgcaaatgttgtttcttcaattttgaacgacgatcgcaaaggcagaaaaaatggccggggtttctatctttatggtcagaaagggcgtaaaagcaaaaaacaggtcgatcccgccatttacccgctgattggcacacaagggcaggggcgaatctccgcaccgcaggttgctgaacggtgtgtgatgttgatgctgaatgaagcagtacgttgtgttgatgagcaggttatccgtagcgtgcgtgacggggatattggcgcggtatttggcattggttttccgccatttctcggtggaccgttccgctatatcgattctctcggcgcgggcgaagtggttgcaataatgcaacgacttgccacgcagtatggttcccgttttaccccttgcgagcgtttggtcgagatgggcgcgcccctcgatgccgccagtgattccgttcgtcctctgaccactaatggttgtgacgaatctcgcctgatggcgaactggctgaaaggtcaaaaagtggaaatcgaacgcgttctggtgagcccgttcctgcgagccgagcaaacactggaagaagtaggggattgtctgaacctgccttccagtgcagaagttctgccggagttaacgccctgcggcgatgttggtctgatgtggattggcgataaaaaacaactgctgacgccgctgcgcgatcagttcacccgtgcaccgctggataacgacattggcgtaagtgaagcgacccgcattgaccctaacgcctgggtcgaacgctggaaggcggcgggccattaccaggccgaagcagcgttgttgcagtgcacggcagatacacttgctgatgcggtgctgattacgaccgctcacgcgtggcagcatcaggggaaaaccttatttatcagccggaaaacctaccggattgatgcgctggcggtaattatgttctccttcggcggtctggagctgattgggattactgccgctgaagcgcgcgatccggaaaaaagcattccaaaagcggtaaatcaggtggtgtatcgcatcctgctgttttacatcggttcactggtggttttactggcgctctatccgtgggtggaagtgaaatccaacagtagcccgtttgtgatgattttccataatctcgacagcaacgtggtagcttctgcgctgaacttcgtcattctggtagcatcgctgtcagtgtataacagcggggtttactctaacagccgcatgctgtttggcctttctgtgcagggtaatgcgccgaagtttttgactcgcgtcagccgtcgcggtgtgccgattaactcgctgatgctttccggagcgatcacttcgctggtggtgttaatcaactatctgctgccgcaaaaagcgtttggtctgctgatggcgctggtggtagcaacgctgctgttgaactggattatgatctgtctggcgcatctgcgttttcgtgcagcgatgcgacgtcaggggcgtgaaacacagtttaaggcgctgctctatccgttcggcaactatctctgcattgccttcctcggcatgattttgctgctgatgtgcacgatggatgatatgcgcttgtcagcgatcctgctgccggtgtggattgtattcctgtttatggcatttaaaacgctgcgtcggaaataa

SEQ ID NO: 5194 - DNA, 1355 bp, Homo sapiens
  SIMILAR (112)..(294): 601254mologous to Mus musculus putative,accession number AK014324,Smith-Waterman Score=168.
tcaaaaatactgccatttccccagcacagtgtctttgattgcatccacatattgagttggaacccagtacacccaatagtaagaggcttccgtggggcccaactgaaacgcctccagcggctggtgagcaatgagagccagaggcgccagctggtggggaagctgcaggtccttgtggaggaggcctttggttgccagctgcaaaacagggatgtcctcaacccagtctacgtggagaggatcctcctgtggactcgccctgcagtaggtcgagcacagctggacgccatctcggagaaggtggatgtgattgccaagcgtgtgccatgcttttataacgagatcgctgtaaaaaccgttttgtgccatgtaactggcgtacattcccatgtagtctgaacgtgcggtaccgtcgcctccgctatagtccggcgatgcatgtgttgagccaatatacagaccgacatacaacggcattacatcagagagacgtttatccccaccaaactggataccgctgtaacccatgtcaaagccgctcagtttgccactggcaaaggagtccaggcttcccccataactgcgcaaccagatattaccgtctttactctgatttcgcaggtcacccatccgttgcatcagcgtacggctttcaacatagttcaataagtaaccgacattgagataattgccgccagcatctgcggtcgtggtgggtttaggcgtgggagcgggttcaggcgtaggatcggggttgactatgggaggctgctccaggcggaagcggatcgcaggcttggggtctttggccagcttctgggccacctgctcctggctcatgttcctgcaccgattgtcataccggggcgtctggtggttccgcaaggcctccttcttcaggagctccagccgctggggtgagcagaaacaggggtaagcagctccggtcttcagcagcgcttctgtggcctgggcatacagctccaaccgctgagattgcttgtagggcccagcaggaccgccccggcgggggctctcatcaggcgggatgcctgcccactccagcatgtcctcaatattctctgctgccccaggcacaacgcgagtctgatctgtgtcctctagcctcaggatgaagctcccctggtacttcttagcaaagatgtagttgtacaaggcagtgcggaggccacccaggtgcaagaagcctgtggggctgggagcgaaccgcactcgcaccgcaaccccggcatcagtgcccaggttggcctcgcgccgtcctacggggcggccagaggccgccgaaggcctctcgcgctgcagcagtctcctcaggagcgccgccatgtgggatg

SEQ ID NO: 5195 - DNA, 451 bp, Homo sapiens
  misc_feature (1)...(451): n = a,t,c or g
caggggtgtcttagtgaagcaagcagtttcctcatgggctaggctcggactctcatagaagttattggactctcacatcataatcaaaaagctcatgccatgttactaaatgcgttctgaagctcaatcagggcctcaccgtagagaagtggttattagtcatcgctatggaaccagacctccaggtttcaaataccagctccaacactnnnnnnnnnnnnnnnnnnnnnnnnnnnnnnnnnnnnnnnnnnnnnnnnnnnnnnnnnnnnnnnnnnnnnnnnnnnnnnnnnnnnnnnnnnnnnnnnnnnnaaaccagacgtgtgtgtgctggcacgcatgtgcgtacgcatcatttaatagaccgccctggtctataggaagaacttccgaagtgataaatgctatccactaccattccctgccctggcactccatgctctagggaggcgcc

SEQ ID NO: 5196 - DNA, 1996 bp, Homo sapiens
  SIMILAR (848)..(1543): 901254mologous to Homo sapiens Gene product with similarity to Ubiquitin binding enzyme,accession number AC002400,Smith- Waterman Score=1069.
atgggctcgcgctgccttaaccctcctccgcccgcccactctgacaccaccggaaaggattcattcgggaacattcgtggggcggagacgggacagggggcctcggcctgtagcgtcacgtccgccagggttacctgtggggctgggagcgaaccgcactcgcaccgcaaccccggcatcagtgcccaggttggcctcgcgccgtcctacggggcggccagaggccgccgaaggcctctcgcgctgcagcagtctcctcaggagcgccgccatgtgggatggaatagcacacgtgggcttctccctgcgtcacttccggggactgcttccagccaatcggcctccgccacagccagcgcagccttgccccttaaagtcacaggccccctagcgcgaaatcccacgcccccctggacggctgcggccgcactcgccaccagggggcagaggccagagaaagggctatttcccggacccgcccccttcagcttgggaaagcgaaagcgtggcaggggccggacctgggagcggaggaggcgggtctccatagaaacctccacctgtttccggccgggctgtgagagattaggggctgctgcgggggccaatctcagccagctcgcctcttcccagcggcctctgcgggagcggtgggtgttgtacacaatcatcatggcggcggccggggccccggatggcatggaggaacctggcatggacacggaggccgagactgtggctactgaggctcccgcgcggcccgtcaactgcttggaggccgaagccacggcaggagcgggggcagggacggtggccgaggactccggcaccgcgcgaggcagcctgcagcctgcagccggccccagcccaggcccctggagaccccgtgtcccaggcttctgtcagcaacggcgaagactcgggcggcagcgcagacagcgagctggtggacctgaggatcatctggaacaagaccaagcacgacgtgaagttccccctggacagcacaggctccgaactgaaacagaagatccactcgattacaggtctcccgcctgccatgcagaaagtcatgtataagggactcgtccccgaggataaaacattgagagaaataaaagtgaccagtggggccaagatcatggtggttggctccaccatcaatgatgttttagcagtaaacacacccaaagatgctgcgcagcaggatgcaaaggccgaagagaacaagaaggagcctctctgcaggcagaaacaacacaggaaagtgttggataaaggaaaacctgaagatgtgatgccatctgttaagggggcccaggagcgcctgccaacggtaccgctgtccggcatgtacaataaatctggaggaaaagtgagactcacctttaaactagaacaagaccagctgtggattggcactaaagagcggactgagaaattgcccatgggctccataaaaaaatgtggtcaagtgaccctatccgaaggacatgaagactaccacaatgatggccgtttccagttggcccccacggaagccctcttactactgggtgtactgggttccaactcaatatgtggatgcaatcaaaagacactgtgctggggaaatggcagtatttttgaaagcactttcacctcttggccccaggaggactgaccccaaagtgaaggacatttgccgggaagaggcctgcagcatccctggaatttcagagttctggaactttgttcataaaaaatctatattcaatctgaggtgatgtggtgactgaagccagaggtgatgtactttcaccattaagcttaattttaactttaaattaccagttcccttccttgcagtcaagcttcataccatttttaaagtcaatacgatggaaatcaataaatctgaattccgaacatgttgtgtggaatactcttaagtgtgtttgagagtagatctgccaattatgttgacaagggaatgatcaaaagctttgtttttttt

SEQ ID NO: 5197 - DNA, 299 bp, Homo sapiens
  SIMILAR (2)..(220): 711254mologous to Homo sapiens Human secreted protein encoded by DNA clone vp10 1,accession number AAB34688,Smith-Waterman Score =245.
  misc_feature (1)...(299): n = a,t,c or g
aaggcctctccaaagtcaacaaaacagccagcgggcgggaactgttatgatcacctccacatctcagaccaaagggtcgtcctcccccagaatttctcactcctgcccttcttccacagcgtatgtggggaggtggaggggtccatgtggaccaggcgcccagctccccccaaatattgggcagccctgtccttaccccggaccacccctcccttccagctatgtgtacaataatgaccaatctgtttggctnnnnnnnnnnnnnnnnnnnnnnnnnnnnnnnnnnnnnnnnnnnnnnn

SEQ ID NO: 5198 - DNA, 619 bp, Homo sapiens
  SIMILAR (216)..(359): 971254mologous to Homo sapiens Human secreted protein encoded by Gene No. 9,accession number AAW73405,Smith-Waterman Score=245.
  misc_feature (1)...(619): n = a,t,c or g
gtggacttctcttgctgtggtgccatcttgttcnccgtagtctggtccatccggcatctccagaatgcgtctggcacagacggaaggtggcagtgaacctggccaagctgaagctgttccggcattactatgtcatggtcatctgctacgtctacttcacccgcatcatcgccatcctgctgcaggtggctgtgccctttcagtggcagtggctgtaccagcccacaggaaacaacccgtacctgcagctgccccaggaggacgaggaggatgttcagatggagcaagtaatgacggactctgggttccgggaaggcctctccaaagtcaacaaaacagccagcgggcgggaactgttatgatcacctccacatctcagaccaaaggggtcgtcctcccccagcatttctcactcctgcccttcttccacagcgtatgtggggaggtggagggggtccatgtggaccaggcgcccagctccccgggaccccggttcccggacaagcccatttggaagaagagtcccttcctccccccaaatattgggcagccctgtccttaccccgggaccacccctcccttccagctatgtgtacaataatgaccaatctgtttggct

SEQ ID NO: 5199 - DNA, 465 bp, Homo sapiens
  SIMILAR (1)..(231): 611254mologous to Homo sapiens Human secreted protein encoded by Gene No. 9,accession number AAW73405,Smith-Waterman Score=213.
  misc_feature (1)...(465): n = a,t,c or g
gccgctggcatcttctgggtgtccatcctctgcaggaacacgtacagcgtcttcaagatccactggctcatggcggccttggccttcaccaagagcatctctctcctcttccacagcgtgagagccttggactggggagcagcggggggtgggctgaaaggcccacccgggccatcccccaaatctctgcagaccctgggcctgtgggagggccatccgccagctatccacgtgtccacccattttaccagtgtggccagtcacccatcccctctgtccaccagtcctgcggggcagctctgtccaccactgtcccttggttcagctgtgactgtccgtctctgattgtccaaccattcaccccatcagctcgtggctgttccctccattttttcagacacgaataccagttttgagtcccacccatgtattcgnccgcgctgtnttctnncaaggtttgtaaaa

SEQ ID NO: 5200 - DNA, 509 bp, Homo sapiens
  SIMILAR (64)..(123): 351254mologous to Homo sapiens Human secreted protein encoded by DNA clone vp10 1,accession number AAB34688,Smith-Waterman Score =41.
ttccccgtagtctggtccatccggcatctccaggatgcgtctggcacagacgggaaggtggcagtgaacctggccaagctgaagctgttccggcattactatgtcatggtcatctgctacgtctacttcacccgcatcatcgccatcctgctgcaggtggctgtgccctttcagtggcagtggctgtaccagctcttggtggagggctccaccctggccttcttcgtgctcacgggctacaagttccagcccacagggaacaacccgtacctgcagctgccccaggaggacgaggaggatgttcagatggagcaagtcgtatgtggggaggtggagggggtccatgtggaccaggcgcccagctccccgggaccccggttcccggacaagcccatttggaagaagagtcccttcctccccccaaatattgggcagccctgtccttaccccgggaccacccctcccttccagctatgtgtacaataatgaccaatctgtttggctaaaaa

SEQ ID NO: 5201 - DNA, 3198 bp, Homo sapiens
  SIMILAR (368)..(838): 611254mologous to Homo sapiens Human regulatory protein HRGP- 7,accession number AAY28921,Smith-Waterman Score=448.
atggcagtgagcgagaggagggggctcggccgcgggagccccgcggagtgggggcagcggctacttctggtgctgctgctgggtggctgctccgggcgcatccaccagctggcgctgacgggggagaagcgagcggacatccagctgaacagcttcggtttctacaccaatggctctctggaggtggagttgagcgtcctgcggctgggcctccgggaggcagaagagaagtccctgctgacccgggatttccaggactgccctctccagaaaaacagtagcagtttcctggtcctgttcctcatcaacaccaaggatctgcaggtccaggtgcggaagtatggagagcagaagacgttgtttatctttcccgggctcctcccggaagcaccctccaaaccagggctcccgaagccacaggccacagtcccccgcaaggtggatggcggagggacctctgcagccagcaagcccaagtcaacacccgcaagtgattcagggtcctagtgggaaggacaaggaccctgggtgttggggccttgagccacctcaacaactccctacaactttcagttttccacgttggtgatcgggcttcttcagggcggaaagaaaggccaagtacagcctgaacttccacaactgcaacaattcagtgccaggaaaggagcatccattcgacatcacggtgatgatccgggagaagaaccccgatggcttcctgtcggcagcggagatgccccttttcaagctctacatggtcatgtccgcctgcttcctggccgctggcatcttctgggtgtccatcctctgcaggaacacgtacagcgtctttcaagatccactggctcatggcggccttggccttcaccaagagcatctctctcctcttccacagcgtgagagccttggaccggggagcagcgggggccccgattaccagttttgagtcccacccaccgtcctcattattcaactttctgaccacccatctgatggtgacggtccgtgttcctaatcccccaccaccaccatcagcctcccacccctctgtgcgcctcactgtccgtctgtccatccacccccagatcaactactacttcatcaacagccagggccaccccatcgaaggccttgccgtcatgtactacatcgcacacctgctgaagggcgccctcctcttcatcaccatcgccctgattggctcaggctgggccttcatcaagtacgtcctgtcggataaggagaagaaggtctttgggatcgtgatccccatgcaggtcctggccaacgtggcctacatcatcatcgagtcccgcgaggaaggcgccagcgactacgtgctgtggaaggagattttgttcctggtggacctcatctgctgtggtgccatcctgttccccgtagtctggtccatccggcatctccatggatgcgtctggcacagacggcgaatggtggcagtgaacctggccaagcttgaagctgttccggcattactatgtcatggtaggagcccgcctcactcacagcgggtttggggggattaccggcctgctgcacgcccaccccagcccctcagctgctgccccatcccgaggcccccatccaggctccccagcccgcatcctgcagtctagccccatgcctgcccgtgcccctacagtcctggccccacgcctgctcgcgcccctgcaggtcatctgctacgtctacttcacccgcatcatcgccatcctgctgcaggtggctgtgccctttcagtggcagtggctgtaccagctcttggtggagggctccaccctggccttcttcgtgctcacgggctacaagttccagcccacaggaaacaacccgtacctgcagctgccccaggaggacgaggaggatgttcagatggagcaagtggaagcccacacattgaaactattagtcaaagacattaaatcaactgtctccaatgtgttcagtgagatgaaggaaaatatggacaaagaactaaagcagatcatgagaatgatatatgaaagaaggatctgtgtggcagaccccttcgaggtcacagtaatgcaggacttcttcatcgacctgcggctaccctactctgttgttcgaaacgagcaggtggaaatccgagccgttctctacaattaccggcagaaccaagagctcaaggtgagggtggaactactccacaatccagccttctgcagcctggccaccaccaagaggcgtcaccagcagaccgtaaccatcccccccaagtcctcgttgtccgttccatatgtcatcgtgccgctaagaccggcctgcaggaagtggaagtcaaggctgctgtctaccatcatttcatcagtgacggtgtcaggaaaaggagtgcagaaagaggacatcccacctgcagacctcagtgaccaagtcccggacaccgagtctgagaccagaattctcctgcaagggaccccagtggcccagatgacagaggatgccgtcgacgcggaacggctgaagcacctcattgtgaccccctcgggctgcggggaacagaacatgatcggcatgacgcccacggtcatcgctgtgcattacctggatgaaacggagcagtgggagaagttcggcctagagaagcggcagggggccttggagctcatcaagaaggggtacacccagcagctggccttcagacaacccagctctgcctttgcggccttcgtgaaacgggcacccagcacctggctgaccgcctacgtggtcaaggtcttctctctggctgtcaacctcatcgccatcgactcccaagtcctctgcggggctgttaaatggctgatcctggagaagcagaagcccgacggggtcttccaggaggatgcgcccgtgatacaccaagaaatgattggtggattacggaacaacaacgagaaagacatggccctcacggcctttgttctcatctcgctgcaggaggctaaagatatttgcgaggagcaggtcaacatacataatagatatgcagcaacaaggcagctcatggtggctaaaatatctgggaaattctcaaaaatggacaaatctaagacagctggcttggcggattgtcattctgtcctggatgtgtctaataagggcgtcttgcgggatgtagcctctacttcctcaggaattgtggattggagaggaagccagatccagacgtga

SEQ ID NO: 5202 - DNA, 999 bp, Homo sapiens
  SIMILAR (342)..(590): 511254mologous to Homo sapiens Human regulatory protein HRGP- 7,accession number AAY28921,Smith-Waterman Score=165.
ctccgtcaacccacgcgtccggtctttgggatcgtgatccccatgcaggttctggccaacgtggcctacatcatcatcgagtcccgcgaggaaggcgccagcgactacgtgctgtggaaggagattttgttcctggtggacctcatctgctgtggtgccatccttttcccgttagtctggtccatccggcatctcaaggatgcgtctggcacagacgggaaggtgccagtgaacctgcccaagctgaagctgttccggcattattatgtcatgtcctgcccccacgccttgtgcgcccctgcaggtcatctgctacgtctacttcacccgcatcatcgccaatcctgctgcaggtggctgtgccctttcagtggcagtggctgtaccagctcttggtggagggctccaaccctggccttcttcgtgctcacgggctacaagttccagcccacagggaacaacccgtaccttgcagttgccccaggaggacgaggaggatgttcaagatggagcaagtaatagacggactctgggttccgggaaggccttctccaaaagtcaacaaaacagccagcgggcgggaactgttatgatcacctccacatctcaagaccaaagggtttgtcttccccagcatttttttactcctgcccttttttcaaaaggttatgtggggaggtggagggggtccatgtggaccaggcgcccagctccccgggaccccggttcccggacaagcccatttggaagaagagtcccttcctccccccaaaatattgggcagcccttgccttaccccggggaccacccctcccttccagctatgtgtacaataatgaccaatcttgtttggctacgccgttgtcttgcctttttgggggttggggtctacacggaggttgtgtttacaatgtagaaacctgttttcgctgtgtgtggcgggggcgcgggcacagggtccgtgtctttgtatattcaaaaaatattcattcagtaaaa

SEQ ID NO: 5203 - DNA, 827 bp, Homo sapiens
  SIMILAR (116)..(286): 1001254mologous to Chimeric - Homo sapiens Chimeric pig/human liver ribonuclease inhibitor,accession number AAW48637,Smith- Waterman Score=286.
  misc_feature (1)...(827): n = a,t,c or g
tcctgagttgccgagttcaggtgtccgtcgcgccccccaggcccaggcctgctctgccggtcagcgcggtgccaggcacgcccggcaccctgacccccgccctgcttcacccaggttggccgactgcgatgtgagtgacagcagctgcagcagcctcgccgcaaccctgttggccaaccacagcctgcgtgagctggacctcagcaacaactgcctgggggacgccggcatcctgcagctggtggagagcgtccggcagccgggctgcctcctggagcagctggtgtatgtgcaacgcgctgggcgggtggtgcggccagggctgcccagggaggaaggcgggggtgggggaggacactgggcccatgcctcccttctggcctgtgtgcagcctgtacgacaatttactggtctgaggagatggaggaccggcttgcaaggccctggagaaaggacaagcacatccctgaggggtcatctcctgaggctcttcctgctgctggctgctgccctggacgaccggcctngagggcaacgcctgggggcccaccagcccctgccatggctctcaccctcgcatatcctaggtttggaagagaaacgcctgcagaatccggcttatttctgccgagtatattttgagacactttataatcatataaagcactttcttggcnnnnnnnnnnnnnnngggggggcccttttaaaggaaccaagtttaataaccgcgggagggcaagaaaaaatttttttaagggggccccaaaaatcaattcccgggccggggtttaaaaacggcggggagggaaaaaccctgggtgtacccc

SEQ ID NO: 5204 - DNA, 430 bp, Homo sapiens
  SIMILAR (46)..(330): 971254mologous to Homo sapiens A20-binding inhibitor of NF- kappaB activation-2,accession number AJ304866,Smith-Waterman Score= 497.
gagaaaataaatgactgtgccgaagtgaagcaggagctggcggcctccgatcgggaacgggctcaaagtaggattcaagaactggaggaaaaggtcgcctctttgctgcaccaggtgtcctggagacaggattctcgagagccagacgccggccggattcacgctgggagcaaaactgccaagtatttggctgccgacgcattagagcttatggtgcctggtggctggaggcctgggactgggtcccagcagctagaaccccctgcagagggcgggcatcctggcgcggcccagagaggccagggggaccttcagtgccctcactgtctgcactgagaaactgcatttcagtagcatttgtcatccagccggaagttaaagtacacttactgtattcacctatttttataataaacgttcttgctgctgt

SEQ ID NO: 5205 - DNA, 1147 bp, Homo sapiens
  SIMILAR (591)..(761): 681254mologous to Homo sapiens A20-binding inhibitor of NF- kappaB activation-2,accession number AJ304866,Smith-Waterman Score= 177.
  misc_feature (1)...(1147): n = a,t,c or g
gcggccgcgcggcctcccgggcgggcctacagccatgtcccgggacccggggtcgggcggctgggaggaggccccgcgcgcagctgccgcgctctgcaccctgtaccacgaggccggacagcggctgcgccgcctgcaggaccagctcgctgcccgcgacgccctcatcgctcgcctccgcgcccgcctggccgcgctggagggggacgccgcgccgtccctagtggacgcgctgctggagcaggttgcgcgcttccgggagcagctgcgaaggcaggagggcggcgccgccgaggcccagatgcgccaggtacgagggcgggtaccagaggagctgcgggagcgagagtgcgtgtggcggccgccgggtcctgggcagttctctgaggcagcaccaaggttcatgcagaaacacacgcgctgggatgttctgtggcagacagtacatcccgcacccatcagcagcttcaccgaggcgcccactggggagaagtcggaacacacagatgggcacacctctgtccagagtgttattgagaagttgcaggaagaaaatcgactgttaaaacagaaggtgactcacntcagggggctgcagatcccccacgagcccgagctgatgaggaaggagatctcccggctcaacaagacagttggaagagaaaataaatgactgtcccgaagtgaagcaggagctggcggcctccaggacggcccgggatgctgcgttggagcgggtgcagatgctggaacagcaggtgtctgtccctcgggctccggacggcactgaccagatgtctgctggccggtggtggccgaaatcatgggacaggctgggctgaaggcttggtggcactgagtgggcagtggtcacggtgggggtgggagaagcctgggggggcgcttcctccttccttgagcagaaatgtgtgtctcgcctctcttcagattctcgcttacaaggatgacttcatgtcagaaagggccgatcgggaacgggctcaaagtaggattcaagaactggaggaaaaggtcgcctctttgctgcaccaggtgtcctggagacaggattctcgagagccaaacgccggccggattcacgctgggagcaaaactgccaagtatttgggcgccgacgcattatagg

SEQ ID NO: 5206 - DNA, 1271 bp, Homo sapiens
  SIMILAR (1206)..(991): 981254mologous to Homo sapiens signal transducer and activator of transcription 6, interleukin-4 induced,accession number BC004973,Smith-Waterman Score=366.
gtagagattggatctccctatgtagcccaggctggtcttaaacttgcaggctcaagcgatcctcctaccttggcctcccaaagtgctgagttgttttgttttgtttttgagacatagtcttgctctgtcgcccaggctgaagggcagtggcgcaatcttggctcactgcaacctccgcctcctgggttcaagcgattctcctgcttagcctcccgagcagctgggactacaggcctgcaccaccacgcccagctaatttttgtatttttagtggagacggggtttcaccatattggccaggctggtcttgaactcctgaccttgtgatctacccacctcggcctcccaaagtgctgggattacaggcttgagccaccatgcccagccggacaggggtttcttagttaagcaagaagtttcctcaggggactggctgtgagcactcacagaagttattggactccacacattcataatcaaaaagctcactgccatgttattaaaatgcgttctgaagctcaatcagggcctcaccgtagagaagtggttattagtcatcgctatggaaccagacctccaggtttcaaataccagctccaacacttagctgtgtgactgggacaaactacttaaactctctgtctcaatgtccttatctataaaatgaggctgataatactgcctacctcataatgttattgtgaaaaccagacgtgtgtgtgctggcacgcatgtgcgtatgtatcatttaatagagtgccctggtctataggaagtgcttccgaagtgtttgctgctatccactaccattccctgccctgtgcactccatgctcttgctcacccccactcacccgggccccagtgtgcatgaatcccagacacatggggtatggggcagtcacaagaggtgagggtccagggcccttgtgtgtggcattggaggaggactcggggtcccagattggggcagggctgggccacggttcacctggagctggatggggagtttgccggggccaagtgtgaagctggcagagaagagcacagcgcacttctcctctgtgacagactcagtgcccttccgctcacaccgcttgatcttcttgagaagcaggttcttgaacagggcagagcagcagttcccaggaatgctgttctccaagggcacagtgttgttgatgatttctccagtgctttctctgccaggggaggtcagagtgtgaacgagctcatctcactgtcgtcaggtgtggcgagtgcatgggtgag

SEQ ID NO: 5207 - DNA, 1761 bp, Homo sapiens
  SIMILAR (400)..(957): 981254mologous to Homo sapiens A20-binding inhibitor of NF- kappaB activation-2,accession number AJ304866,Smith-Waterman Score= 931.
  misc_feature (1)...(1761): n = a,t,c or g
gaaattgagaggctgactgagcgactagaagaaaaagagagggagatgcagcagctgctgagccagccccaacacgagcgagagaaggaagtcgtcctgctacggaggagcatggcagaaggggagcgcgcccgggccgccagtgacgtcctgtgccgctccttggccaacgagacccatcagctgcggaggacgctgaccgccaccgcccacatgtgtcagcatctggccaagtgtctggatgaacgacagcatgcacaaaggaatgtgggggagagaagtcctgaccagttctctgaggcagcaccaaggttcatgcagaaacacacgcgctgggatgttctgtggcagacagtacatcccgcacccatcagcagcttcaccgaggcgcccactggggagaagtcggaacacacagatgggcacacctctgtccagagtgttattgagaagttgcaggaagaaaatcgactgttaaaacagaaggtgactcacgttgaagacctcaatgccaagtggcagcgctacaacgccagcagggacgaatacgtgagggggctccatgcgcagctcagggggctgcagatcccccacgagcccgagctgatgaggaaggagatctcccggctcaacagacagttggaagagaaaataaatgactgtgccgaagtgaagcaggagctggcggcctccaggacggcccgggatgctgcgttggagcgggtgcagatgctggaacagcagattctcgcttacaaggatgacttcatgtcagaaagggccgatcgggaacgggctcaaagtaggattcaagaactggaggaaaaggtcgcctctttgctgcaccaggtgtcctggagacaggattctcgagagccagacgccggccggattcacgctgggagcaaaactgccaagtatttggccgccgacgcattagagcttatggtgcctgggtagctggaggcctgggactgggtcccagcagccagaaccccctgcagagggcgggcatcctggcgcggcccagagaggccagggggaccttcagtgccctcactgcctgcagtgcttcagtgacgagcaaggggaagagctcctcaggcatgtggccgagtgctgccagtgaccgagactcacccgtgccctttctggcctcctggcccggtgcagctgccctcatggacagggtgggtgctctcagatgccatgggttgagctctactgagagccaaggcccctagaatagttgcggggcactctgatcgttcactttggtccctttgggctatggaacaggctgggtcacagggaaactgccaagtgaggctggaaggctggaggtggagatggggtcaggaacatctggcagagggaggtcccaagtctgtgtctccgatccaggcttaagccagagcttatcctggtgctggtgtgccagcccccctcccccagcctgccctanaaaggggtggctgcctgagggagtcacttgtatggtccccagggtgggagccccatcctgttctatggaataaagcgtcgcctctctgcctcgaaacctagtcataatggagtatttgcggctgcacgtcacaactagggtggccaccccccgccattgcgagccacatgtctgcactgagaaactgcatttcagtagcatttgtcatccagccaggaatgttaaagcacacttactttattcacctatttttataataaacgttcttgctgctgtgaaaaaaaaaaaaaaaaaaa

SEQ ID NO: 5208 - DNA, 1261 bp, Homo sapiens
  SIMILAR (3)..(113): 671254mologous to Homo sapiens Human secreted protein encoded by DNA clone vq3 1,accession number AAB34695,Smith-Waterman Score= 111.
tttttttgagacagagtctcgctctgtcgcctaggctggagtgcagtggtgcaatctcggcttactgcaccctctgcctcccgggttcaagtgattctdttgcctcagcctccrggggtagctgggattacaggcgagcaccaccacgcccggctaattttrgtatttttagtagagatggggtttcaccatgttggtcaggctggtctcgkactcctggaccttgtgatccacccacctcggcctcccaaagtgctgggattacaggcatgagccactgcgcctggccgagtagagaagaatttactgctgattaaggttgtgtttttcaacctgcaatcccgagaccctcagaataaagattacttgaggttgctatgaaaaatacagattcctgtcctccccctggctgaatcagaatctcataaggtgaggctcaggtttctgcacttttcacaagctctgtaatggttacagtgcaccctaatgtttgagaaccagtggcctaaagagaatgcaacctaagagggcaaggctagtgcatagcttaaatcgctccagcctttggtaatcccttctaaacacagtaccacccatgtggaggagactgcaaggaagctgttattcaaagtagaacagtcagccttgtgcttgagtcctgctttatgcttgcgtgtttcataacaaaacacaaaggcaagtcttcatatcagcacttagtcttgatatccaagtagctgactactgtacttatgataacagcttgaagaggactgcaactctcccctcacgaatggtgacagagttggcttgtcacacctggctcagggaagaaaaatgagtaaacccctacctctttactcttgattcctcttccaccctaatactgttaacacatcatcctgtgtgattcaaataatctggcagatgaaatacagaaaatctaagtcatattgttcttatcactctatggccagatattatagtaatctaattttaaaaatccttttctgtgcaatagaaataaccaaagctcattctgtctcctttcctttctaatgctgttgataggaacaaaatatcaagtaaggatacatgctagagatgttaaattcatacaagtaaagtaaattacaaagagaggtggtaatatttttttctagaatttcacaataaaatccctctcaccatgaaaatctttttataattttaacaggaaacttaaaagacattttgttgcaagactatcttaacctcgtgc

SEQ ID NO: 5209 - DNA, 807 bp, Homo sapiens
  SIMILAR (12)..(338): 961254mologous to Homo sapiens hypothetical protein,accession number AL110147,Smith-Waterman Score=576.
gtgattatagtcttggtttacctgtggtgacaaccgggtgttggggacacatgtcaaatgcccctctgagatgggccctaaatcccagttactggggaaagaaccagctgctgtgtcctgagagcctggccctgtgctgtggtctctgctgcaagcccagatttttggaagtaactagtgttaggtctgctgacctttacctaagcagcccctgcctggtaagaaggtgcccattgttcagaggcaaagagaagcctgcggttggcatgaggatgcctgacaacaaaggctggagaagggccctgagttccagcctctccccaaggggtcccgcgccccagtggctgcctctgtcttgacctgtgtaatgaattagtgtgctgtgtcactgtggcttgaagtcactgtggatcaagctcacagggggcacccatcctgttgtcaacagagtctgaagcagtcagggtgttggattcctctgttgttgtcatcaattcctgctgaggggtttctggggttttgtttttaataaatgactcctttgtagcctttgtcacataatcttcactttggttgttggtaccaaacagagctcccagccatctcctccctgttctggaagactgatgggaagactctgtctgtccccagacctggtcatctgcagctctggcccagtcatagatacatcaaagaactgaagcttctgctgtccacagaactcaaaactgcctctgcattgggtgaagactaaaaatccacttgcggacttttcctttctttcttctcaagcccttaggggatgag

SEQ ID NO: 5210 - DNA, 2046 bp, Homo sapiens; identical to SEQ ID NO: 4708
  SIMILAR (733)..(1380): 1001254mologous to Homo sapiens Human NIP2b protein,accession number AAY70847,Smith-Waterman Score=1147.

SEQ ID NO: 5211 - DNA, 512 bp, Homo sapiens
  SIMILAR (126)..(212): 621254mologous to Homo sapiens Human secreted protein, SEQ ID NO: 7870,accession number AAG03789,Smith-Waterman Score=100.
ctgccgaccctcccagtccttctttttgtttttgtttttttttttttgagacagagtcttgctctgtcacccaggctggagtgcagtggtgccatcttggctcactgcaacctctgcctcccacatgccaccatgcctgggtaatttttgtatttttagtagagacagagtttcaccatgttggcgaggatggtctcaatctcctgacttcatgatctacctgcctcggcctcccaaagtgctgggattacaggcctgagccatcacacctggctggcctcatcacactttctaaacgactattattaactcatttcccagatgagaaaactgaagctcagaaagatcaagcgacctgcccaatatcccaaagctattaagtgcctattcttcctgcctgccatacttcccttccctctgtcttcccctttgcctacttaactgtgattcaacccaaagagaaatttccccaggaaagcctttcctaaacatcttgccttggccaacctctc

SEQ ID NO: 5212 - DNA, 480 bp, Homo sapiens
  SIMILAR (1)..(327): 1001254mologous to Homo sapiens N-acetylgalactosamine 6- sulfate sulfatase (GALNS),accession number D17629,Smith-Waterman Score=612.
  misc_feature (1)...(480): n = a,t,c or g
ggatttgatgagtggtttggatcccccaactgccactttggaccttatgacaacaaggccaggcccaacatccctgtgtacagggactgggagatggttggcagatattatgaagaatttcctattaatctgaagacgggggaagccaacctcacccagatctacctgcaggaagccctggacttcattaagagacaggcacggcaccacccctttttcctctactgggctgtngacgccacgcacgcacccgtntatgcctccaaacccttcttgggcaccagtcagcgagggcggtatggagacgccgtccgggagattgatgacttccagttccgtctgtcctttgtccacaaggaatttccctggacgctaattatgagggaggcgtgtagcttcttatcattgtaactatgttatttagaaataaaacgggaggcaggtttgcctaattcccagcttgaaaaaaaaaaaaaaaaa

SEQ ID NO: 5213 - DNA, 464 bp, Homo sapiens
  misc_feature (1)...(464): n = a,t,c or g
ccaagaagtgcctctggtcccactagcacctgcgcagactcaggccaggcctagaatctccagttggccctgcaagtgcctggaggaaggatggctctggcctcggtcctcccccaaccctgcccaagccagacagacagcacctgcagacgcagggggactgcacaattccacctgcccaggacctgaccctggcgtgtgcttggccctcctcctcgcccacggcgcctcagatttcaggaccctcctcctcgcccacggcgcctcagacctcaagaccctgccgtctcacgcctttgtgaaccccaaatatctgagaccagtctcnnnnnnnnnnnnnnnnnnnnnnnnnnnnnnnnnnnnnnnnnnnnnnnnnnnnnnnnnnnnnnnnnnnnnnnnnnnnnnnnnnnnnnnnnnnnnnnnnnnnnnnnnnnnnnnncaagatcagtatgtgtatggcgtac

SEQ ID NO: 5214 - DNA, 503 bp, Homo sapiens
  SIMILAR (294)..(503): 1001254mologous to Homo sapiens N-acetylgalactosamine 6- sulfate sulfatase (GALNS),accession number D17629,Smith-Waterman Score=411.
cccgttctgaagagcagccgcaagctggattcgttccaggacaggacaggctgcgcaaggaaacccggacagctggcctgggggccagggcgagtgggcacagaggtgtggcctgcagggctgctgtgggccggaggatgagattaggtgccaccagagggcatagcccatactcagtgctggagggtgctcgtcttaccaagaattttgtgaaggtggtatctgttgctgctcagaacttccgagtgtccccacgtggggtccctgaagtgtcctgggttcctgtttccaggcatctgggtcacaggccccagttccaccccctgaagcacggatttgatgagtggtttggatcccccaactgccactttggaccttatgacaacaaggccaggcccaacatccctgtgtacagggactgggagatggttggcagatattatgaagaatttcctattaatctgaagacgggggaagccaacctcacccagatctacctgcag

SEQ ID NO: 5215 - DNA, 2312 bp, Homo sapiens
  SIMILAR (1)..(1527): 971254mologous to Homo sapiens N-acetylgalactosamine 6- sulfate sulfatase (GALNS),accession number D17629,Smith-Waterman Score=2664.
  misc_feature (1)...(2312): n = a,t,c or g
atggcggcggttgtcgcggcgacgaggtggtggcagctgttgctggtgctcagcgccgcggggatgggggcctcgggcgccccgcagccccccaacatcctgctcctgctcatggacgacatgggatggggtgacctcggggtgtatggagagccctccagagagaccccgaatttggaccggatggctgcagaagggctgcttttcccaaacttctattctgccaaccctctgtgctcgccatcgagggcggcactgctcacaggacggctacccatccgcaatggcttctacaccaccaacgcccatgccagaaacgcctacacaccgcaggagattgtgggcggcatcccagactcggagcagctcctgccggagcttctgaagaaggccggctacgtcagcaagattgtcggcaagtggcatctgggtcacaggccccagttccaccccctgaagcacggatttgatgagtggtttggatcccccaactgccactttggaccttatgacaacaaggccaggcccaacatccctgtgtacagggactgggagatggttggcagatattatgaagaatttcctattaatctgaagacgggggaagccaacctcacccagatctacctgcaggaagccctggacttcattaagagacaggcacggcaccacccctttttcctctactgggctgtcgacgccacgcatgcacccgtctatgcctccaaacccttcttgggcaccagtcagcgagggcggtatggagacgccgtccgggagattgatgacagcattgggaagatactggagctcctccaagacctgcacgtcgcggacaacaccttcgtcttcttcacgtcggacaacggcgctgccctcatttccgcccccgaacaaggtggcagcaacggcccctttctgtgtgggaagcagaccacgtttgaaggagggatgagggagcctgccctcgcatggtggccagggcacgtcactgcaggccaggtgagccaccagctgggcagcatcatggacctcttcaccaccagcctggcccttgcgggcctgacgccgcccagcgacagggccattgatggcctcaacctcctccccaccctcctgcagggccggctgatggacaggcctatcttctattaccgtggcgacacgctgtatggcggccacccttcgggcagcacaaggctcacttctgggacctggaccaactcctgggagaacttcagacagggcattgatttctgccctgggcagaacgtttcaggggtcacaactcacaatctggaagaccacacgaagctgcccctgatcttccacctgggatgggacccaggggagaggttccccctcagctttgccagcgccgagtaccaggaggccctcagcaggatcacctcggtcgtccagcagcaccaggaagccttggtccccgcgcagccccagctcaacgtgtgcaactgggcggtcatgaactgggcacctccgggctgtgaaaagttagggaagtgtcttgacacctccagaatccattcccaagaagtgcctctgggtcccactagcacctgcgcagactcaggccaggcctagaatctccagttggccctgcaagtgcctggaggaaggatggctctggcctcggtcctcccccaaccctgccccaagccagacagacagcacctgcagacgcagggggacttgcacaatttccaacttgcccaggacctgaccctggcgtgtgcttgggccttccttcctcgcccaacgcgcctcagatttcaggaccctcctcctcgcccacggggcctcagaccttcaggaccctgccgtctcacgcctttgtgaacccccaaatatcttgagcccagtctccagtttattttgcccaaggttaaggatgcaccctgtgaacaaccccccagaaggcccctgacaacaggtgccctgaggtggcctgggggataccagtttgccctttaatacaccttaggggagccaccaagatcaagtatgtgtatggcgtacattggttcagtcagccttcccactgaatacacggattgagtctggcccagtgaatccgcattttttatgtaaacagttaggggaacgggggcaatcatataagcgtttgtctcaggggagnccccagagggatgacttccagttccgtctgtcctttgtccacaaggaatttccctgggcgctaattatgagggaggcgtgtagcttcttatcattggaaatatggtatttaggaattaaaacggaagcaaggtttgcctaattcccagcttgaa

SEQ ID NO: 5216 - DNA, 4269 bp, Homo sapiens
  SIMILAR (75)..(2942): 1001254mologous to Homo sapiens PACE4A-II,accession number D87995,Smith-Waterman Score=5291.
gagcggctttaaaaggcggcactccaccccccggcgcactcgcagctcgggcgccgcgcgagcctgtcgccgctatgcctccgcgcgcgccgcctgcgcccgggccccggccgccgccccgggccgccgccgccaccgacaccgccgcgggcgcggggggcgcggggggcgcggggggcgccggcgggcccgggttccggccgctcgcgccgcgtccctggcgctggctgctgctgctggcgctgcctgccgcctgctccgcgcccccgccgcgccccgtctacaccaaccactgggcggtgcaagtgctgggcggcccggccgaggcggaccgcgtggcggcggcgcacggctacctcaacttgggccagattggaaacctggaagattactaccatttttatcacagcaaaacctttaaaagatcaaccttgagtagcagaggccctcacaccttcctcagaatggacccccaggtgaaatggctccagcaacaggaagtgaaacgaagggtgaagagacaggtgcgaagtgacccgcaggccctttacttcaacgaccccatttggtccaacatgtggtacctgcattgtggcgacaagaacagtcgctgccggtcggaaatgaatgtccaggcagcgtggaagaggggctacacaggaaaaaacgtggtggtcaccatccttgatgatggcatagagagaaatcaccctgacctggccccaaattatgattcctacgccagctacgacgtgaacggcaatgattatgacccatctccacgatatgatgccagcaatgaaaataaacacggcactcgttgtgcgggagaagttgctgcttcagcaaacaattcctactgcatcgtgggcatagcgtacaatgccaaaataggaggcatccgcatgctggacggcgatgtcacagatgtggtcgaggcaaagtcgctgggcatcagacccaactacatcgacatttacagtgccagctgggggccggacgacgacggcaagacggtggacgggcccggccgactggctaagcaggctttcgagtatggcattaaaaagggccggcagggcctgggctccattttcgtctgggcatctgggaatggcgggagagagggggactactgctcgtgcgatggctacaccaacagcatctacaccatctccgtcagcagcgccaccgagaatggctacaagccctggtacctggaagagtgtgcctccaccctggccaccacctacagcagtggggccttttatgagcgaaaaatcgtcaccacggatctgcgtcagcgctgtaccgatggccacactgggacctcagtctctgcccccatggtggcgggcatcatcgccttggctctagaagcaaacagccagttaacctggagggacgtccagcacctgctagtgaagacatcccggccggcccacctgaaagcgagcgactggaaagtaaacggcgcgggtcataaagttagccatttctatggatttggtttggtggacgcagaagctctcgttgtggaggcaaagaagtggacagcagtgccatcgcagcacatgtgtgtggccgcctcggacaagagacccaggagcatccccttagtgcaggtgctgcggactacggccctgaccagcgcctgcgcggagcactcggaccagcgggtggtctacttggagcacgtggtggttcgcacctccatctcacacccacgccgaggagacctccagatctacctggtttctccctcgggaaccaagtctcaacttttggcaaagaggttgctggatctttccaatgaagggtttacaaactgggaattcatgactgtccactgctggggagaaaaggctgaagggcagtggaccttggaaatccaagatctgccatcccaggtccgcaacccggagaagcaagggaagttgaaagaatggagcctcatactgtatggcacagcagagcacccgtaccacaccttcagtgcccatcagtcccgctcgcggatgctggagctctcagccccagagctggagccacccaaggctgccctgtcaccctcccaggtggaagttcctgaagatgaggaagattacacaggtgtgtgccatccggagtgtggtgacaaaggctgtgatggccccaatgcagaccagtgcttgaactgcgtccacttcagcctggggagtgtcaagaccagcaggaagtgcgtgagtgtgtgccccttgggctactttggggacacagcagcaagacgctgtcgccggtgccacaaggggtgtgagacctgctccagcagagctgcgacgcagtgcctgtcttgccgccgcgggttctatcaccaccaggagatgaacacctgtgtgaccctctgtcctgcaggattttatgctgatgaaagtcagaaaaattgccttaaatgccacccaagctgtaaaaagtgcgtggatgaacctgagaaatgtactgtctgtaaagaaggattcagccttgcacggggcagctgcattcctgactgtgagccaggcacctactttgactcagagctgatcagatgtggggaatgccatcacacctgcggaacctgcgtggggccaggcagagaagagtgcattcactgtgcgaaaaacttccacttccacgactggaagtgtgtgccagcctgtggtgagggcttctacccagaagagatgccgggcttgccccacaaagtgtgtcgaaggtgtgacgagaactgcttgagctgtgcaggctccagcaggaactgtagcaggtgtaagacgggcttcacacagctggggacctcctgcatcaccaaccacacgtgcagcaacgctgacgagacattctgcgagatggtgaagtccaaccggctgtgcgaacggaagctcttcattcagttctgctgccgcacgtgcctcctggccgggtaagggtgcctagctgcccacagagggcaggcactcccatccatccatccgtccaccttcctccagactgtcggccagagtctgtttcaggagcggcgccctgcacctgacagctttatctccccaggagcagcatctctgagcacccaagccaggtgggtggtggctcttaaggaggtgttcctaaaatggtgatatcctctcaaatgctgcttgttggctccagtcttccgacaaactaacaggaacaaaatgaattctgggaatccacagctctggctttggagcagcttctgggaccataagtttactgaatcttcaagaccaaagcagaaaagaaaggcgcttggcatcacacatcactcttctccccgtgcttttctgcggctgtgtagtaaatctccccggcccagctggcgaaccctgggccatcctcacatgtgacaaagggccagcagtctacctgctcgttgcctgccactgagcagtctggggacggtttggtcagactataaataagataggtttgagggcataaaatgtatgaccactggggccggagtatctatttctacatagtcagctacttctgaaactgcagcagtggcttagaaagtccaattccaaagccagaccagaagattctatcccccgcagcgctctcctttgagcaagccgagctctccttgttaccgtgttctgtctgtgtcttcaggagtctcatggcctgaacgaccacctcgacctgatgcagagccttctgaggagaggcaacaggaggcattctgtggccagccaaaaggtaccccgatggccaagcaattcctctgaacaaaatgtaaagccagccatgcattgttaatcatccatcacttcccattttatggaattgcttttaaaatacatttggcctctgcccttcagaagactcgtttttaaggtggaaactcctgtgtctgtgtatattacaagcctacatgacacagttggatttattctgccaaacctgtgtaggcattttataagctacatgttctaatttttaccgatgttaattattttgacaaatatttcatatattttcattgaaatgcacagatctgcttgatcaattcccttgaatagggaagtaacatttgccttaaattttttcgacctcgtctttctccatattgtcctgctcccctgtttgacgacagtgcatttgccttgtcacctgtgagctggagagaacccagatgttgtttattgaatctacaactctgaaagagaaatcaatgaagcaagtacaatgttaaccctaaattaataaaagagttaacatccc

SEQ ID NO: 5217 - DNA, 363 bp, Homo sapiens
  misc_feature (1)...(363): n = a,t,c or g
ggcacgagtagggctcnnnnnnnnnnnnnnnnnnnnnnnnnnnnnnnnnnnnnnnnnnnnnnnnnnnnnnnnnnnnnnnnnnnnnnnnnnnnnnnnnnnnnnnnnnnnnnnnnnnnnnnnnnnnnnnnnnnnnnnnnnnnnnnnnnnnnnnnnnnnnnnnnnnnnnnnnnnnnnnnnnnnnnnnncatgcccttgcgcctgcctatccaggacgtctactaaatcggcggtataggtactgcacttgttggccgagtggaatctggtgcagtcaactacggactggtgggatcctcagtccattaagctgtacagtcggtcgcactagactttcgattcaattcatggatgctttacagtcag

SEQ ID NO: 5218 - DNA, 4403 bp, Homo sapiens
  SIMILAR (170)..(3076): 1001254mologous to Homo sapiens subtilisin-like protease,accession number M80482,Smith-Waterman Score=5352.
cgggaacgcgccgcggccgcctcctcctccccggctcccgcccgcggcggtgttggcggcggcggtggcggcggcggcggcgcttccccggcgcggagcggctttaaaaggcggcactccaccccccggcgcactcgcagctcgggcgccgcgcgagcctgtcgccgctatgcctccgcgcgcgccgcctgcgcccgggccccggccgccgccccgggccgccgccgccaccgacaccgccgcgggcgcggggggcgcggggggcgcggggggcgccggcgggcccgggttccggccgctcgcgccgcgtccctggcgctggctgctgctgctggcgctgcctgccgcctgctccgcgcccccgccgcgccccgtctacaccaaccactgggcggtgcaagtgctgggcggcccggccgaggcggaccgcgtggcggcggcgcacggctacctcaacttgggccagattggaaacctggaagattactaccatttttatcacagcaaaacctttaaaagatcaaccttgagtagcagaggccctcacaccttcctcagaatggacccccaggtgaaatggctccagcaacaggaagtgaaacgaagggtgaagagacaggtgcgaagtgacccgcaggccctttacttcaacgaccccatttggtccaacatgtggtacctgcattgtggcgacaagaacagtcgctgccggtcggaaatgaatgtccaggcagcgtggaagaggggctacacaggaaaaaacgtggtggtcaccatccttgatgatggcatagagagaaatcaccctgacctggccccaaattatgattcctacgccagctacgacgtgaacggcaatgattatgacccatctccacgatatgatgccagcaatgaaaataaacacggcactcgttgtgcgggagaagttgctgcttcagcaaacaattcctactgcatcgtgggcatagcgtacaatgccaaaataggaggcatccgcatgctggacggcgatgtcacagatgtggtcgaggcaaagtcgctgggcatcagacccaactacatcgacatttacagtgccagctgggggccggacgacgacggcaagacggtggacgggcccggccgactggctaagcaggctttcgagtatggcattaaaaagggccggcagggcctgggctccattttcgtctgggcatctgggaatggcgggagagagggggactactgctcgtgcgatggctacaccaacagcatctacaccatctccgtcagcagcgccaccgagaatggctacaagccctggtacctggaagagtgtgcctccaccctggccaccacctacagcagtggggccttttatgagcgaaaaatcgtcaccacggatctgcgtcagcgctgtaccgatggccacactgggacctcagtctctgcccccatggtggcgggcatcatcgccttggctctagaagcaaacagccagttaacctggagggacgtccagcacctgctagtgaagacatcccggccggcccacctgaaagcgagcgactggaaagtaaacggcgcgggtcataaagttagccatttctatggatttggtttggtggacgcagaagctctcgttgtggaggcaaagaagtggacagcagtgccatcgcagcacatgtgtgtggccgcctcggacaagagacccaggagcatccccttagtgcaggtgctgcggactacggccctgaccagcgcctgcgcggagcactcggaccagcgggtggtctacttggagcacgtggtggttcgcacctccatctcacacccacgccgaggagacctccagatctacctggtttctccctcgggaaccaagtctcaacttttggcaaagaggttgctggatctttccaatgaagggtttacaaactgggaattcatgactgtccactgctggggagaaaaggctgaagggcagtggaccttggaaatccaagatctgccatcccaggtccgcaacccggagaagcaagggaagttgaaagaatggagcctcatactgtatggcacagcagagcacccgtaccacaccttcagtgcccatcagtcccgctcgcggatgctggagctctcagccccagagctggagccacccaaggctgccctgtcaccctcccaggtggaagttcctgaagatgaggaagattacacagctcaatccaccccaggctctgctaatattttacagaccagtgtgtgccatccggagtgtggtgacaaaggctgtgatggccccaatgcagaccagtgcttgaactgcgtccacttcagcctggggagtgtcaagaccagcaggaagtgcgtgagtgtgtgccccttgggctactttggggacacagcagcaagacgctgtcgccggtgccacaaggggtgtgagacctgctccagcagagctgcgacgcagtgcctgtcttgccgccgcgggttctatcaccaccaggagatgaacacctgtgtgaccctctgtcctgcaggattttatgctgatgaaagtcagaaaaattgccttaaatgccacccaagctgtaaaaagtgcgtggatgaacctgagaaatgtactgtctgtaaagaaggattcagccttgcacggggcagctgcattcctgactgtgagccaggcacctactttgactcagagctgatcagatgtggggaatgccatcacacctgcggaacctgcgtggggccaggcagagaagagtgcattcactgtgcgaaaaacttccacttccacgactggaagtgtgtgccagcctgtggtgagggcttctacccagaagagatgccgggcttgccccacaaagtgtgtcgaaggtgtgacgagaactgcttgagctgtgcaggctccagcaggaactgtagcaggtgtaagacgggcttcacacagctggggacctcctgcatcaccaaccacacgtgcagcaacgctgacgagacattctgcgagatggtgaagtccaaccggctgtgcgaacggaagctcttcattcagttctgctgccgcacgtgcctcctggccgggtaagggtgcctagctgcccacagagggcaggcactcccatccatccatccgtccaccttcctccagactgtcggccagagtctgtttcaggagcggcgccctgcacctgacagctttatctccccaggagcagcatctctgagcacccaagccaggtgggtggtggctcttaaggaggtgttcctaaaatggtgatatcctctcaaatgctgcttgttggctccagtcttccgacaaactaacaggaacaaaatgaattctgggaatccacagctctggctttggagcagcttctgggaccataagtttactgaatcttcaagaccaaagcagaaaagaaaggcgcttggcatcacacatcactcttctccccgtgcttttctgcggctgtgtagtaaatctccccggcccagctggcgaaccctgggccatcctcacatgtgacaaagggccagcagtctacctgctcgttgcctgccactgagcagtctggggacggtttggtcagactataaataagataggtttgagggcataaaatgtatgaccactggggccggagtatctatttctacatagtcagctacttctgaaactgcagcagtggcttagaaagtccaattccaaagccagaccagaagattctatcccccgcagcgctctcctttgagcaagccgagctctccttgttaccgtgttctgtctgtgtcttcaggagtctcatggcctgaacgaccacctcgacctgatgcagagccttctgaggagaggcaacaggaggcattctgtggccagccaaaaggtaccccgatggccaagcaattcctctgaacaaaatgtaaagccagccatgcattgttaatcatccatcacttcccattttatggaattgcttttaaaatacatttggcctctgcccttcagaagactcgtttttaaggtggaaactcctgtgtctgtgtatattacaagcctacatgacacagttggatttattctgccaaacctgtgtaggcattttataagctacatgttctaatttttaccgatgttaattattttgacaaatatttcatatattttcattgaaatgcacagatctgcttgatcaattcccttgaatagggaagtaacatttgccttaaattttttcgacctcgtctttctccatattgtcctgctcccctgtttgacgacagtgcatttgccttgtcacctgtgagctggagagaacccagatgttgtttattgaatctacaactctgaaagagaaatcaatgaagcaagtacaatgttaaccctaaattaataaaagagttaacatccc

SEQ ID NO: 5219 - DNA, 3335 bp, Homo sapiens
  SIMILAR (1733)..(2977): 971254mologous to Homo sapiens PACE4A-II,accession number D87995,Smith-Waterman Score=2260.
tcgcgggccgaggacgcctctggggcggcaccgcgtcccgagagccccagaagtcggcggggaagtttccccggtggggggcgtttcgggcctcccggacggctctcggccccggagcccggtcgcaggagcgcgggcccgggggcgggaacgcgccgcggccgcctcctcctccccggctcccgcccgcggcggtgttggcggcggcggtggcggcggcggcggcgcttccccggcgcggagcggctttaaaaggcggcactccaccccccggcgcactcgcagctcgggcgccgcgcgagcctgtcgccgctatgcctccgcgcgcgccgcctgcgcccgggccccggccgccgccccgggccgccgccgccaccgacaccgccgcgggcgcggggggcgcggggggcgcggggggcgccggcgggcccgggttccggccgctcgcgccgcgtccctggcgctggctgctgctgctggcgctgcctgccgcctgctccgcgcccccgccgcgccccgtctacaccaaccactgggcggtgcaagtgctgggcggcccggccgaggcggaccgcgtggcggcggcgcacgggtacctcaacttgggccagattggaaacctggaagattactaccatttttatcacagcaaaacctttaaaagatcaaccttgagtagcagaggccctcacaccttcctcagaatggacccccaggtgaaatggctccagcaacaggaagtgaaacgaagggtgaagagacaggtgcgaagtgacccgcaggccctttacttcaacgaccccatttggtccaacatgtggtacctgcattgtggcgacaagaacagtcgctgccggtcggaaatgaatgtccaggcagcgtggaagaggggctacacaggaaaaaacgtggtggtcaccatccttgatgatggcatagagagaaatcaccctgacctggccccaaattatgattcctacgccagctacgacgtgaacggcaatgattatgacccatctccacgatatgatgccagcaatgaaaataaacacggcactcgttgtgcgggagaagttgctgcttcagcaaacaattcctactgcatcgtgggcatagcgtacaatgccaaaataggaggcatccgcatgctggacggcgatgtcacagatgtggtcgaggcaaagtcgctgggcatcagacccaactacatcgacatttacagtgccagctgggggccggacgacgacggcaagacggtggacgggcccggccgactggctaagcaggctttcgagtatggcattaaaaagggccggcagggcctgggctccattttcgtctgggcatctgggaatggcgggagagagggggactactgctcgtgcgatggctacaccaacagcatctacaccatctccgtcagcagcgccaccgagaatggctacaagccctggtacctggaagagtgtgcctccaccctggccaccacctacagcagtgggggccttttatgagcgaaaaatcgtcaccacggatctgcgtcagcgctgtaccgatggccacactgggacctcagtctctgcccccatggtggcgggcatcatcgccttggctctagaagcaaacagccagttaacctggagggacgtccagcacctgctagtgaagacatcccggccggcccacctgaaagcgagcgactggaaagtgaacggcgcgggtcatacaatttagccatttctatggattcggatcggtggacgcaaaatctctaggtgaggaggcaaagaagtggacagcagggccatcgcagcacatgtgggtggccgcctcggacaagagacccaggagcatccccttagtgcaggtgctgcggactacggccctgaccagcgcctgcgcggagcactcggaccagcgggtggtctacttggagcacgtggcggttcgcacctccatctcacacccacgccgaggagacctccagatctacctggtttctccctcgggaaccaagtctcaacttttggcaaagaggctgctggatctttccaatgaagggttaacaaacggggaattcatgactgcccactgctggggagaaaaggctgaagggcagtggaccttggaaatccaagatctgccatcccaggtccgcaacccggagaagcaagggaagttgaaagaatggagcctcatactgtatggcacagcagagcacccgtaccacaccttcagtgcccatcagtcccgctcgcggatgctggagctctcagccccagagctggagccacccaaggctgccctgtcaccctcccaggtggaagttcctgaagatgaggaagattacacaggtgtgtgccatccggagtgtggtgacaaaggctgtgatggccccaatgcagaccagtgcttgaactgcgtccacttcagcctggggagtgtcaagaccagcaggaagtgcgtgagtgtgtgccccttgggctactttggggacacagcagcaagacgctgtcgccggtgccacaaggggtgtgagacctgctccagcagagctgcgacgcagtgcctgtcttgccgccgcgggttctatcaccaccaggagatgaacacctgtgtgaccctctgtcctgcaggattttatgctgatgaaagtcagaaaaattgccttaaatgccacccaagctgtaaaaagtgcgtggatgaacctgagaaatgtactgtctgtaaagaaggattcagccttgcacggggcagctgcattcctgactgtgagccaggcacctactttgactcagagctgatcagatgtggggaatgccatcacacctgcggaacctgcgtggggccaggcagagaagagtgcattcactgtgcgaaaaacttccacttccacgactggaagtgtgtgccagcctgtggtgagggcttctacccagaagagatgccgggcttgccccacaaagtgtgtcgaaggtacggtcctcctggcggggaacggcaggcaactgtgtccagcaaaggagtgcctggagggcagagtctgtcagcatcttccccaggggccggggagggcatgttgcatcaccccactgtggacaggagcccatttacagagctgctgaggggccttcgtccctttgtgcactggatgcatatttgttgggtccctgctgtgggcagacaccgtgcagcagcgggataagatgggaagcagaatagcaaggtgctcacaccccattggtggactacgcgggacgtccctgcccatgtcgcgctcagcatgcatcctttgcactgtcgataatcagagaaaccatgttttgggttaaaaa

SEQ ID NO: 5220 - DNA, 3132 bp, Homo sapiens
  SIMILAR (75)..(2999): 1001254mologous to Homo sapiens PACE4E-I,accession number D87993,Smith-Waterman Score=5373.
gagcggctttaaaaggcggcactccaccccccggcgcactcgcagctcgggcgccgcgcgagcctgtcgccgctatgcctccgcgcgcgccgcctgcgcccgggccccggccgccgccccgggccgccgccgccaccgacaccgccgcgggcgcggggggcgcggggggcgcggggggcgccggcgggcccgggttccggccgctcgcgccgcgtccctggcgctggctgctgctgctggcgctgcctgccgcctgctccgcgcccccgccgcgccccgtctacaccaaccactgggcggtgcaagtgctgggcggcccggccgaggcggaccgcgtggcggcggcgcacggctacctcaacttgggccagattggaaacctggaagattactaccatttttatcacagcaaaacctttaaaagatcaaccttgagtagcagaggccctcacaccttcctcagaatggacccccaggtgaaatggctccagcaacaggaagtgaaacgaagggtgaagagacaggtgcgaagtgacccgcaggccctttacttcaacgaccccatttggtccaacatgtggtacctgcattgtggcgacaagaacagtcgctgccggtcggaaatgaatgtccaggcagcgtggaagaggggctacacaggaaaaaacgtggtggtcaccatccttgatgatggcatagagagaaatcaccctgacctggccccaaattatgattcctacgccagctacgacgtgaacggcaatgattatgacccatctccacgatatgatgccagcaatgaaaataaacacggcactcgttgtgcgggagaagttgctgcttcagcaaacaattcctactgcatcgtgggcatagcgtacaatgccaaaataggaggcatccgcatgctggacggcgatgtcacagatgtggtcgaggcaaagtcgctgggcatcagacccaactacatcgacatttacagtgccagctgggggccggacgacgacggcaagacggtggacgggcccggccgactggctaagcaggctttcgagtatggcattaaaaagggccggcagggcctgggctccattttcgtctgggcatctgggaatggcgggagagagggggactactgctcgtgcgatggctacaccaacagcatctacaccatctccgtcagcagcgccaccgagaatggctacaagccctggtacctggaagagtgtgcctccaccctggccaccacctacagcagtggggccttttatgagcgaaaaatcgtcaccacggatctgcgtcagcgctgtaccgatggccacactgggacctcagtctctgcccccatggtggcgggcatcatcgccttggctctagaagcaaacagccagttaacctggagggacgtccagcacctgctagtgaagacatcccggccggcccacctgaaagcgagcgactggaaagtaaacggcgcgggtcataaagttagccatttctatggatttggtttggtggacgcagaagctctcgttgtggaggcaaagaagtggacagcagtgccatcgcagcacatgtgtgtggccgcctcggacaagagacccaggagcatccccttagtgcaggtgctgcggactacggccctgaccagcgcctgcgcggagcactcggaccagcgggtggtctacttggagcacgtggtggttcgcacctccatctcacacccacgccgaggagacctccagatctacctggtttctccctcgggaaccaagtctcaacttttggcaaagaggttgctggatctttccaatgaagggtttacaaactgggaattcatgactgtccactgctggggagaaaaggctgaagggcagtggaccttggaaatccaagatctgccatcccaggtccgcaacccggagaagcaagggaagttgaaagaatggagcctcatactgtatggcacagcagagcacccgtaccacaccttcagtgcccatcagtcccgctcgcggatgctggagctctcagccccagagctggagccacccaaggctgccctgtcaccctcccaggtggaagttcctgaagatgaggaagattacacagctcaatccaccccaggctctgctaatattttacagaccagtgtgtgccatccggagtgtggtgacaaaggctgtgatggccccaatgcagaccagtgcttgaactgcgtccacttcagcctggggagtgtcaagaccagcaggaagtgcgtgagtgtgtgccccttgggctactttggggacacagcagcaagacgctgtcgccggtgccacaaggggtgtgagacctgctccagcagagctgcgacgcagtgcctgtcttgccgccgcgggttctatcaccaccaggagatgaacacctgtgtgaccctctgtcctgcaggattttatgctgatgaaagtcagaaaaattgccttaaatgccacccaagctgtaaaaagtgcgtggatgaacctgagaaatgtactgtctgtaaagaaggattcagccttgcacggggcagctgcattcctgactgtgagccaggcacctactttgactcagagctgatcagatgtggggaatgccatcacacctgcggaacctgcgtggggccaggcagagaagagtgcattcactgtgcgaaaaacttccacttccacgactggaagtgtgtgccagcctgtggtgagggcttctacccagaagagatgccgggcttgccccacaaagtgtgtcgaaggtacggtcctcctggcggggaacggcaggcaactgtgtccagcaaaggagtgcctggagggcagagtctgtcagcatcttccccaggggccggggagggcatgttgcatcaccccactgtggacaggagcccatttacagagctgctgaggggccttcgtccctttgttcactggatgcatatttgttgggtccctgctgtgggcagacaccgtgcagcagcgggataagatgggaagcagaatagcaaggtgctcacaccccattggtggactacgcgggacgtccctgcccatgtcgcgctcagcatgcatcctttgcactgtcgataatcagagaaaccatgttttgggttaaaaa

SEQ ID NO: 5221 - DNA, 1593 bp, Homo sapiens
  SIMILAR (682)..(1008): 1001254mologous to Homo sapiens PACE4C,accession number D28513,Smith-Waterman Score=570.
atggaggtcagccgggctggactctccactgtcctggaggctgtcctctgccctgctgatctcactgcagcctccctcgatgctgcctccccgatgcctagcagcagccaccttcccgtcttgggatatccggtgggtaaatctggtgccaggcctggctcgacacaggaagttgttctcaccgctgcagcagtgacacaggaagttgttctcaccgctgcagcagtgacacaggaagttgttctcaccgctgcagcagtgacacaggaagttgttctcaccgctgcagcagtgacacaggaagttgttctcaccgctgcagcagtgacacaggaagttgttctcaccgctgcagcagtgacacaggaagttgttctcaccgctgcagcagtgacacaggaagttgttctcaccgctgcagcagtgacacaggaagttgttctcaccgctgcagcagtgacacaggaagttgttctcaccactgcaggtgcagaaaacaagcctgtgtcggccccccacagcagcagcacttgtgccaggacaggctccccaggccggcccctccacactcagtcacccccaagaggccacattctctttgggaaggaaaaagtgtgctataaatttaagcatgacatattaaagcaccttctgacccaattaactgtggacggcattgtgagcatccccttagtgcaggtgctgcggactacggccctgaccagcgcctgcgcggagcactcggaccagcgggtggtctacttggagcacgtggtggttcgcacctccatctcacacccacgccgaggagacctccagatctacctggtttctccctcgggaaccaagtctcaacttctggcaaagaggttgctggatctttccaatgaagggtttacaaactgggaattcatgactgtccactgctggggagaaaaggctgaagggcagtggaccttggaaatccaagatctgccatcccaggtccgcaacccggagaagcaaggtgtgtcttctgtacaaagtgccattctcaccagtcctttgaagagtcgcaagatacaaagtcagtagtggcctgggagggatggggatgtacacatggggtccactgtgaggtgccaaagaatttggggataaggtcaggtaaacatcaccccctgaaaataaagctagtttaaaacaaatgcatcatggctgcatttgggcagctgcagaacgacgcccctcctgcagccagccagcttccttccctgggcccggtggggagcaactttgccaatgtgcagccccaggcaaggcattcacttctgtgggtctcagtgtccttgtctgggaaatgacaggtttagaggaggtgatccatgatcctgtcacttaaaatccatacacatatcctgccagagtccagacaattttaacctcaaggtcggaccacttgtgagcagacattatatgtagttggtctctttcaacaaggtggagtttagtcattaggactttgtgaacaacttctcaactccccacccgacttgtcagccccaagctgggcttgcctggattaaaaactaaaccaggcagcctcgtcgagtg

SEQ ID NO: 5222 - DNA, 711 bp, Homo sapiens
ttagatcagcatttgaattgtggactcaggaaggtggactgccctccccaagtggctgggcataatccaatccctcaagaacttgaatagaacagacagcagagggaggaggagttcacccctcatttcctgcctcgccactggagccgggacatctcgtcatctcttgcccctggactggatgtccaccatcggctgccctggttctcaggcctccagacctgagctgagtttgaatcacacctcaggcttccctgggtttccagccttccaccccagatggtgggccttttccggcccccagagtcacataaaccagattcctcatcctaaatctcctctgtgcgttggttctgcttctccagagagcctacactaacacgctccccctctttcccctgcaattcctgagatcacctaccaaagaaagcacatattctcaactgcatccttcagggtctcctcctggggggggccctggtccgagacagctgggattgactagccccaaggcttctgaacagccactacccggctttgactgggagggccagggctcggataggagggcaggagcagatggctcgggaagggagagctcggggacacctggaactgcagttctacaacgaagtagctgtgggacaagttgctgaacctctctgagcctaatgttttctcagcctcgtgccaagcttggcgtagtgataa

SEQ ID NO: 5223 - DNA, 965 bp, Homo sapiens
  SIMILAR (12)..(389): 461254mologous to Drosophila melanogaster sulfate transporter,accession number AF180728,Smith-Waterman Score=277.
acgcagctgaggggctccctccagtccggatcccgcccttctcagagaccacagccaacgggacgatctccttcaccgagatggtgcaggacatgggagccgggctggccgtggtgcccctgatgggcctcctggagagcattgcggtggccaaagccttcgcatctcacaataattaccgcatcgatgccaaccaggagctgctggccatcggtctcaccaacatgttgggctccctcgtctcctcctacccggtcacaggcagctttggacggacagccgtgaacgctcagtcgggggtgtgcaccccggcggggggcctggtgacgggagtgctggtgctgctgtctctggactacctgacctcactgttcttactacatccccaagtctgccctgggttgccgtcatcatcatgggccgtggccccgctgtttcgacaccaagatctttcaggaacgctctgggctttttaaagaggctggacctgctgcccctgtgcgtgaccttcctgctgtgcttctgggaggagcaggacggcatcctggccggggccctggggtctctgctcatgctcctgcactctgcagccaggcctgagaccaaggggtcagaggggccggttctggtcctgcagccggccagcggcctgtccttccctgccatggaggctctgcgggaggagatcctaagccgggccctggaagtgtccccgccacgctgcctggtcctggagtgcacccatgtctgcagcatcgactacactgtggtgctgggactcggcgagctcctccaggacttccaaaagcagggcgtcgccctggcctttgagggcctgcaggttccccgtctccgtgtcctgctgtcccgctgacctgaaggggttccagtacttctctaccctggaagaagcagagaagcacctgaggcaggagccagggacccagccctacaacatcagagaa

SEQ ID NO: 5224 - DNA, 423 bp, Homo sapiens
  SIMILAR (89)..(253): 701254mologous to Homo sapiens Similar to Rho guanine nucleotide exchange factor (GEF) 1,accession number BC005155,Smith- Waterman Score=192.
cccacgcgtccggcatgaaaaacgaccttgtttacacgggcgtggaccctgagaccctgccgaataggaacggtgacggtgttctactggactctcacctgacccacagttccgaaccagaaaaatccaggcctctctgctcaccttggaggagaccatgaagcagctggaggaattggaggaggaatttcgccgcctgaaacccctcctggctaaccttggggggaactctgtcccccatcctggctgcacttgaggatcccgcccaggaaggccttttgcaataaggaaaggaacgggggagaggacctgagggaccacccctacccacacatctgacgcagcatgtcacaccccaaaggcctgaggagagggagctgtggaccacgcctggtaggggcccagctggcgttactgcccccg

SEQ ID NO: 5225 - DNA, 2882 bp, Homo sapiens
  SIMILAR (1757)..(2269): 861254mologous to Mus musculus putative,accession number AK004654,Smith-Waterman Score=809.
  misc_feature (1)...(2882): n = a,t,c or g
atggccgagccgctactcaggaaaaccttctcccgcctgcggggccgggagaaacttccccggaaaaagtcggacgccaaggagcgcggccacccagcccagcgcccagagcccagccctccagagccagagccccaggctcccgaagggtcccaggccggagcagaggggccctccagccccgaggcatcaaggagccctgcacggggagcctacctgcaaagcctggagcccagtagccgccgatgggtgctgggtggggccaagccagctgaggacacctctttagggcctggggtacctggcactggggagcccgccggcgagatctggtacaaccccatccctgaggaagaccccagacctccagcacctgagcccccggggccacagcctggctcagctgagtcagagggcctggccccccaaggtgcagcccccgccagccccccaaccaaagcctcccgcaccaagtccccgggccccgccaggcgcctctccataaagatgaagaagctgccggaactgcggcgccgcctgagcctgcgaggcccccgggctggcagggagcgcgagagggctgcccctgcgggctccgtcatcagccgctaccacctggacagcagcgtggggggccccgggccggcagcagggcctgggggcacccggagcccgagggccggttacctcagcgacggggactcaccggagcgcccagctgggcccccatcacccacctccttccggccctacgaggtgggtcccgcagcccgggcacccccggccgcactctggggccgcctcagcctgcacctgtacggtctcggggggctgcggccagcgccgggggccacccccagggacctctgctgcctactgcaagtggatggggaggccagggcccgaacagggccactgcgaggggggccggacttcctgcggctggaccacaccttccacctggagctggaggccgccaggctcctgcgcgccctggtgcttgcgtgggaccctggcgtgagaaggcaccggccctgtgcccagggcaccgtgctgctgcccacggtcttccgagggtgccaggcccaacagctggccgtgcgcctggagcctcaggggctgctgtatgccaagctgaccctgtcggagcagcaggaagcccctgccacagctgagccccgcgtctttgggctgcccctgccactgctggtggagcgggagcggccccccggccaggtgcccctcatcatccagaagtgcgttgggcagatcgagcgccgagggctgcgggtagtgggactgtaccgtctttgtggctcagcggcagtgaagaaagagcttcgggatgcctttgagcgggacagtgcagcggtctgcctatctgaggacctgtaccccgatatcaatgtcatcactgctgtgccctccttagccttagaagccagtggtgccctgaccagaggggaccctgtgttcacaggcatcctcaaggattatcttcgagagttgcccaccccactcatcacccagcccctgtataaggtggtactggaggccatggcccgggaccccccaaacagagttccccccaccactgagggcacccgagggctcctcagctgcctgccagatgtggaaagggccacgctgacgcttctcctggaccacctgcgcctcgtctcctccttccatgcctacaaccgcatgaccccacagaacttggccgtgtgcttcgggcctgtgctgctgccggcacgccaggcgcccacaaaggcctcgtgcccgcagctccggcccaggccttgccagtgcagtggacttcaagcaccacatcgaggtgctgcactacctgctgcagtcttggccagatccccgcctgccccgacaatctccagatgtcgcgccttacttgcgacccaaacgacagccacctctgcacctgccgctggcagaccccgaagtggtgactcggccccgcggtcgaggaggccccgaaagccccccgagcaaccgctacgccggcgactggagcgtttgcgggcgggacttcctgccctgtgggcgggatttcctgtccgggccagactacgaccacgtgacgggcagtgacagcgaggacgaggacgaggaggtcggcgagccgagggtcaccggtgacttcgaagacgacttcgatgcgcccttcaacccgcacctgaatctcaaagacttcgacgccctcatcctggatctggagagagagctctccaagcaaatcaacgtgtgcctctgagccagatgacggggtgggaccccggttagtaaggaccgggcgcccagtggctaaggcggtgccctggtgaccaaggagagccagacctgttgctcaggccgagctcctgggttgccagcgagttaccacggggaccagtcgcgtgtatggcttgagacttcattcccagtttccagggggcccggtatttgggacacttagtttgccaagtctggggcctggggattttagggaccagcggttgtgaccatctttcctgaggcaccaagggcttccccttttgttgccaaaaaggtaagttctcgcgcttgctaggctggcctctcttgcctccccttggccggggcaacaccagttactgtgagcatcaccctgggtgtgggtgagtcacctctagtcggccctcttgcttgctgccaaccaaatcagtatttagctttgagcactgcactgttttttcctcccttgggacggacacaaagattaggcatgagggcatttttgtgggggggcagcccttattcctggggtttccagcatgggacacagggggtagcctgggggtttattaggagaaacagttnggttttcccctaaccttttcccgggg

SEQ ID NO: 5226 - DNA, 2358 bp, Homo sapiens; identical to SEQ ID NO: 1550
  SIMILAR (940)..(2355): 991254mologous to Cloning vector pBACe3.6 levansucrase,accession number U80929,Smith-Waterman Score=2471.

SEQ ID NO: 5227 - DNA, 439 bp, Homo sapiens
  SIMILAR (176)..(310): 821254mologous to Homo sapiens PRO2550,accession number AF130089,Smith-Waterman Score=178.
ttttttttttttttttttttttttttggaaacagcgtctcactctgtcgcccaggctggagggcaggggcatgatctcagctcactgcaacctccgcctcccaggttcaagcaattctcctgcctcagcctcccaagtagctgggatcacaggcataagccaccacacccacctaagttttgtgtttttagtagagacagggtttcaccatgttggccaggcaggtctcgaactcctgacctcaagtgatcctcccgcctcagcctcccaaatggcagggattacaggtgtgagccactgcgcctggccgataactattttcaagcaaagcaattatggcatgttataagaaatttggggattttaactgtttatttacccaatttactaacttaatgccaccttaatggcaataattagatttttctcagcagaaaga

SEQ ID NO: 5228 - DNA, 792 bp, Homo sapiens
ctatgagctcgtgcccccacagagcttacagttagagtcgctggaactgggaaagaacagagctctccaggaggttggggttccccctgagcggagaggaagcacgaaaggtaatcggtaggtgagtgtttgggggtaatgttcgttaatgcaaaatataagcacaacccgcacagccaggcacgagtgcttgccctgcgcgccagaccctagagcgcactcgcgctccacttgtgcatccagtgctacaggcggggtgctccctccgccgcgcggccaagaggtctccattttggggtagctgcgaaaggctcggttcttagtctctgccccgcccgtgtagcgttgaggtgtccctcgcctcgctcccactactctttgtgtgtagccctcgtccgcggcgtgcgcaccctcccctgcggccgtggtctgacacatcgcttttggggtagatgcactgtgtcccacattcggcctgaattgatataagcacttgctgtatgcagagcatgagacagccgctgtccgggcgcaatggcgtgtgcgcttagggctccgcctcggattaccaatccggtatccgcacagtgggaccccgagactggctctgtcgccggcgagccctggatctggacgcagcgagaacgcaatcagtccgcgctgcagaggggaaatgtgcctttctgcagatgcagggaccacgagtttacactggacctgggaggccaaggcgggcagatcacttgaggtcaggagtttgagaccagcctggccaacatggcgaaaccccat

SEQ ID NO: 5229 - DNA, 1763 bp, Homo sapiens
  SIMILAR (1)..(726): 991254mologous to Canis familiaris QKI-5,accession number AB047312,Smith-Waterman Score=1241.
tttaattttgttgggagaatccttggacctagaggacttacagccaaacaacttgaagcagaaaccggatgtaaaatcatggtccgaggcaaaggctcaatgagggataaaaaaaaggaggagcaaaatagaggcaagcccaattgggagcatctaaatgaagatttacatgtactaatcactgtggaagatgctcagaacagagcagaaatcaaattgaagagagcagttgaagaagtgaagaaattattggtacctgcagcagaaggagaagacagcctgaagaagatgcagctgatggagcttgcgattctgaatggcacctacagagatgccaacattaaatcaccagcccttgccttttctcttgcagcaacagcccaggctgctccaaggatcattactgggcctgcgccggttctcccaccagctgccctgcgtactcctacgccagctggccctaccataatgcctttgatcagacaaatacagaccgctgtcatgccaaacggaactcctcacccaactgctgcaatagttcctccagggcccgaagctggtttaatctatacaccctatgagtacccctacacattggcaccagctacatcaatccttgagtatcctattgaacctagtggtgtattaggtgcggtggctactaaagttcgaaggcacgatatgcgtgtccatccttaccaaaggattgtgaccgcagaccggagccgccaccggcaactaacctatgaccttctgacctctgaactcttcacccaatgatgacctgaccatgcctgcctgctgatcagttaactggtaatcgcctttgcttgcctgtcgtcagtgcagcgagctgaggcacttggtccgtttcgtctttaccatctaaccaaacaaaaggacaaagaaattgttgttccttccaactcagcttttttttttttttttttcctgtttgggtgaaagtggttctagaaactgcactgaatagtagtaaagcaataaggcccaattcatcccacagcactgatcatcttttaatatcccaccctaagcgaacggtaagaaggcctctcttaagaaggggagacagatggtccttaactactcaatgacagaggcagttactgtgagagacttctaggaatctttttcttctcatagcgaagtcaaagctctctctgaatgtactgtgtgatgatgcatcatgcatgaaccttcggtcagggatatcattggtgaagtgatttcaaaaagtattcaaaatttgatatgctgtttagtcactacagtgccctcaaagggcagaagttgcagccttttttatattgcctgccaaaatttgaagtattagaagaaagtgtgccatgagagaaaaacttaaggagttttgaaaagtaatgcaaataacaaaactgcaacactatttttaaaaagataaatatctgagttaaaattactgaatctttattttacacctaaaaaaatatgagaacaaggtacatgcattatgtgtcacattactgggcaaactgttcaagtatttttttttaaacctccctgtatagaaaaaaatcattaaggatgtaaaagccatgcttgcctatttgctgtatacatgtaatgaaattgtagataaagtgtagtgcattgaaacaaatgaacaaaaagtagatacttttactatacaagggtgctggtgcagaaaaaaatatatatatttttggaaatgtagcattttatactttcaagtgttataaaaa

SEQ ID NO: 5230 - DNA, 3219 bp, Homo sapiens
  SIMILAR (131)..(211): 1001254mologous to Mus musculus KH domain RNA binding protein QKI-7B,accession number AF091047,Smith-Waterman Score=135.
cacccaactgctgcaatagttcctccagggcccgaagctggtttaatctatacaccctatgagtacccctacacattggcaccagctacatcaatccttgagtatcctattgaacctagtggtgtattaggtatggctttcccaacgaaaggctaagaattcaagaacggtcttaactgaaccctcatcagatctgaatttaacaaatgcttagtctcagcagcctccgggggaaaaaagcttagcctagcagtcagtgacttacttgcactttttgcacatagatataaagtaaaattatgttattaatttggtttagtctgtaatattacacagtaatggtaatttataaaggagtgtatagtagtatactgactgctaagtgtactatactgtttgctttactaatcaacctattcaattgcagtcatacttattgactcagagtttaaaaccacaatctgtaggctttaagaattgcttttaaacctttttaagtgataaactcttgaagtggtcttaaggttagcaaataattgtctgtattaaacatggcgttatttaagtagtcctgctgcaagaaaggcacttcagtgaatatgtgactagtaaagcttaaatatgtttggatctaatagagctcatgaaatactgtaacttggggattgtaaatgaatggatacaataggttaaggcccaagatgtttgaaatgaatgcaatattaatagatgcatatatacatgacatattgtggttaattttaaaactactgtgccttaacgtgtttcttaaacttttgtagtaaatgaacatttgaaatccattttgataaacctgctgttaatgttttttccccccttgtgaatgttttctaactttgtcttggtaattgcaatttaactaggtgcggtggctactaaagttcgaaggcccgatatgcgtgtccatccttaccaaaggattgtgaccccagaccgaggttagtttagttctgcagttcttgtctataaaaaatgcgttgggtgtccataaaatttgcaaccccacacctgatggaaaaatgtaattgcttacctgcacccagttttttttccttttctaaatttgtttgtgatcattgacaaatttaagggttgggttttttgttttggtttggttttttctcccttcatatttttaacttattaaatcttctattattatgtactatgatttattcctactaaaacataaattagtcaatttggggagctattaaattttgatgttgcctcagttattttcattaataacttttgctaaaatttaccttttaaaagttctgaaatttggggttggtattgcaaaatgaattgaacggatggtgctttaatgagagaagtaaaggaatatatgcctcctgtgtacttttggagaaaactgaagatttagtttccatttttctttataataaaatatttgagccactgtataaacatgagggtgcacatgtcaagtacttagctaaaatcaacaaagtgaggactgtgaagataacttttcatgtagttggatttttttatataaattagagcgtcaattcccttttattcttacattctcttgccaaaatggatcctttgatttttgtcatttgctgctaaaatatattatatgaaggtaaactgtctcttgaagttctgtggtggtatgagatccagctgtgtgaatataatttttgactaacctgtgactggaaaataagtcttcatttttctcctttacaacttttataatttgtgtcctgtatatgcccttggacccttttataaattatttttgcttattgaggaatggtattttcggtttattgacattgaattgttttctaagtttttccatcacaagataggaatatcaagcatggtagtaaaaaaggattttttacaagtttctattatggcacatttgtttcctacaaattaaattgatcaaagtctcaaatattagtggaggaaaaagtgctggatttgtacttcaattgtacatcttctatgaatttatgaaggacctacctgctttatgtgattaccttgagtactgatgataaatactagacacagctgttgtccacatcagaaataacatgcctttcccaaagacattgttaatatttgtttagcataatccataaagaacgttgaagacttttaaactaatgtattcatcactaacagtgattgttcagtgaacaaaatagaccccagctccgtggtcgtctatgaggatggtattccttgtaagtgttctgtatgagcacgtctcatagggatggggaagttttttggaaagtcacttgagttttaaagaaactggacaattccatgaataatttgaggttttattcatattgctaatgtctacaattgttctaaagagtattttaaagtagttcttttcccccagctaatctttccctatgtatgcccccttttaggagatttctcaccattttgctttaacacaataattattggcctacttaatactccagtgccttgagatagttggacatattttaggaagattttattgtatttggaaaattacgacacattccatgcatggatcttttgtagttacgtgttttgattagtcctgtcactgtttttatttaaaatgcagtgtcagcaaaccgaaatgctcatttctttttttagtaacagagtactcggtatacttatcactggtattgcactcattggggtctaaagggagatgtctgaagtccttcacttaaattattttatgatactactgttttctctatttttgaggttaaaattattttaaaaaaatattttgaagagaagtttattagtataagcattcatttaatgcaaaaaaactcagcccttgggacatataaccatgtaattctatatgaacgtttagggtactacatggttgaccaatatctagttctttactaaaagtaaactcacctctttatatatatttcaaaactggaatttgaagcctattaggagaccaactgaccttttaggttgtaatgaactgtatgggtcttgcagggtgacacacctgtgtagggagggccaagacttggcagaggatgtattctaggtgtcctggtatatataaatggtcactcacttcctttatatattccacactcaaagtagaagcccgagtttttcttcgaagaattactaaaa

SEQ ID NO: 5231 - DNA, 917 bp, Homo sapiens
  SIMILAR (39)..(191): 781254mologous to Homo sapiens Similar to calpain 3, (p94),accession number BC003169,Smith-Waterman Score=197.
ttgagccctttccagggggtgattgcataccacgggctacactggagtcctgccgtagcatgattgcgctcatggatacagttggctctggaaagctcaatctgcaggagttccaccacctctggaacaagattaaaggctggcaagaaaattttcaaaccattatgacacagaccagtccgggcaccatcaaacagctacgaagatgcgaaatgcagtcaaacggacgcaggattccacctcaacaaccagctcttatgacatcattaccatgcggtacgcagacaaacacatgaacatcgactttgacagtttcatctgctgcttcgttaggctggagggcatgttcagagcttttcatgcatttgacaaggatggagatggtatcatcaagctcaacgttctggagtggctgcagctcaccatgtatgcctgaaccaggctggcctcatccaaagccatgcaggatcactcaggatttcagttttcaccctctatttccaaagccatttacctcaaaggacccagcagctacacccctacaggcttccaggcaacctcaatcaagtcatgttcctcctccattttaccccctacccatccttgatcggtcatgcctagcctgaccctttagtaaagcaatgagcgagtgctcctgcttaccttgctctaggctgtctgcagaagcacctgccggtggcactcagcacctccttgtgctagagccctccatcaccttcacgctgtcccaccatgggccaggaaccaaaccagcactgggttctactgctgtggggtaaactaactcagtggaatagggctgtgttactttgggctgtccaactcataagtttggctgcattttgaaaaaagctgatctaaataaaggcatgtgtatggctggaaaaaaaaaaaaa

SEQ ID NO: 5232 - DNA, 918 bp, Homo sapiens
  SIMILAR (1)..(339): 481254mologous to Homo sapiens Similar to calpain 3, (p94),accession number BC003169,Smith-Waterman Score=237.
  misc_feature (1)...(918): n = a,t,c or g
gggaaagccaacccttcgggagttcacccacctcgggacaagattaagggctggcgagaaattttcaacaacattacaccgagccagtccggcaccatcactggctacgagatgcgaaatgcattaacgacgcaggattccacctcaacaacccgctctatgacatcatttaccagtcgtacggcagacaaccacatgaacatcgactttgaaagtttcaatctgctgcttcgttagggctggagggcatgttcagagcttttcatgcatttgaccaaggatggagatggtatcatcaggctcaacgttctggagtggctgcagctcaccatgtatgcctgaaccaggctggcctcatccaaagccatgcaggatcactcaggatttcagtttcaccctctatttccaaagccatttacctcaaaggacccagcagctacacccctacaggcttccaggcacctcatcagtcatgttcctccttccattttacccccttaccccatcccttgatcggtccatgcctagccgtgaccctttagtaaagcaaatgaggtaggaagaacaaacccttgtccctttgccaatgtggaggaaagtgcctgccctctggtccgagccgcctcggttctgaagcgagtgctcctgcttaccttgctctaggctgtctgccagnaaagccctccggtgggacttcagcaacctccttgtggctgaacccctccaatcaccttcacgctgtccccccatgggccagggaaccaaaccagcactgggttctactggtggtggggtaaactaactcagtggaatagggctggttactttgggctgtccaactcataagtttggctgcattttgaaaaaagctgatctaaataaaggcatgtgtatggctggtaaaaaaaaaaaaaaaaa

SEQ ID NO: 5233 - DNA, 3937 bp, Homo sapiens
  SIMILAR (3484)..(3786): 461254mologous to Mus musculus putative,accession number AK009454,Smith-Waterman Score=152.
gccctcagcatcggaccagagtacttggtatctggatgaatcgacactcactgacaacatcaaaaagacactgcacaagttctgtggcccctcccctgtggtcttcagtgatgtgaactccatgtatctgtcttccacggagccgccagccgctgctgaatgggcatgtctgctgcgccctctgaggggccgtgagccagagggcgtctggaacctgctaagcattgtgcgggagatgttcaagcggagggacagcaatgctgcccccttgttggaaatcctcactgaccagtgcctcacctatgaacagataacaggttggtggtatagcgtacgtacctcagcctcacacagcagtgccagtgggcacacgggccgtagcaacgggcagtcagaggtggcagcccatgcctgtgccagcatgtgtgacgagatggtcacactgtggaggctggccgtgctggaccctgcactcagcccccagcggcgccgggaactgtgtacgcagctgcggcagtggcaactgaaggtgattgagaacgtcaagcggggccaacacaagaagacgctggagcggctcttccccggcttccggccagcggtggaggcctgctacttcaactgggaagaggcctacccacttcctggtgtcacctacagcggcactgacaggaagctggcactgtgctgggcccgggccctgccctctcggccaggtgcctcccgctctgggggcctggaggaatcccgggaccggccccgaccccttcctactgagccagctgtgcggcccaaggagcctgggaccaagcgaaagggcttgggtgagggggtcccctcatcacagcggggtccccgccgcctctcagctgaagggggagataaagctctacataagatgggtccaggtgggggcaaagccaaggcactgggtggggctggcagtgggagcaagggctcagcaggtggcggaagcaagcgacggctgagcagcgaagacagctccctggagccagacctggccgagatgagcctggatgacagcagcctggccctgggcgcagaggccagcaccttcgggggattccctgagagccctccaccctgtcctctccacggtggctcccgaggcccttccactttccttcctgagcccccagatacttatgaagaagatggtggtgtgtacttctcggaagggcctgagcctcccacagcctctgttggcccccctggcctactgcctggggatgtctgtacccaggacgacctcccttctacagatgagagtggcaatgggcttcccaaaaccaaagaggcagcccctgcagttggagaggaggatgatgactaccaggcgtactatctgaatgcccaggatggggctgggggcgaggaagagaaggccgagggcggggctggggaggagcacgacctgtttgctgggctgaagccactggaacaggagagtcgcatggaggtactgtttgcctgtgctgaggccctgcatgcgcatggctatagcagtgaggcctcccgtctcactgtggagcttgcccaggatctgctagccaacccacccgacctcaagggcaagaagaacaaggtatccacgagccgtcagacctgggtggctaccaacaccctgagcaaggcggccttcctgttgacagtgctaagtgagcgtccagagcaccacaacctggccttccgagttggcatgtttgccttggagctacagaggcctccagcttctaccaaggccttggaggtgaagctggcataccaggagtctgaggtggctgccctgctcaagaagatccctctgggtccaagtgagatgagtaccatgcggtgccgggcagaggaacttcgggaggggacactctgtgactatcggcctgtgttgcctctcatgctggccagtttcatctttgacgttctctgtgctccaggttcccggcccccaagtcgcaactggaacagcgagacacctggggatgaggagcttggatttgaagcagcagttgctgccttgggcatgaagacaacagtgagcgaggcagaacatcccctcttatgtgaaggcacacgtcgggagaagggtgacctggcattagcactaatgatcacttacaaggacgaccaggccaagcttaagaagatcttagacaaactcttggaccgagagagccagacacataagccacagacgctgagttctttctactcatctagccgcccaaccacagccagccagaggtctccttcaaagcacgggggcccatctgccccaggggccctgcaaccactgacctcaggctctgcagggcctgctcaaccagggagtgtggcaggggctgggccaggccccactgagggcttcacagagaagaatgtgcctgagagttccccacattccccctgtgagggtcttccatctgaggcagctttgaccccaaggccagaagggaaggttcctagccgcttggcacttggcagtcgtggaggctataatggacggggatgggggtccccaggacggcctaagaagaagcacacaggcatggccagcattgacagcagtgcccctgaaacaacatcggatagttcccccaccttaagccggagaccacttcgagggggctgggcccccacctcctggggtcgaggtcaggacagtgacagcattagcagctcttcttcggactccctgggctcctcatcctccagtggaagtcgccgggccagtgccagtggaggagcccgggcgaagactgttgaagttggcaggtacaagggccgccgccccgagagtcatgcccctcatgtacccaatcagccatcagaggcagctgcacacttctacttcgagctggcgaagacagtgctgatcaaggcagggggcaacagcagcacttccattttcacacatccatcttcctcagggggccaccagggtcctcaccgcaacctgcacctttgcgccttcgagattgggctttatgcccttggcctgcacaactttgtttctcccaactggctctcacgtacttattcttcccacgtttcctggattacaggccaggccatggagataggcagcgcagccctgactatactggtagaatgctgggatgggcacctgacaccccctgaggttgcatccctggctgacagggcatcacgggcaagagactccaatatggtgagggcggcagcagagctggccctgagctgcctgcctcacgcccatgcattgaaccctaatgagatccagcgggccctggtgcagtgcaaggaacaggacaacctgatgttggagaaggcctgcatggcagtggaagaggcagctaagggtgggggcgtgtaccctgaagtgttgtttgaggttgctcaccagtggttctggctatatgagcaaactgctaggtggctcatccgcagcccgtgaaggggcttacaagctgtagtgccagtgggatcagggcaggtggggaagctgggcgcggtatgcctgagggtagagggggcccagggactgagccggttacagtggcagcggcagcagttgacagcagcagccacagtggtgcccgtcatatcggtggggtctagtttatacccgggtccaggactggggcatggccactcccctggcctgcacccctacactgctctacagccccacctgccctgtagccctcagtatctcactcacccagcttcacccttgcccaccccatggcctcacatgccccggcctgccgtcttccctgtggcccagctctgcatacccacagggtgtgcatcctgcattcctaggggctcagtacccttattcagtgactcctccctcacttgctgccactgctgtgtctttccccgttccttccatggcacccatcacagtacatccctaccacacagagccagg

SEQ ID NO: 5234 - DNA, 406 bp, Homo sapiens
tggatcgggagaaaggccttgagaacttcgaagtgcgtcggaattcgatgaactaaaaaataaagaaacacttaggctagtcttcagaatcagtttctgagtttactgtatcaaaacactggagcacacacttagggttggccccaggacactcttcaataaaagtctctgaagataaggaggtagatgtaaaatagaaataatccattctataactctggaagttccaacttcctggaaaactcaatatggagtcatcagctgtctttgttatggaaactgaactctctctctctctctctctccctctcctgtttcacagctaaattaggagacacaaaagagctagaagccttcattgctgatcttgacaaaactttagcaaagtaagtacatttctgatatt

SEQ ID NO: 5235 - DNA, 786 bp, Homo sapiens
  SIMILAR (39)..(350): 901254mologous to Homo sapiens RGC32,accession number AF036549,Smith-Waterman Score=456.
tgcggccgcggaggacctgtcggacgcgctgtgcgaggtttgacgcggtgctggccgacttcgcgtcgcccttccacgagcgccacttccactacgaggagcacctggagcgcatgaagcggcgcagcagcgccagtgtcagcgacagcagcggcttcagcgactcggagagtcgcagattcacttttataggaacagcttcagccttcagtgatgaaaaactgaattctccaacagactctaccccagctcttctctctgccactgtcactcctcagaaagctaaattaggagacacaaaagagctagaagccttcattgctgatcttgacaaaactttagcaagtatgtgaaacaagaagttctggggtcctttcatcataagggagaagaagcttcagaaagttccgaggacctgctaaaatcagctactagaatctgctgcccagaggggacaaagaccgtgcacctcaacccttcctaccccaggcccactcctcaggcctcacccttaaaatcagccccttgatccccatttcctgggcaatttagacagtgaaactggactttgtttaacctgcttgcagcatattagaacagacgatccgatgctaatattggtattttctcttaaaacatagctttcctgtaatttaaagtgcttttaatgaaaatatttgtaattaagtgatatatagttgggaaataggcagtaagctttcccattattaatatatttttgtatacaaataaaatttgaactgaaaaaaaaaaaaaaaaaaagat

SEQ ID NO: 5236 - DNA, 411 bp, Homo sapiens
  SIMILAR (2)..(250): 1001254mologous to Homo sapiens dJ93K22.1 (novel protein (contains DKFZP564B116)),accession number AL050333,Smith-Waterman Score=438.
ttcccaagtggcagctgctaaggatcatactgttgtattaactgaagatggatgtgtttatacatttggtctaaacatttttcatcaattaggaattattccaccgccttccagttgtaatgtacccagacagatacaggcaaaatatctgaaaggaaggacaatcattggcgttgcagcaggcaggtttcatacagtcctatggactagagaagctgtttacactatgggactaaatggtggacaactggacagttgaacttgaaaaaagttcttgtgtctgggggtcatatggaatacaaggttgatcctgaacatttgaaagaaaatgggggtcaaaaaatttgcattcttgcaatggatggagctggaagggtgttttgctggagatcagtcaacagttctctgaag

SEQ ID NO: 5237 - DNA, 283 bp, Homo sapiens
  SIMILAR (2)..(148): 1001254mologous to Homo sapiens putative BTK-binding protein,accession number AF235049,Smith-Waterman Score=240.
ggcatcttctctgcattcagtttcatccaagtcattccgggatttcttactagaagaaaaaaagtctgttactagccatagttcaggcgatcatgtcaaaaaagtttcttttaaaggaattgaaaattctcaggcaccaaaaattgtcagtccctggctatcttcttcagtgactgctccatccatggtagccccagtcacttttgcatctattgtagaagaagaactacaacaagaagcagctcttattagaagtcgagaaaaaccgttggctctgattcag

SEQ ID NO: 5238 - DNA, 418 bp, Homo sapiens
  SIMILAR (3)..(185): 981254mologous to Homo sapiens putative BTK-binding protein,accession number AF235049,Smith-Waterman Score=305.
ctccttcaaaagcccccaaaccagtgaatgcatgggcatcttctctgcattcagtttcatccaagtcattccgggatttcttactagaagaaaaaaagtctgttactagccatagttcaggcgatcatgtcaaaaaagtttcttttaaaggaattgaaaattctcaggcaccaaaaattgtcaggtaataaaacaaacttaaaactaatacattttctaccttaaaatattctgtggtggttttatgttctgaaataatccttaaaactttatgaggcagattttttgtacactcttttacattcagaattaaaattagcatgtttaaattccttccccacttaaaaaaattgaaacggttacggagatataattgacttaaaatcaattgcgtatatttaaagggatacattctgag

SEQ ID NO: 5239 - DNA, 1335 bp, Homo sapiens
  SIMILAR (1190)..(1330): 611254mologous to Homo sapiens B-cell growth factor,accession number M15530,Smith-Waterman Score=134.
  misc_feature (1)...(1335): n = a,t,c or g
atatttatggggtagaaggacccaaagttcattaaacacaatgcccgccccacggtntgggtctttttttcgctcattatattccgcaggtgcccaacacagtttattcggtctccctaaaggaaaaaaacccattttaaaaagccatccagcagaatgccacatccctagaaagatccacttcctggcccttcagctgcttctgtttctcttcacctacaaaaataaaattacgagtatacaataacccttttaaaatacagcatcattaagtgggaaactgaaagcctgccattgttgttgccgtttaacagctgatacaggtttctgggtgatgctactgttgcctagctaccctgaccacattattttttcactgtatcagtgggngtgtcatattttttttttttgccatccttgttcctatggcgagttatgtcatattttttactgttaagtacttatgcatgaataagtataagaaaataactgcttattggtagcatatacattcagtcaggaatggaatggtgacatcaaccaaccacaaattacccaaatgagtggctggaaataatgacacctttgctttctgatggttcaaggtatgcaaacttggtctcaatgcacaaaattattaaaaataatgttatataaagttaccttcaagctatgtgcataaggtatatatgaaacaagtgaatttgtgtttaaacttgggtcccatctccaagatatcttattgtgtgtatgcaggtattccaaaatttggaaaaacatcccaaatccaagatgcttctactannnnnnnnnnnnnnnnnnnnnnnnnnnnnnnnnnatatagcaaaatcactgaatctaagagatgggtatacaaagatcactactttcagttttcctttttgtttgaaaatgtacatgacaaacatatccatacagttcattgtaacattacaattcccaaatcctttgggaaaaatccacctacacacacagtctctctttatctaagtggattcaagatgctcctttttacaaaacttaaaaagattttgcagtggtggcactccagcctcaagtgagtagcatagtcctgcctatttaaaaacatcttagtattccatttcactcttaagttttgtgttccttccattccattagggaatagaactttgcatctgatgacaaattcagtttaccatgagactacaccacatttaaagtaaactggccaggtgcggtggctcacgcttgaaatccaagcaatttgggaggccaaggcgggcagatcacttgaggccaggagtttgagaccagcctagccaacatggcaaa

SEQ ID NO: 5240 - DNA, 4610 bp, Homo sapiens
  SIMILAR (978)..(1685): 861254mologous to Homo sapiens dJ93K22.1 (novel protein (contains DKFZP564B116)),accession number AL050333,Smith-Waterman Score=1001.
  misc_feature (1)...(4610): n = a,t,c or g
tggaattattccaccgccttccagttgtaatgtacccagacagatacaggcaaaatatctgaaaggaaggacaatcattggcgttgcagcaggcaggatttcatacagttcctatggactagcagaagcctgctttacactatgggcactaaatggctggacaactgggttgtttgctagatcccaatggagaaaaatgtgtaactgctcctcgtcaggtctctgcccttcaccataaagacattgctctgtctttggttgctgcaagtgatggagctacagtctgtgttaccacaaggggagatatttacttacttgcagactatcagtgcaagaagatggcttctaaacagttgaacttgaaaaaagttcttgtgtctgggggtcatatggaatacaaggttgatcctgaacatttgaaagaaaatgggggtcaaaaaaatttgcattcttgcaatggatggagctggaagggcgttttgctggagatcattcaacagttctctgaagcagtgtcgatggtcctatccacgtcaggtcttcatttctgatattgctttaaatagaaatgaaattctattcgttacgcaagatggagaatgatttagagggagatggttagaagagaaaagaaagagttctgaacagaaagagattttatcaaaccttcacaattcctcatcagatgtgtcttatgtctctgatataaatagtgtgtatgaaagaattcgacttgagaaacttacctttgcacatagagctgttagtgtcagcacagatccaagtggatgcaactttgcaatcctgcagtcagatcctaaaacaagcctttatgaaattccagctgtgtcctcatcatccttttttgaagagtttggcaaactgttgagggaagcagatgaaatggacagcattcatgatgtgacatttcaagttggcaatagatctcttccctgcacataaatatattttggccagtgcattctgatatttttcagaaattgtttcttttcagatggtaatacttcagaatttacagatatttacccagaaaggatgaagattcctgccagggtgcccatcctctttgtggtagagaaggttcatccctgacatgtttgaatgaccttttacaatttatatacacagatacttgtgactttttaactcatggcttcaaaccaagaatacacttaaacaaaaacccagaagaatatcagggaactctgaattctcatttgaataaagtgaatttccatgaagatgataaccagaagtctgcatttgaagtttacaaaagtaatcaagctcaaacagttagtgagaggcagaagagcaaacctaaatcttgtaaaaaaggaaaaaatattagggaagatgatcctgtaagaatgttgcaaactgttgcaaagaaattcgacttcagtaatttgagtagtaggttagatggagtcagatttgaaaatgaaaaaattaatgttattgccaagaacactggtaataaactgaagctaagtcagaaaaaatggtataatgtatacaaagaaaaagtgatgcttgttttctttctttttttagaatctcaaaatgtagattttatttgtagtgttcttgtggtggctgatcaacttctcataacccggttgaaagagatttgtgaagtagcattaactgaaaaacttacccctgaagaatgctgctatgctactggaatttgcagcaatgtatagtgcaaaacagttgaaactgtcttgtttacagtttataggattgaatatggcagctttacttgaagcaaggtctcttgatgttttaagcgatggtgttttgaaggatctttctgagttttaccggaaaatgattccagcaatggatagaagagtcattacaccatatcaagatggaccagatattagctatttggaagtagaagatggagatatcttccttgaaagaagaaataaatatggaaccaaatcattcggaaactatgttcaagaaagcaaaaacaaaagctaaaaagaagccacgtaaacgttcagatagttctggaggttataacctttcagatattattcagagtccatcatctacaggattattaaagtctggtaagaccaattctgtggaatctcttccagaactgttgacatcagactctgaaggaagctatgcaggagtgggtagtcctagagatttacagtcccctgatttcacaacaggatttcattcagataagattgaggcgaaagtcaaaccgtatgttaatggtacatctcctgtgtattctagggaagatttaaaaccatgggaaaagtcaccaatacttaaaatatctgctccacagcctattcccagtaacagaattgatactaccagctctgccagttgggttgctggttctttcagtcctgtcagccctcctgttgtggatctcagaactatcatggaaatagaagaaagtagacaaaaatgtggagctacaccaaagtcacatttaggcaaaacagtttctcatggagttaaactttctcagaagcaacgaaaaatgattgcattgactaccaaggtataacaattcaggactgaatagcatgcaaacagttatatgcattccttcagatgccccctaaacagtaaatgaatagggatcttctctgcattcagtatcatccaagtcattccgggatttcttactagaagaaaaaaagtctgtaactagccatagttcaggcgatcatgtcaaaaaagtttcttttaaaggaattgaaaattctcaggcaccaaaaattgtcagatgctctacccatggtaccccaggaccagaaggcaaccatatttcagatttaccacttctagacagtcccaatccctggctatcttcttcagtgactactccatccatggtagccccagtcacttttgcatctattgtaggaagaagnacttcaaccaaggaagcagctcttattagaagtcgagaaaaaccgttggctcttgattcagattgaggagcatgccatacaagatttattggttttctatgaggcatttggcaaccctgaagagtttgtcattgttgaaaggacaccgcagggaccactggcagtacctatgtggaataagcatggatgctagttcactgtggaggtgagatgcattttacataattatgagtttgttcatatgaaagaaaagctgtgggaaaagagtcttgagagattttgtaatatcattctaaatagattaagaaaagatataatttctttactgcagttaaatcatataatgtttgtatgattaaaaataaatttctcagaattgtgattttagtaactttatataaaatgtgtgagacaaaaacttattaaggttaaatagaattgtttcttctgaataatctaacaaaggaaaatataagtgattgaatcataagatataagggggggtaaagtattaaaaataacttttttgtttgataacttgagaatttagaagattttgccaagtatgtgttgttgcttgacttcttaaatatggcattgatgaatttaaagtaggagcatcagttattacttctgattcattaatggccagaattttgtgtttggtgtaatagttgtgtcaccattcttgttgctttttaaaaatcaggctaatcatgtggtccatgtctcttcaaagcttgacctgcacaaatgccatatttctatttggacccacatattctccattttgcattgagcagtagagtacagtggaaagggaataagaatactgattattctgaacagtttagtcccaagagaatagcgttttaaaaaagaaaaacaagatttggagtcattgtgggttatttttggtgggatggaggatcttaaaaatgcctaattgtgagagaaatcaaattgctgaaaagtgttaaaaatttctgaaaattaaatgcttaattccatataccaggaattcaaataagtttggaagagggttggattatccattaccctttacaatactgtattaatccggaagttctctgaacctcaattgtatatctagacataaaaattgttttctgtataggatgttgtttggtttgtttctgagtgtttaaattttgcaaaaacaaatgttaaatttgtgcttcagtacctagataaattggaaaggttaatgttctagtttctggaaggtaagcctgggagacacataagcaattcactgcttataatttagttgatgtaaaatgaccggaaactgactcaatatgtcaggtttaactcctgcccaaaagcagcagacattgtaagcagatgttgcaataaaaaatgatcttgatccatttcactaatgtgtgcttgacattttttactatattgacatttattatggaaagagttaataattattttttctgatgtgctacactagtggccagtatatggttaagttgatgttgtatttattctaagacggatttaaaaaggcagttttctaaatatgaacttgtgaatttttgtatgtgtgtttgagtaaattgagaaatgaattttataaatgttctattgatgttgcagtaaagaagccttttgaagtaaaaaaaaaaaaaa

SEQ ID NO: 5241 - DNA, 1326 bp, Homo sapiens
  SIMILAR (1236)..(328): 781254mologous to Homo sapiens putative p150,accession number U93567,Smith-Waterman Score=1202.
ctagccttgcatcctagggatgaagcccacttgatcatggtggataagctttttgatgtgctgctggatttggtttgccagtattttattgatgatttttgcatggatgttcatcaggcatattggcctaaaattctctttttttgttgtgtctctgtcaggctttggtatcaggatgatgctggcctcataaaatgagttagggagtattccctctttttctattgattggaatagtttcagaaggaatggtcccagctcctccttgtacctctggtagaattcggctgtgaatccatctgctcctggactttttttggttggtaagctgttaattattgcctcaatttcagagcctgttcttggtttattcagagattcaacttcttcctggtttagtcttctgctagcttttgaatgtctttgctcttgcttctctaattcttttaattgtgatgttagggtgtccattttagatcttttctggtttctcttgtgggcatttattgctataaatatccctctacacgcagctttgcctgtgtcccagagattctggtatgttgtgtctttgttctcattggtttcaaagaacatctttatttctgccttcatttcgttatgtacccagtagtctttcaggagcaggttgttcagtttccatgtagttgagcggttttcagtgagtttcttaatcctgagttctagtctgattgcactgtggtctgagagacagtttgttataatttctgttctgttacatttgctgaggagtgctttacttccaactatgtggtcaattttggaataggtgtggtgtggtgctgaaaaaaatgtatattctgttgatttggggtggagagttctgtagatgtctgttaggtctgcttggtacagagctgagttcaattcctggatatccttgtcaaccttctgtctctttgaactgtctaatgttgacagtggggtgttaaagtctcccactattattgtatgggagtctaagtctctttgtaggtctctaaggacttgctttatgaatctgggtgctcctgtattgggtgtatatatatttaggatagttagctcttcttgttgaattgatccctttaccattatgtagtggccttctttgtctcttttgatctttgttggtttaaagtctttggtctttgatgatggtgacgtacagatggagttttggtgtggatgtcctttctgtttgttagttttccttctaacagtgaggaccctcagctgcaggtctgttggagtttgctggaggtccactccagatcctgtttgccttggtatcagcagcggagg

SEQ ID NO: 5242 - DNA, 924 bp, Homo sapiens
  SIMILAR (460)..(900): 701254mologous to Homo sapiens Human secreted protein encoded by gene 3 clone HNHCT15,accession number AAB38012,Smith-Waterman Score=492.
  misc_feature (1)...(924): n = a,t,c or g
atggagggaagccctagngtcgncntaatgggncttangaccgaagtcccgggagttcacagtgagaatgataagaatcagaagaagaaaataagaaaactagaccctaaaaagaaacaggtggacacagtgcagataatccagggtagcaaaaaagggtctagttttcttattttcttcttctcccctcttatcattctcactgttgaactgcaagttgggaatgtagttgctcaggaactctccatccagttggagctgttttggagaactagagcttctcagtctgtgacagagccaacagcaggtctttgcttattaaatcctggtgaacaggagatgcgggcgttaagagggaggagaaagcctctgctgctgatacctaggcaaacaggatctggagtggacctccagcaaactccaacagacctgcagctgagggttctgactgttagaaggaaaactaacaaacagaaaggacatccacaccaaaaccccatcttgttggaagttctggccagggcaatcaggcaggagaaggaaataaagggtatccagttaggaaaagaggaagtcaaattgtccctgtttgcaggtgacatgattgtatatctagaaaaccccattgtctcaacccaaaatctccttaagctgataagcaactgcagcaaagtctcaggatacaaaatcaatgtgcaaaaatcacaagcattcttatacaccaataacaaacaaacagacagccaaatcatgagtgaactcccattcacaattgcttcaaagagaataaaatacctcagcaatccaacttacaagggatgtgaaggacctcttcaaggaaaactacaaaccattgctcaacgaaataaaacagaaccaaacaaatggaagaacattccagtcatgggagaagaaccaatgtga

SEQ ID NO: 5243 - DNA, 2991 bp, Homo sapiens
  SIMILAR (1135)..(2151): 821254mologous to Homo sapiens putative p150,accession number U93569,Smith-Waterman Score=1398.
atgcctccccactcagagcagcctcacagtccaagcacaagacagaaacgaaaagttcctttgtttgtaaggcaatgcccatcttttgtcattcaggcccccaaagctaagatggacacatttgatggaaggaagaagcagtttaccaggttcttattcttattctcaatggaccagctgggccagggccggttttcaatgcagactctctcttttgctcttgctgtgtatcggaaggattcccccctggttgcttgtcaggtgcaggctcttggcaacctggagccaagctcagtggaagcgcatgtttccagccacggcatcgccattgacaggaagggctggcatgtatcacttttcagcatccaaccaggtgattgcttccccaaagctctcgtggaggatagccccagggacagagcacggaggcaacagtcaagcaaagaggaaggttggtgtagagacaggagaaggcttaagttccacagcaagaaaggggcggcagcaatagtggtgaaaagcaagaagtatgagtctcctagctttggcgtgtgctttgaatccttgctgaatccaccaaggctgaccagcagaagagaaaagacgatttccagcagtaaacgatgcaggcagtgtcatgcagaggaaaccactgttgttttctgggctaaagagagccagaccggagaacagacaggaaggggagcaggacagaggagaatgggcatgattatatgtaaagcttgttccatgctccctgcagaaaggcaggatctcagacccacttctcttgttatctctcatggggtcagtgtcaaggacagacgtgaacactgtcaatgccccaactactacccaccactgagaaatatgtcccctctggaacattcaattaaaatctgtggggggaaaaagcctcaaaatgacagccagagaataacaacaataacaaaagttattgtaaaccaagacttcaagcagccagatgacactgagttgagtcaaggcagtagaaaagaaacgagtgaagcgtccctggtcacattactttgggagttggtaacagcaggccaaacacctccactggtgacacccaggcaaacagggtctggagtggacctccagcaaactccaacagacctgcagttgagggtcctgactattagaaggaaaactaacaaacagaaaggacatccaccaaaaccccatctgtatgtcaccatcatcaaagaccaaagaactctccaccccaaatcaacagaatatacattcttctcagcaccacatcccacttattctaaaattgaccacatagttggaagtaaagcactcctcagcaaatgtaaaagaacagaaattataacaaactgtctctcagaccatagtgcaatcaaattagaactcaggattaagaaactcactcaaaaccgctcaactacatggaaacttaacaatctgctcctgaatgactactgggtatataaagaaatgaaggcagaaataaagatgttctttgaaaccaatgagaacaaagacacaacataccagaatctctgggacacatttaaagcaatgtatagtgggaaatttatggcactaaatgcccacaagagaaagcagcaaagatctaaaattgacaccctaatatcacaattaacagaactagagaagcaagagcaaacacattcaaaagctagcagaaggcaagaaacaactaagatcagagcagaactgaaggagatagagacacaaaaaacccttcaaaaaatcaatgaatccaggagctggttttttgaaaagatcaacaaaattgatagaacactagcaagactaataaagaagaaaagagagaagaatcaaatagacacaataaaaaatgataaaggtgatatcaccaccgatcccacagaaatacaaactactgtttatattatttggtactggtacgcaaataaactagaaaatctagaagaaatggataaattcctggacacatataccctcccaatactaaaccaggaagaagttgaatccctgaatagaccaataacaggctctgaatttgaggcaataattaatagcctaccaaccaaaaaaagtccaggaccagatggattcacagctgaattctaccagagaaccaaagacaaaaaccacatgattatctcaatagatgcagaaaaggccttcaacaaaattcaacagcccttcatgctaaaaactctcaataaactaggtattgatgggacatatctcacccacagccaatatcatactgactgggcaaaaactggaagcattccctttgaaaattggcacaagacagtgttggaagttctggccagggcaatcaggcaggagaaagaaataaagggtattccattaggaaaagaggaagtcaaattgtccctgtttgcagatgacatgattgtatatttagaaacccccatcatctcagcccaaaatctccttaagttgataagcaacttcagcaaagtctcaggatacaaagtcagtgtgcaaaaatcacaagcattcctatacaccaataacagacaaacagagagccaaatcatgagtgaactcccattcacaattgcttcaaagagaataaaatacctaggaatccaacttacaagggatgtgaaggacctcttcaaggagaactacaaaccactgatcaatgaaataaaagaggacacaaacaaatggaagaacattccatgctcatgggtaggaagaatcaatgttgtgaaaatggccatattgcccaaggtaatttatagattcaatgccatccccatcaagctaccaatgactttcttcacagaattggaaaaaactactttaaagttcatatggaaccaaaaaagagccagcattgccaagacaatcctaagccaaaagaacaaagctggaggcatcacgctacctgacttcaaactatactacaaggctacagtaaccaaaacagcatggtactggtactaa

SEQ ID NO: 5244 - DNA, 1842 bp, Homo sapiens
  SIMILAR (1195)..(1839): 881254mologous to Homo sapiens putative p150,accession number U93574,Smith-Waterman Score=1034.
atgcatgcaccctgtggcactgctacagctgctggcacacacaagcaagcacagatcccactgctattgccccagcgaagtgctttggccagcaccacccatgagagtgttgtgaccagtgaactgggaatatctcagcccctccagtgcagcaggtcatcgcaatgtcaattcatgtcttctaaattagcaagtccgcataaagtgtttcagtggacaccttcaatgatgagcgacgaagcccccagtcctggtagtttcggcagctctctgatgcccttcagtagggttttcattacaggcaggagtagtgtttggctgcaaactccttacagccaaggacttctgacagcaaacccagggcttttcccaggattgtcacagctacatacacatgggcacagggcattgcagaagaaagctatttcttcaaaaaacgaattcaccatcatgggccaaatatcagaggcaacttcagccttatttggtgagaaagaaagcaaagaagctacacttagaggagaaggagcaagaaacagagatgatagagtagattcaaactgcaggctccagcccccaggtcaggatggagatgaggggcagaaggtgccggttaaatactcggctggtgatacccaggcaaacagggtctggagtggactccagcaaactccaacagacctgcagctgagggtcctgactgttagaagaaaaactaacaaacagaaaggacatccacaccaaaaccccatctgtacatcagcatcatcaaagaccaaagaaatacaaactaccatcagagaataccataaaaacctctatgcaaataaactagaaaatctagaagaaatggataaattcctggacacatacaccctcccaaggctaaaccaggaagaagttgaatccctgaatagaccaataacaggctctaaaattgaggcaataattaatagcctaccaaccaaaaaaagtccaggaccagatgcattcacagctgaattctaccagaggtacaaagaggagctgagaataaaatacctaggaatccaacttacaagggatgtgaaggacctcttcaaggagaactacaaaccactactcaacgaaataaaaggacacaaacaaatggaagaacattccatgctcatggataggaagaatcaatattgtgaaaatggccacactgcccaagaattggaaaaaactgctttaaagttcatatggaaccaaaaaagagcccacattgccaagacaatcctaagccagaagaacaaagctggaggcatcatactacctgacttcaaactttactacaaggctactgtcaccaaaacagcatggtaccggtaccaaaacagagatatagaccaatggaacagaacagagcccccagaaataataccacacatctacaaccatctgatctttgacaaacctgacaaaaacgagaaatggggaaaggatcccctatttaataaatggtactgggaaaactggctagccatatgtagaaagctgaaactggattccttccttacaccttatacaaaaattaattcaagatggattaaagatttaaatggtagacctaaaaccataaaaaccctagaagaaaacctaggcaatactattcaggacataggcatgggcaaggacttcatgacgaaaacaccaaaagcaatggcaacaaaagccaaagtaggaaaatgggatctaattaaactaaagagcttctgcacagcaaaagaaactaccatcagagtgaacaggcaacctacagaatgggaaaaaatttttgcaatctatccatctgacaaagggctaatatccagaatctaa

SEQ ID NO: 5245 - DNA, 1989 bp, Homo sapiens
  SIMILAR (334)..(981): 881254mologous to Homo sapiens putative p150,accession number U93565,Smith-Waterman Score=978.
atgaagcgagaagagaagtttagagaaaaaagagtaaaaagaaatgaacaaagcctccaagaaatatgggactatgagaaaagaccaagtctgcctctgattggtgtacctgaaagtgacggggagaatggaaccaagttggaaaacactcttcaggatattatccaggacaacttccccaatctaggaaggcaggccaacattcaaattcaggaaatacagataatgccacaaagatactcctcaaggagagcaactccaagacacataattgtcagattcaccaaagttaaaatgaaggaaaaaatattaagggcagccagagagaaagaaatacagactaccatcagcgaatactataaacatctctacgcaaataaactagaaaatctagaagaaatgggtaaattactggacacatacaccctcccaagacaaaaccaggaagaagttgaatccctgaatagaccaatagcaggctctgaaattgaggcaataattaatagcctgccaaccaaaaaaagtccaggaccagacggattcacagccaaattctaccagaggcacaaagaggagctggtaccattccttctgaaacaattccaatcaatggaaaaagaggtaatcctcccaaactcattttatgaagccagcatcatcctgataccaaagcctggcagagacacaacagaaaaagagaattttacaccgatatccctgatgatcattgatgcaaaaatcctcaataaaatactggcaaaccgaatccagcagcacatcaaaaagcttatccaccaagatcaagttggcttcatctctgggatgcaaggctggttcaacgaacacaaatcagtaaacgtaattcatcatataaacagaaccaaagacagaaaccacatgattatctcagtagatgcagaaaaggccttcaacaaaattcagcagcccttcatgctaaaaactctcaataaactaggaatccaacttacaagggatgtgaaggaccccttcaaggagaactacaaaccactgctcaatgaaataaaagaggatacaaacaaatggaagaacattccatactcatggataggaagaatcaatatcgtggaaatagccatactgcccaaggtttccctagaaagagaacgacaacatgatcaaacacatgttcagagccaacttgaaaaattggatcttcttgaacaggagtataacaaacttaccacaatgcaggcccttgcagaaaaaaaaatgcaagagttggaagcaaaactccatgaagaagaacaggaaaggaaacgcatgcaagctaaggcagctgagcatccacgtttgtgtttgtatttggcagccatattttctgctcttaagaatcttcaagataagattcgacgcttggaacttgagaggattcaggcagaagaaagtgtgaaaaccttgtctagagaaacaattgaatataagaaagtactggatgaacagatacaagaaagggagaattcaaagaatgaggaatcaaagcacaatcaagaactgacatctcagttgttagctgcagaaaataaatgcaatctattagaaaaacaattggaatacatgcgaaatatgataaagcatgccgaaatggagaggacatctgtcttagagaaacaaactccgctgctgatacccaggcaaagagggtctagagtggacctccagcaaactccaacagacctgcagctgagggtcctgactgttagaaggaaaactaacaaacagaaaggacatccacaccaaaaccccatctgtatgtcaccatcatcaaagaccaaagaggaacgcagctcctcaccaacaacggaacgaagctggacagagaatgactttgacgagttgagagaagaaggcttcagacgatcaaactactctgagctaaaggaggaacttcaaacccatggcaaagaagttaaaaaccttgaaaaaaaaattagacgaatggctaactag

SEQ ID NO: 5246 - DNA, 1863 bp, Homo sapiens
  SIMILAR (385)..(1473): 601254mologous to Homo sapiens putative p150,accession number U93568,Smith-Waterman Score=1029.
atggggagaaaccagcgcagaaaggatgaaaattccaaaaaccagaatgccttttctcctccaaaggataacaactcctctccagcaagggaacaaaactggatgaagaatgagtttgacaaattgacagaagtacgcttcagaaggtgggtaataacaaacaactccgagctaaaggagcatgttctaacccaattcaaggaagctaagaaccttgacaaaagattagacgaattactaactataataaccattgtagagaagaacataaacgacctgatggagctgaaaaacacagcaccagaacttcgagaagcatacacaagtttcaatagccaaatcgatcaagcggaagaaaggatatcagagattgaagagcaactcaatgaaataaagtgtgacatcaagattaaagaaaaaagagtgaaaagaaatgaacaaagcctccaagaaatatgggactatgtgaaaagaccagatctacatttgattgatatacctgaaagtgacaaggagaatggaaccaagttggaaaacactcttcaggatattatccaggagaacttccccaatctagcaaggcaagccaacagtcaaattcagaaaatacagagaacaccacaaagatattcctcaaaaagagcaactccaagacacattaattgtcagattcaccaaggcaaatggtctggagtggacctccagcaaactccaacagacctgcagctgaaggtcctgactgttagaaggaaaactaacaaacagaaaggacatccacaccaaaaccccatctgtacgtcaccatcatcaaagaccaaagaaatacaaactaccatcagagaataccataaacacctctatgcaaataaactagaaaatctagaagaaatggataaattcctggacacatacaccctcccaagactaaaccaggaagaagctgaatccctgaatagaccaataacaggctctgaaattgaggcaataattaatagcctaccaaccaaaaaaagtccaggaacagacggattcactgccaaattctaccagaggtataaggaggagctggtaccattccttctgaaactattccaatcaatagaaaaagaggaaatcctccctaactcattttatgaggccagcatcatcctgataccaaagcctgacagagacacaacaaaaaaagagaattttagaccaatatccccgatgaacattgatgcaaaaaccctcaataaaacactggcaaaccgaatccagcagcacatcaaaaagcttatccaccatgatcaagtgggcttcatccctgcaatgcaagactggttcaacacatgcaaatcaataaacgtaatccagcatataaatagaaccaaagacaaaaaccacatgattatctcaatagatgcagaaaaggcctttgacaaaattcaacagcccttcatgctaaaacctctcaataaattagtgttggaagttctggccagggcaatcaggcaggagaaggaaataaagggtattcaattaggaaaagaggaagtcaaattgtccctgtttgcagaggacgtgattgtatatttagaaaaccccatcgtctcagaccaaaatctccttaagctgataagcaacttcagcaaagtctcaggatacaaaatcaatgtgctaaactcacaagcgttcttatacaccaataacagacaaacagagagccaaatcatgagtgaagtcccattcacaattgcttcaaagagaataaaatacctaggaatccaacttacaagggatgtgaaggacctcttcaaggagaactacaaaccactgctcaaagaaataaaagaggacacaacattccatgctcatggatag

SEQ ID NO: 5247 - DNA, 642 bp, Homo sapiens
  SIMILAR (482)..(183): 511254mologous to Homo sapiens p40,accession number U93569,Smith-Waterman Score=226.
ttacgatttggcctgtttttgcagtggctggtacgggttgttcctttccgtgtttagtgcttccttcaggagctcttttagggcaggcctggtggtgacaaaatctctcagcatttgcttgtctgtaaaggattttatttctccttcacttatgaggcttagtttggctggatatgaaattctgggttgaaaactcttttctttcagaatgttgaatattggtccccactctcttctgacttgtagagtttctgctgagagatccgctgttagtctgatgggcttccctttgtgggtaacccgacctttctctctggctgcccttaaaattttttccttcatttcaacttggtgaatctgacaattatgtgtcttggagttgctcttctcgaggagtatctttgtggcattctgtgtatttcctgaatttgaatgctggcctgtcttgctaggttggggaagttctcctggataatatcctttggtctttgatgatggtgacgtacagatggggttttgctgtggatgtcctttctgtttgttagttttccttctaacagtcaggaccctcagctgcaggtctgttggagcttgctggaggtccactccagaccctgtttgcctgggtatcagcagcagagg

SEQ ID NO: 5248 - DNA, 496 bp, Homo sapiens
  SIMILAR (4)..(234): 941254mologous to Homo sapiens gonadotropin-regulated testicular RNA helicase; GRTH,accession number AF155140,Smith- Waterman Score=379.
agagaagttctcataacaactaatgtttgcgcccgagggattgatgtgaagcaggtcacaattgttgtgaactttgatctccctgtaaaacaaggagaggagccggactatgagacctacctccacagcatagggcggacggggcgctttgggaaaaaaggccttgccttcaacatgattgaagtagatgagctgccctcgctcatgaaaatccaggaccactttagaaagtcctaaattctgaagtccgcgacctttcctccagccccccatctaaacaaggcaggctctgatgatggcctgctggaactctggactggcagatttctctgatggaaactcaaaaggtcccatggttcaaattgtcctgtgccccaaagcccatggatgtggctggggagcaggggagaaggaacaccttccaggacagtgacagcagtattaagcaactcaacgctgaagacatggatgaaattgaaaagattgactattgaaa

SEQ ID NO: 5249 - DNA, 707 bp, Homo sapiens
  SIMILAR (339)..(533): 981254mologous to Plasmid F Protein A,accession number M12987,Smith-Waterman Score=335.
cctccgctggtgatacccagcaaacagggtctggagtggacctccagcaaactccaacagacctgcagctgagggtcctgtctgttagaaggaaaactaacaaacagaaaggacatccacaccaaaaccccatctgtacgtcaccaccatcaaagaccaaaggtgtgaacgccatgctgaggaaagtggccgtagcggctgcgtccaagccgcacgtggagatccgccaggacggggatcagttctacatcaagacatccaccacggtgcgcaccactgagatcaacttcaaggtcggagaaggctttgaggaggagaccgtggacggacgcaagtgcaggtttttcgatatgcttcgtgatctgctcaagaacgttgatcttaaagggttcgagcctgatgtacgtattttgcttaccaaatacagcaatagtaatggctctcagtccccgtggatggaggagcaaattcgggatgcctggggaagcatggttctaaaaaatgttgtacgtgaaacggatgaagttggtaaagtgccgcaagccaaaggcaacaatgtggttatcacaagtcttatgacaaacagaggcttcttcgaggagggggaggcaacatttgcgccaagcttcttaatgaacatcaaaggcaataaaacatccgttgtcaaaaacagcatcctggagcaaggacagctgacagtcaactaa

SEQ ID NO: 5250 - DNA, 1197 bp, Homo sapiens
  SIMILAR (433)..(1140): 991254mologous to Homo sapiens pregnancy-specific beta-1 glycoprotein,accession number L36606,Smith-Waterman Score=1263.
atggggcccctctcagcccctccctgcacacagcacatcacctggaaggggctcctgctcacagcatcacttttaaacttctggaacctgcctatcactgctcaagtcacgattgaagccctgccacccaaagtttccgaggggaaggatgttcttctacttgtccacaatttgcctcagaatcttgctggctacatctggtacaaaggacaactgatggacctctaccattacattacatcatatgtagtagacggtcaaataaatatatatgggcctgcatacactggacgagaaacagtatattccaatgcatccctgctgatccagaatgtcacccgggaagacgcaggatcctacaccttacacatcataaagcgaggtgataggactagaggagtaactggatatttcaccttcaacttataccacacaagctacctgtggtggatgaatggtcagagcctccctatgactcacaggttgcagctgtccaaaaccaacaggaccctctttatatttggtgtcacaaagtatattgcaggaccctatgaatgtgaaatacggaacccagtgagtgccagccacagtgacccagtcaccctgaatctcctcctgaagctgcccaagccctacatcaccatcaacaactcaaaacccagggagaataaggatgtcttagccttcacctgtgaacctaagagtgagaactacacctacatttggtggctaaatggtcagagcctcccggtcagtcccagggtaaagcgacccattgaaaacaggatcctcattctacccagtgtcacgagaaatgaaacaggaccctatgaatgtgaaatacgggaccgagatggtggcatgcgcagtgacccagtcaccctgaatgtcctctatggtccagacctccccagcatttacccttcattcacctattaccgttcaggagaaaacctctacttgtcctgcttcgcggaatctaacccaccggcagagtatttttggacaattaatgggaagtttcagcaatcaggacaaaagctctctatcccccaaattactacaaagcatagagggctctatacttgctctgttcgtaactcagctactggcaaggaaagctccaaatccatgacagtcgaagtctctgaggacccttatgatgacactgggagccacacagataagccagaataa

SEQ ID NO: 5251 - DNA, 637 bp, Homo sapiens; identical to SEQ ID NO: 490
  SIMILAR (47)..(412): 991254mologous to Homo sapiens gamma-G globin,accession number X55656,Smith-Waterman Score=637.
  misc_feature (1)...(637): n = a,t,c or g

SEQ ID NO: 5252 - DNA, 801 bp, Homo sapiens
  SIMILAR (94)..(798): 691254mologous to Homo sapiens putative p150,accession number U93574,Smith-Waterman Score=787.
atggagaattgcactgctgttttgaatatcatggtcaaagaaaacttcattgataaaattataaataagcagggacctgaaggaagggaagaagggagtcatacagctctccagaggaagaggactctggacagtggcccaaggcaaacagggcctggagtggacctccagcaaactccaacagacctgcagctgagggtcctgactgttagaaggaaaaccaatgaacagaaaggacatccacaccaaaaccccatctgtacgtcaccatcatcaaagaccaaagactttaaaccaacaaagatcaaaagagacaaagaaggccattacataatggtaaagggagcaattcaacaagaagagctaattatcctacatatatatgcacccaatacaggagcacccagattcataaagcaagcccttagagactcacaaagagacttagactcccacacaataataatgggagactttaacacccctctgtcaacattagacagacccacgagacagaaagttaacaaggatatccaggaactgaactcagttctgcaccaagtggacctaatagacatctacagaactttccaccccaaatcaacagaatatacattcttctcagcaccacatcgcacttattccaaaattgaccacatagttggaagtaaagcactcctcagcaaatgtaaaagaggagaaattataacaaaaatcaaactagaactcaggattaagaaacagacgcaaaaccgctcaactacatggaaactgaacaaccttcttctgaatgactactga

SEQ ID NO: 5253 - DNA, 669 bp, Homo sapiens
  SIMILAR (229)..(642): 941254mologous to Homo sapiens putative p150,accession number U93569,Smith-Waterman Score=676.
atgccagtgacacttggtactagtatgaggtcagattccctaggagagccccagacagaggttgagcctccgctggtgatacccaggaaaacagggtctggagtggacctccagcaaactccaacagacctgcagctgagggtcctgactgttagaaggaaaactaacaaacaaaaaggacatccacatcaaaaccccatctgtacgtcaccatcatcaaagaccaaagcccaaaatctccttaagctgataagcaacttcagcaaagtctcaggatacaaaatcaatgtgcaaaaatcacaagcattcttatacaacaataacagacaaacagagagccaaatcatgagtgaactcccattcacaattgcttcaaagagagtaaaatacctaggaatccaacttacaagagatgttaaggacctcttcaaggagaactgcaaaccactgctcaaggaaataaaagaggacacaaacaaatggaagaacattccatactcatggataggaagaatcaatatcgtgaaaatggccatacagcccaaggtaatttatagattcaatgctatccccatcaagctacccataactttcttcacagagttggaaaaaactactttaaagttcatatggaaccaaaaagagcccgcattcccaagacaatcctaa

SEQ ID NO: 5254 - DNA, 774 bp, Homo sapiens
  SIMILAR (309)..(4): 641254mologous to Homo sapiens PRO2221,accession number AF116695,Smith-Waterman Score=311.
tcatgccatggttttcagctccatcaggttatttaaggtcttctctatgctgtttattctagttagccatttgtctaatcttttttcaaggtttttagcttctttgcgatgggttcgagcatcctcctttagctcggagaagtttgttattactgattgtctgaagccttcttctctcaactcgccaaagtcattctccgtccagctttgttccgttgctaccaaggagctgcattcctctttggtctttgatgatggtgacatacagatggggttttggtgtggatgtcctttctgtttgttagttttccttctaacagtcaggaccctcagctgcaggtctgttggagtttgctgcaggtcactccagaccctgtttgcctgggtatcaccatcggagggtgacactgaggggacatcatccccaaatgctcccagcctctgaacatccacttccattatgtttttaaaatgagatgaggaagcagccgtcctggccgtggccctgagattcggtgcttttctccagcggcaaggctgctgctgacggcacatcagcagtggcctcagctctgggcgatcttccagcaggtagcgctcctcctgcctcatgctgggggtgcggatcatgtgattttgttcccctctccagtctccaaagcgacggaaaaaatagttggataagaaccggttgacggggtctctaatgatgttgatgtagacaggctggtctcctccaaacctaacacaaacattgagttcgttacaacccat

SEQ ID NO: 5255 - DNA, 585 bp, Homo sapiens
  SIMILAR (206)..(319): 921254mologous to Homo sapiens Human secreted protein, SEQ ID NO: 4473,accession number AAG00392,Smith-Waterman Score=192.
ccggccagctttcaggttttcattatcgagtatgatgttaactgtgcacttgccatttatggtccttatgttgaggtatattccttctatagctaaattggtgagaatttttatcctgaaagggtgttgaattttgtcaaatgctttttctgtgtctttggtctttgatgatggtgacgtacagatggggttttggtgtggatgtcctttctgtttgttagttttccttctaacagtcaggaccctcagctgcaggtctgttggagtttgctggaggtccactccagaccctgtttgcctggctatcaccagcagaggctttactccagttctcaacaggttcctcaaatctgcatctgagaccacctcagcctggacttcattgtccatatcactatcagcattttggtcaaagccgttcaacaagtctctaggaagttccaaactttcccacatctttttgtcttctgagccctccaagtctctaggaagttccaaactttcccacatttccctgtcttcttctaagtcctccaaactgtttaaacctctgcctgttaaccagtgccaaagtcgcttccacat

SEQ ID NO: 5256 - DNA, 1854 bp, Homo sapiens
  SIMILAR (649)..(1851): 841254mologous to Homo sapiens putative p150,accession number U93569,Smith-Waterman Score=1692.
atggatatgctggacaaagggatgattcaggtgccagttgaaagtttggaatgcccagaacactttgttcaggaacctgtgctgccttcagaattgcgcagtgaaaaacaagagccttggaatcaacccagcctggatttggagcccagctttgccacttacatggcttgttccatgctccctgcagaaaggcaggatctcagacccacttctcttgttatctctcatggggtcagtgtcaaggacagacgtgaacactgtcaatgccccaactactacccaccactgagaaatatgtcccctctggaacattcaattaaaatctgtggggggaaaaagcctcaaaatgacagccagagaataacaacaataacaaaagttattgtaaaccaagacttcaagcagccagatgacactgagttgagtcaaggcagtagaaaagaaacgagtgaagcgtccctggtcacattactttgggagttggtaacagcaggccaaacattccaagatgaccgaatgggaacagctccagtctacagctcccagcgtgagcgacgcagaagacgggtgatttctgcatgtccaactgagcctccactggtgacacccaggcaaacagggtctggagtggacctccagcaaactccaacagacctgcagttgagggtcctgactattagaaggaaaactaacaaacagaaaggacatccaccaaaaccccatctgtatgtcaccatcatcaaagaccaaagaactctccaccccaaatcaacagaatatacattcttctcagcaccacatcccacttattctaaaattgaccacatagttggaagtaaagcactcctcagcaaatgtaaaagaacagaaattataacaaactgtctctcagaccatagtgcaatcaaattagaactcaggattaagaaactcactcaaaaccgctcaactacatggaaacttaacaatctgctcctgaatgactactgggtatataaagaaatgaaggcagaaataaagatgttctttgaaacgaatgagaacaaagacacaacataccagaatctctgggacacatttaaagcaatgtatagtgggaaatttatggcactaaatgcccacaagagaaagcagcaaagatctaaaattgacaccctaatatcacaattaacagaactagagaagcaagagcaaacacattcaaaagctagcagaaggcaagaaacaactaagatcagagcagaactgaaggagatagagacacaaaaaacccttcaaaaaatcaatgaatccaggagctggttttttgaaaagatcaacaaaattgatagaacactagcaagactaataaagaagaaaagagagaagaatcaaatagacacaataaaaaatgataaaggtgatatcaccaccgatcccacagaaatacaaactactgtttatattatttggtactggtacgcaaataaactagaaaatctagaagaaatggataaattcctggacacatataccctcccaatactaaaccaggaagaagttgaatccctgaatagaccaataacaggctctgaatttgaggcaataattaatagcctaccaaccaaaaaaagtccaggaccagatggattcacagctgaattctaccagaggtacaaggaggagctgttaccattccttctgaaactattccaatcaacagaaaaagagggtatccttcctgactcatttcatgaggccagcatcatcttgataccaaagcctggcagagataaaacaaaaaaagagaattttagaccaatatccctgatgaacattggtgcaaaaatcctcaataaaatactggcaaactga

SEQ ID NO: 5257 - DNA, 903 bp, Homo sapiens
  SIMILAR (391)..(903): 911254mologous to Homo sapiens Human secreted protein encoded by gene 3 clone HNHCT15,accession number AAB38012,Smith-Waterman Score=783.
atgaatggaatttattcaagagacaccagagagctctttcctctttgtgccatgggagcactgaaggagaagtcagtagcgtgtaatgtggagaggccctcaccagaacccaaccatgatggacaaggagtagatgaacctctttcagaaactggatttaaacaagcagcagctgctggtatatttctgaataatgtgaagtttactcatgctttctccagtgatctcatgaggacaaagcagcctccactgctgatacccaggcaaacagggtctggagtggacctccagcaaactccaacagacctgcagctgaggatcctgactgttagaaggaaaactaacaaacagaaaggacatccataccaaaaccccatctgtacgtcaccatcatcaaagaccaaagaactagagaagcaagagcaaacacattcaaaagccagcaggaggcaagaaataactaagatcagagcagaactgaaggagatagagacacaaaaaacccttcaaaaaatcaatgactccaggagctggttttctgaaaagatcgacaaaattcatagactgcgagcaagactaataaagaagaaaagagggaagaatcaaatagatgcaataaaagatgataaaggtgatatcaccactgatcccacagaaatacaaactaccatcagagaatactataaacacctctatgcaaataaactagaaaatctagaagaaatggataaattcctggacacatacaccctcccaagactaaaccaggaagaagttgaatctcttaatagaccaataacaggctctgaaattgaggcaataattaatagcttaccaaccaaaaaaggtccaggaccagacagattcacagctgaattctatcagaggtacaaggaggagctg

SEQ ID NO: 5258 - DNA, 1402 bp, Homo sapiens
  SIMILAR (597)..(148): 941254mologous to Homo sapiens Human secreted protein encoded by gene 3 clone HNHCT15,accession number AAB38012,Smith-Waterman Score=705.
tcaattcaagcactccccacaatctctgggattgtggctaagacaagcagaaagtgtttgatcttcagttgcctgctgttgttcaccctggaatccactgagaggtgtattgtcatgtgtggccttggttatctctctgcatgtgttcttgggcagtatggccattttcacgatattgattcttcctacccatgagcatgaaatgttcttccatttgtttgtatcctcttttatttcactgagcagtggtttgtagttctccttgaagaggtccttcacgtccctcgtaagttggattcccaggtattttattctctttgaagcaattgcgaatgggagttcactcatgatttggctctctgtttgtctgttattggtgtataagaatgcttctgatttttgcacactgattttgcatcccgagactttgctgaagttgcctatcagcttaaggagattttgggctgagacgatggggttttctgggtatacaatcatgtcatctgcaaacagggacaatttgacttcctcttttcctaattgaataccctttatttccttctcctgcctaattgccctggccagaacttccaacactctggtagaattcggctgtgaatccatctggtcctggacttttttggttggtaagctattaattattgcctcaatttcagagcctgttattggtctattcagagattcaacttcttcctggtttagtcttgggagggtgtatgcgtcgaggaatttatccatttcttctagattttctagtttatttgcatagaggtgtttatagtattctctgatggtagtttgtatttctttggtctttgatgatggtgatgtacatatggggttttggtgtggatgtcctttctgtttgttagttttccttctaacagtcaggaccctcagctgcaggtctgttggagtttgctggaggtccactccagaccctgtttgcctgggtatcagcagtggaggtcgagcctcggcaaaggtgggcgcccctcccgcagcctcgctgccaccttgcagtttgatctcagactcctgtgctggcagtgagcaaggctctgtgggcgtaggaccctccaggccaggcgcaggatataatctcctggtgtgccgtttgctaagaccgttgggaaagcgcagtattagggtgagagtgacctgattttccagttgctgcctgtcacccctttctttgactaggaaagggaactccccaaccccttgcacttcctgggtgaggcaatgcctcgccctgcttcggctcacgctcggtgcgctggacccactgtcctgcacccactgtccgacaatccccagtgagatacacccggtacctcagttggaactgcagaaatcgttcgtcttctgcgtcgctcat

SEQ ID NO: 5259 - DNA, 1644 bp, Homo sapiens
  SIMILAR (1475)..(1642): 851254mologous to Homo sapiens putative p150,accession number U93567,Smith-Waterman Score=261.
cctggagttttgactactgtagcccaaatgccaacttttatcctattttaaatgatcatactgagagcatcttcagcaattatgaccaaagactttcagtggacattggcaattttaaggcttcgctgctgatacccaggcaaacagggtctggagtggacctccggcaaacaccaacacacctgcagctgagggtcctgactgttagaaggaaaactaacaaacagaaaggacatccacaccaaaaccccatctgtatgtcaccatcatcaaagaccaaagtgttggaagttctggccagggtgatcaggcaggagaaagaaataaagggtattcaattaggaaaagaggaagtcaaattttttttgacttctgttttgaccctgtttgcagatgacatgattgtatatttagaaaaccccattgtctcagcccaaaatctccttaagctgataagcaacttcagcaaagtctcaggatacaaaatcaatgtgcaaaaatcacaagcattcctatataccaataacagacaaacagagagccaaatcatgagtgaacccccattcacaattgcttcaaagataataaaatacctacaaatccaacttacaagggatgtgaaggacctcttcaaagagaactacaaaccactgctcaacaaaataaaagaggacacaaacaaatggaagaatattccatgctcatggataggaagaatcaatattgtgaaaatggccatactgcccaaggtaatttgtagattcaatgccatctccaccaagctaccaataaccttcttcacagaattggaaaaaaactactttaaagttcatatggaaccaccaaagagccagcattgccaagtcaatcctaagtcaaaagaacaaagctggaggcatcatgttacctgacttcaaactatactacaaggctacagtaaccagaacagcatggtactggtaccaaaacagagatatagaccaatggaacagaacggagccctcagaaataatgccacatatctacaactctctgatctttgacaaacctgacaaaaacaagaaatggggaaaggattccctatttaataaatggtgctgggaaaactggctagccttatgtcgaaaactgaaactggatcccttccttacaccttatacaaaaattaattcaagatggattaaagacttaaatgttagaactaaaaccataaaaaccctagaaggaaacctaggcaataccattcaggacataggcatgggcaaggacttcatgtctaaaacaccaaaagcaatggcaacaaaagacaaaattgacaaatgggatctagttaaactaaagagcttctgcacagcaaaagaaactaccatcagagtgaacaggcaacctacagaatgggagaaaatttttgcaatctactcatctgacaaagggctaatatccagaatctacgatgaactcaaacaaatttacaagaaaaaaaccaaacaacccaatcaaaaagtggccaaagggtatgaacagacacttctcgaaagaagacatttatgcagccaacagacacgtgaaaaaatgctcatcctcactggccatcagagaaatgcaaatcaaaaccacagtgagataccatctcacaccagttag

SEQ ID NO: 5260 - DNA, 2456 bp, Homo sapiens
  SIMILAR (1620)..(2453): 821254mologous to Homo sapiens p40,accession number U93569,Smith-Waterman Score=1169.
gtgctgacaaggctgcctacctgatgggggtcagcagtggggacctcctcaaaggccttttgcacccccgggtgcgtgtagggaacgagtacgtgaccaagggccagagtgtggagcaggtggtgtttgctgtgggggctctggccaaggccacctatgaccggctgttcaggtggctggtgtctcggatcaaccagaccctggacacaaagctgccccggcagttcttcatcggggttctggacatcgctgggtttgagatctttgagttcaacagcttcgaacagctgtgcatcaacttcaccaatgagaaattgcagcagttcttcaaccagcacatgtttgtgctggagcaggaggagtacaagcgggagggcatcgactgggtcttcatcgacttcggccttgacctgcagccttgcatcgacctcatcgagaaggaggagcgactcaagccttcgcgaaagaaaataaccaaaaagcatacaaagaaacgtacggcgtctctcatattacacgccatgatatgctgcagatccctaaacagcagcaaaacgaaaaataccaagtgcctcaattcgatcaatcaacgattaaaaatttggagtctgcaaaaggacttgatgtgtgggacagctggccgctgcaaaacgctgcacggaaccagtcagctgaatacaacggctatccacgttgtgttagctcttgcgggaagcccgaaagacgctgatgacacatcaatctacatgttttatcaaaagcacatcctttactgcattgtggacagcgagtgtaagtcaagggatgtgctccagagttactttgacctcctgggggagctgatgaagttcaacgttgatgcattcaagagattcaataaatatatcaacaccgatgcaaaggtattcctgaagcagatcaacagctccctggtggactccaacatgctggtgcgctgtgtcactctgtccctggaccgatttgaaaaccaggtggatatgaaagcggcccttctcagcattcctggctttgttgagcggctttgcaaactggcgactcgaaaggtgtcagagtcaacgggcacagccagcttccttcaggagttggaagagtggtacacatggctagacaatgctttggtgctagatgccctgatgcgagtggccaatgaggagtcagagcacaatcaagtgttctggtttgagcaacatggtttggtgtcgggcgcagagaaagccccaggaactacgattgatcaggctcccagaatctatagatggagtgacctgacgaggacacaggcgcagtggcagagcgcgatgacttggtcgatgtccgcgttcactgagacttttttgacggagagggacaaacaatccaagtggagtggaattcctcagctgctcctcaagctgcacaccaccagccacctccacagtgactttgttgagtgtcaaaacatcctcaagcctctgctggtgatacccagacaaacagggtctggagtggacctccagcaaactctgacagacctgcagctgagggtcctgactgttagaaggaaaactaacaaacagaaaggacatccacaccaaaaccccatctgtatgtcaccatcatcaaagaccaaagaagctaaaaaccttgacaaaagattagacgaatggctaactagaataaacagcatagaaaagaccttaaatgacctgatggagctgaacaccatggctcgaaaactacgtgacgcatgcacaagcttcagtagccaattcgatcaagtggaagaaagggtatcagtgattgaagatcaaatgaatgaaatgaagcgagaagagaagtttagagaaaaaagaataaaaagaaacaaacaaagcctccaagaaatatgggactgtgtgaaaagaccaaatctacgtctgattggtgtacctgaaagtgacggggagaatggaaccaagttggaaaacactcttcaggatattatccaggagaacttccccaatctagcaaggcaggtcaacattcaaattcaggaaatacagagaacgccacaaagatactcctcgaggagaggaactccaagacacataattgtcagattcaccaaagttgaaattaaggaaaaaatattaagggcagccagagagaaaggtcgggttacccacaaagggaagcccatcagactaacagcggttctcttggcagaaactctacaagccagaagagagtgggggccaatattcaacattcttaaagaaaagaattttcaacccagagtttcatatccagccaaactaagcttcataagtgaaggagaagtaaaatcctttacagacaagcaaatgctgagagattttgtcaccaccaggcctgccttacaagagctcctgaaggaagcgctaaacatggaaaggaacaaccgataccaactactgcaaaaacatgccaaattgtaa

SEQ ID NO: 5261 - DNA, 1208 bp, Homo sapiens
  SIMILAR (1159)..(1206): 621254mologous to Homo sapiens Human secreted protein encoded by gene 3 clone HNHCT15,accession number AAB38012,Smith-Waterman Score=41.
actccttgctgataccaaggcaaacagggtctggagtggacctccagcaaactccaacagacctgcagctgagggtcctgactggtagaaggaaaactaacaaacagaaagaacatccacaccaaaaccccatctgtacatcaccatcatcaaagaccaaagtgtggaagagaaatgtggggccagagcccccacacagagtccctactgggacaccacctagtggagctgtgggaagagggccactgtcctctggaccccagaatggtagatccaccgaccgcttgcaccatgtacctggaaaaaccacagacactcaatgccagcctgtgaaagcagccaggagccaagtaccccagggagggggaaaaggaacaaagaaatctgaaactgaaatacaagctaccatcagagaatactataataaacacctctacgcaaataaactagaaaatctagaagaaacggaaaaattcctggacacatacaccctcccaagactaaaccaggaagaagttgaatctctgaatagacgaataacaggctctaaaattgaggcaataattaatagcttaccaaccaaaaaaagtccaggacgagacggattcacagccgaattctaccaggggtacaaggaggagctggtaccattccttctgaaactattccaatcaatagaaaaagagggaatcctccctaactcattttatgaggccagcatcatcctgatagcaaaacctggcagagacacagcaacaacaacaaaaaacttcaggacaatatccctgatgaacattgatgcaaaaatcctcaataaaatactagaaaaccaaatccagcagcacatcaaaaagcttatccaccacaatcaagttggctttatccctggaatgcaaggctggttcaacatacacaaatcaataaatgtaattcatcatataaagagaactaaaaacaaaaaccacatgattatctcaatagatgcaggaaaggcctttgacaaaattcagcagcccttcatgctgaaaactctcaataaattaggtattgatgggatgtatctcaaaataataagagctatttatgacaaacccacagccaatatcatactgaatgggcaaaaactggaagcattccctttgaaaactggcacaagacagggatgccactcctattcaacactcaccactcctattcaacatagtgtt

SEQ ID NO: 5262 - DNA, 784 bp, Homo sapiens
  SIMILAR (68)..(181): 761254mologous to Lagothrix lagotricha epsilon- globin,accession number L25358,Smith-Waterman Score=164.
  misc_feature (1)...(784): n = a,t,c or g
gacactcgctttttggaacgtctgaggttatcaataagctccgtagtccagacgccatgggtcatcttacncagaggaggacaaggctactatcacaagcctgtggggcaaggtgaatgtggaagatgctggaggagaaaccctgggaaggctcctggttgtctacccatggacccagaaggttctttgacagctttggcaacctgtcctctgcctctgccatcatgggcaaccccaaagtcaaggcacatggcaagaaggtgctgacttccttggggagatgccataaaagcacctgggatgatctcaaagggcaccttttgcccaagcctgaagtgaactgcactgtggacaagcttgcatgtgggatcctgaggaactttcaagcttcctggggaaatgttgctgggtgacccgtttttgggcaatcccattttcggcaaaagaatttcacccctggaggttgcaaggctttcctggcaaaagcagaagatggcagaagatggtgactggagttggccagtgcccttgttccttccagataccactgaagctcaattgcccatgaatgcagagcttttcaaggatatggctttattcttgcaagcaattacaaataataaatctatttctgctaagagatcaccaaannnnnatnntnnnnnnncccccggattttttatttagcgggccgcacctttttccccttttagggggggtaaatttatattgggccttgggccggggttttcaaaagcggggggannnnnnnnnnaaagagccc

SEQ ID NO: 5263 - DNA, 3568 bp, Homo sapiens
  SIMILAR (1317)..(664): 951254mologous to Homo sapiens putative p150,accession number U93563,Smith-Waterman Score=1056.
ctacagggctacagcacacagctggggctgtcgagctaagagctggggctggcactcaagtaggggagaaatcccactttcagaacactgaaaggagtgagacacgtgggttcgtgggccagtgcaggaatgggacatgccttcctccacagtgctggtctgggaagggtgtggcctgtctggcagccatggcctctgtctaagggagcccttgaggtatgtcccttctatgccaattttgcggcaggttttgatcataaaaggatgctggattttgtcaaatgctttttctgcatctattgagatcatatgatttttgtttttaattctgtttacgtggaaaaattttcctaaacccaaggtttctgaggtggtaggagaaaactggaggtggacgttaatatccccaccagtctgggaatcttcttgggaagccaactccagttccatctcacagaaaacactgagagtaccaagaaggctgaaccaccttccacccacacaaaccaaaaatagggttctggcttccagctgtgctttctgggcttctttgtgatttttcctggcatcctcttggtctgctccatccttggcctctgctttccaggaagacacagcaggagcccacgtgtctgatatagaaaaaagcagtcctagcactgtccatgctgttttggttactgtagccttgtagtatagtttgaagtcaggtagtgtgatgcctccagctttgttcttttggcttaggattgacttggcaatgtgggcccttttttggttccatatgaactttaaagtagttttttccaattctatgaagaaagttcttggtagcctgatggggatggcattgaatctataaattaccttgggcagtatggccattttcatgatattgattcttcctacccatgagcatggaatgttcttccatttgtttgtatcctcttttatttcattgagcagtggtttatagttctccttgaagaggtctttcacatcccttgtaagctggattcctaggtattttattctgtttgaagccattgtgaatgggagttcactcatgatttggctctctgtttgtctgttattggtgtataagaatgcttgtgatttttgcacattgattttgtatcctgagactttgctgaagttggctgtcagcttaaggagattttgggctgagacgatggggttttctagatatacaatcatgtcatctgcaaacagggacaatttgacttcctcttttcctaattgaatgccctttatttccttctcctgcctgattgccctggccagaacttccaacactctggtagaaatcggctgtgaatccgtctggtcctggactttttttggttggtaggctattaattattgcctccatttcagagcctgttattggtctattcagagattcaacttcttcctggtttagtcttgggagggtgtatgtgtcgaggaaattatccatttcttccagattttctagtttatttgcatagaggtgtttatagtattctctgatggtagtttgtatttctgtgggattagtggtgatatctgctttatcattttttattgcatctatttgattcttctctcttttcttctttattagtcttgctagcggtctatcaattttgttgatcttttcaaaaaaccagctcctggattcattgattttttgaagggttttttgtgtctctatttccttcagttctgctctgattttagttatttcttgccttctgctagcttttgaatgtgtttgctcttgcttctctagttcttttaattgtgatgttagggtgtcaattttagatctttcctgctttctcttgtgggcatttagtgctataaatttccctctacacactgctttgaatgtgtcccagagattctggtatgttgtgtctttgttctcgttggtttcaaagaacatctttatttctgccttcatttcgttatgtacccagtagtcattcaggagcaggttgttcagtttccatgtagttgagaggttttgagtgagtttcttaatcccgagttctagtttgattgcactgtggtctgagagacagtttgttataatttctgatcttttacatttgctgaggagtgctttacttccaactatgtggtcaactttggaataggtgtggtgtggtgctgaaaagaatgtatattctgttgatttggggtggagagttctgtagatgtctattaggtccacttggtgcagagctgagttcaattcctggatatccttgttaactttctgtctcgttgatctgtctaatgttgacagtggggtgttaaagtctcccattattattgtgtgggagtctaagtctctttgtaggtcactaaggacttgctttatgaatttgggtgctcctgtattgggtgtatatatatttaggatagttagttcttcttgttgaattgatccctttaccattgtgtaatggccttctttgtctcttttgatctttgttggtttaaagtctttggtctttgatgatggtgacgtacaggtgggtttttggtgtggatgtcctttctgtttgttagttttccttctaacagccaggaccctcagctgcaggtctgttggagtttgctggaggtccactccagaccctgtttgcctgggtatcagcagcggtggatcaggctcgaaccctttaagatcaacgttcttgagcagatcacgaagcatatcgaaaaactgcagtgcggaggtgtagtcaaacaactcagcaggcgtgggaacaatcagcacatcagcagcacatacgacattaatcgtgccgatacccaggttaggcgcgctgtcaataactatgacatcatagtcatgagcaacagtttcaatggccagtcggagcatcaggtgtggatcggtgggcagtttaccttcatcaaatttgcccattaactcagtttcaatacggtgcagagccagacaggaaggaataatgtcaagccccggccagcaagtgggctttattgcataagtgacatcgtccttttccccaagatagaaaggcaggagagtgtcttctgcatgaatatgaagatctggtacccatccgtgatacattgaggctgttccctgggggtcgttaccttccacgagcaaaacacgtagccccttcagagccagatcctgagcaagatgaacagaaactgaggttttgtaaacgccacctttatgggcagcaaccccgatcaccggtggaaatacgtcttcagcacgtcgcaatcgcgtaccaaacacatcacgcatatgattaatttgttcaattgtataaccaacacgttgctcaacccgtcctcgaatttccatatccgggtgcggtagtcgccctgctttctcggcatctctgatagcctgagaagaaaccccaactaaatccgctgcttcacctattctccagcgccgggttattttcctcgcttccgggctgtcatcattaaactgtgcaatggcgatagccttcgtcatttcatgaccagcgtttatgcactggttaagtgtttccatgagtttcat

SEQ ID NO: 5264 - DNA, 1045 bp, Homo sapiens
  SIMILAR (780)..(815): 1001254mologous to Homo sapiens gonadotropin-regulated testicular RNA helicase; GRTH,accession number AF155140,Smith- Waterman Score=62.
atgtgccattctgcaatattcactgttctgcagcctccactggtggtgatacctaggcaaacagggtctcaagtggacctccagcaaactccaacagacctgcagttgagggtcctaactgttagaaggaaaactaaaaaacagaaaggacatccacaccaaaaccccatctgtatgtcaccatcatcaaagaccaaagcaacctttgaggactctgtgtggcactttgctgagcgaatcatccctgaccctaatgttatcaagttacgcaaagaggagctcacactgaacaacatccggcaatattacgtgctgtgtgagcacaggaaagacaaataccaagctctgtgcaacatttatggcagcatcaccattggtcaggccatcatcttctgccagactcgtcgaaacgctaagtggttgaccgtggagatgatacaggatggccaccaggtgtctttgttaagcggggagctgaacggtggagcagcgagctccattcattccagaggtttcgggatggaaaagagacggttctcataacaaactaatgtttgcgcccgagggattgatgtgaagcaggtcacaattgttgtgaactttgatctccctgtaaaacaaggagaggagccggactatgagacctacctccaacgcatagggcggacggggcgctttgggaaaaaacgccttgccttcaacatgattgaagtagatgagctgccctcgctcatgaaaatccaggacccactttaacagcagtattaagcaactccaccgctgaagacatggatgaaattgaaaagattgactattgaagaaagaactttattgtttgtgcagtatcctagtttatgtgagaatgtctcagtgggttttgaaggtaatttttttatgttgaggctttttcgacgtgaaactgtcacagatggcaaaataaatgtcacggtacttagttttaagacatgaggtctttttgaagccaaattgatgtgaagcttgtgatccttttgaataaaaaaaaggcaagattatttcttattct

SEQ ID NO: 5265 - DNA, 1071 bp, Homo sapiens
  SIMILAR (460)..(708): 831254mologous to Mus musculus putative,accession number AK006776,Smith-Waterman Score=378.
atggcctcgtgggaagggaaagacctgaccgtcccccagcccgacacccgtaaagggtctgtgctgaggaggattagttctctcgttccaccttacgagaaacacccacagatttcactgtggggaaataagtgtgatctgtctctctcaggtggagaaagtagttctcagaataccaatgtactaaattcattggaagacctaaaacctttcattttattgaatgatatggaacatctttggtcattgcttagcaattgcaagaaaacaagagaaaaagcttctgctactagagtgtatattgttctcgataattctggatttgagcttgttacagatttaatattagccgacttcttgttgtcctctgaactggctactgaggttcatttttatggaaaaacaattccatggtttgtttctgatactactatacatgattttaattggttaattgaacaggaaggcgtggaagctgaaaagaaagctatctctctcctttctaaattacggaatgaattgcaaacagataaaccatttatccccttggttgagaaatttgttgatactgatatatggaatcagtacctagaatatcaacagagtcttttaaatgaaagtgatggaaaatcaagatggttctactcaccgtggttgttggtagaatgttacatgtatcgaagaattcatgaagcaattatccagaggcaccgtataaacttgagttcagacttcctgattactcctgatttctactgggacagagaaaacctggaaggactttacgataaaacgtgtcaattccttagcattggccgaagagttaagttaaacgctcagcgagagtttggtttcctgtgtgactgcacggttgcaatcggcgatgtatacttcaaggcacacaaatcagttcttgcttcattctccaattactttaagatgttgtttgtccatcagaccaggtttatatccttacctctgactgcagccaccacggggctcaggctgactcacagtcaggtgccctttggcaagacaggattcaataaatctcatcggaaagccagttag

SEQ ID NO: 5266 - DNA, 1687 bp, Homo sapiens
  SIMILAR (42)..(518): 741254mologous to Homo sapiens unnamed protein product,accession number AK022972,Smith-Waterman Score=624.
aattgctaagcaatgaccaaagatgttccatatcattcaataaaacaagagaaaaagcttctgctactagagtgtatattgttctcgataattctggatttgagcttgttacagatttaatattagccgacttcttgttgtcctctgaactggctactgaggttcatttttatggaaaaacaattccatggtttgtttctgatactactatacatgattttaattggttaattgaacaggtaaaacacagtaatcataagtggatgtccaagtgtggggctgactgggaagagtatattaaaatgggtaaatgggtttaccacaatcatatattttggcctgtgcctcatgagtactgtgcaatgcctcaggttgcaccatgacttatatgctgaactacagaaggcacatttaattttattcaagggtgatttgaattacaggaagttgacaggtgacagaaaatgggagttttctgttccatttcatcaggctctgaatggcttccatcctgcaccactctgtaccataagaacattaaaagctgaaattcaggttggtctgcagcctgggcaaggggaacagctcctggcctctgagcccagctggtggaccactggaaaatatggaatatttcagtacgatggtcccctttgacttgatttaggagctctcagttgcatagaaagatctggtgagcaccttttcatccccagaaaaggagcacgtgaattgagtcgcctggcggctctgtacgcgctcagggaagcttagcttcttggtgcccatctacggtgcactggatgatttttcttttgaacattttgccccactacactgttttgggggatagctgggttaaggcaagttaaaagatattttacattttattattgggatttttaggcaactttttttcaggttaaatatataatttcaagtgcctttaatggacctaattttaaatgggccaaggagcaaaaaataagtgagttctgcttttagttagttaaccttgttcttttcttaaatagtacactgcatgggatttaatattccaggaagcatgggattttattttgcttgattttgggcacatgaaataatagctctaggaaaatgcgcatcttaatgactctttgtaaagagaggcatttcttacaactgtgatgtttgcttacataaaagttacctcataagttaattctaacttttattcttgaattttatttcatttcaatagcttgtttccatttgcacgcctttgtattttgattgacctgtaggaatgggatgttagggaaactcaaaattggaacacagtggaaaccaaatgggtatttggaaggaaatgtaatatcttttatattctatttatgatatccccataatcaaatgagattattttaccccacataaatggttttaaatatcagatttttagtttgcagttttaggaaaatgctttagatagaaaaggttccttatgcattgaatttggagtactaccaacaatgaatgaatttattttttatattcttacaaattttattggtcattgtcacagatagtaaatactaaaaatttcaggtcagtttgttttgaaactgaaattggaaataaatctggaaatgttttgttgcactaaaataataaaatgaattgtactgaaaaaaaaaaaaaaaaa

SEQ ID NO: 5267 - DNA, 518 bp, Homo sapiens
  misc_feature (1)...(518): n = a,t,c or g
ngggcgcctgcggaagaccgcccccatttcccaggcccctccctaggggtgcccctcctcagccatggctgccccgttctctcctcctccagcatctgcccctggggccgcccccacctttccgccatctctcgggcccgcgtggcaccctgctttgtttttaacggggataaacttgacttgcttctccaaagagcgggaaaaagaggcgcagtcttggtactgatctgggggagggaacgtcccagggcgcgcaggggcgttttctacccgtgccccgtcggcctgctctgatcagtaccgaccgtgttcggggttcacgtggcccagtcggcaaagtttctttggaggtccagcgtctctgattcccggatcttcagccccacccggagcccccacggttactgccccccgcaacccccgatggagtgtcggaatgcgctttctctccgaacgcaagcgtgggtcgagtcggtaattccgggacagtccggaacggtgctcgaggcgttccaatn

SEQ ID NO: 5268 - DNA, 755 bp, Homo sapiens
  SIMILAR (2)..(571): 1001254mologous to Homo sapiens dipeptidyl peptidase 8,accession number AF221634,Smith-Waterman Score=1015.
caacaggggatcctgtcaccgagggcttaaatttgaaggcgcctttaaatataaaatgggtcaaatagaaattgacgatcaggtggaaggactccaatatctagcttctcgatatgatttcattgacttagatcgtgtgggcatccacggctggtcctatggaggatacctctccctgatggcattaatgcagaggtcagatatcttcagggttgctattgctggggccccagtcactctgtggatcttctatgatacaggatacacggaacgttatatgggtcaccctgaccagaatgaacagggctattacttaggatctgtggccatgcaagcagaaaagttcccctctgaaccaaatcgtttactgctcttacatggtttcctggatgagaatgtccattttgcacataccagtatattactgagttttttagtgagggctggaaagccatatgatttacagatctatcctcaggagagacacagcataagagttcctgaatcgggagaacattatgaactgcatcttttgcactaccttcaagaaaaccttggatcacgtattgctcactggctatttaaccaaatgaggaggtttaatcaacagaaaacacagaattgatcatcacattttgatacctgccatgtaacatctactcctgaaaataaatgtggtgccatgcaggggtctacggtttgtggtagtaatctaataccttaaccccacatgctcaaaatcaaatgatacatat

SEQ ID NO: 5269 - DNA, 985 bp, Homo sapiens
  SIMILAR (461)..(514): 941254mologous to Homo sapiens dipeptidyl peptidase 8,accession number AF221635,Smith-Waterman Score=89.
  misc_feature (1)...(985): n = a,t,c or g
caacaggggatcctgtcaccgagggcttaaatttgaaggcgcctttaaatataaaatgggtcaaatagaaattgacgatcaggtggaaggacatccaatatctagcttctcgatatgatttcattgacttagatcgtgtgggcatccacggctggtcctatggaggatacctctccctgatggcattaatgcagaggtcagatatcttcagggttgctattgctgggggcnccagtcactctgtggatcttctatgatacaggatacacggaacgttatatgggtcaccctgaccagaatgaacagggctattacttaggatctgtggccatgcaagcagaaaagttcccctctgaaccaaatcgtttactgctcttacatggtttcctggatgagaatgtccattttgcacataccagtatattactgagttttttagtgagggctggaaagcaatgatgatttacaaagctatcctcaggagagacacagcataagagttcctgaatcggggagaacattatgaactgcatcttttgcactaccttcaagaaaaccttggatcacgtattgctgctctaaaagtgatataattttgacctgtgtagaactctctggtatacactgagctatttaaccaaatgaggaggtttaatcaacagaaaacacagaattgatcatcacattttgatacctgccatgtaacatctaatcctgaaaataaatatggtgccatgcaggggtctacggtttatgatagtaatctaatacattaaccccacatgctcaaaatcaaatgatacatattcctgagagaccccgcaataccataagaattactaaaaaaaaaaaaaaaaaaagggggggccgttttaaagaatcaaattttacttcccggggctggcaaggttttattttttttttggggcccccaaaattaaattcccgggccggggttttacaacgcggggatgggaaaaccccg

SEQ ID NO: 5270 - DNA, 445 bp, Homo sapiens
  SIMILAR (25)..(282): 841254mologous to Mus musculus putative,accession number AK014006,Smith-Waterman Score=396.
taacctgtattgtgcggaattctggaatggtcccagaccctcatgacggtcaacgagttcatcagcatttacatcgtgaatgagccaagggacgtcgggtgccttgctcagcaccagctctttgaccagatcccggagttgaagcaggacatcagcatccccgactactgcagcctgggcgatggggaggaggaggaaatcaccatcaatgcctggtttggtccccagggaaccatctccccactacatcaggatccccagcaaaacttcctagtgcaggttggagctgcagctggaatagtggccttctaactcctcctggcccagacacctggccggccacattctctgcctttaaacaccgggctcttaaaaagaaacaagaagcactgaaggggatgaggacaaaaatataaagcaaacccacaaacggccccaggcccat

SEQ ID NO: 5271 - DNA, 1611 bp, Homo sapiens
  SIMILAR (1)..(582): 871254mologous to Mus musculus putative,accession number AK014006,Smith-Waterman Score=940.
ctgcagaagtggagtttggagtatatccaggagatcgctggctgccgaactgtcccagtggaagttggttcgaggtacacagatgaggaatggtcccagaccctcatgacggtcaacgagttcatcagcaaatacatcgtgaatgagccaagggacgtcgggtaccttgctcagcaccagctctttgaccagatcccggagttgaagcaggacatcagcatccccgactactgcagcctgggcgatggggaggaggaggaaatcaccatcaatgcctggtttggtccccagggaaccatctccccactacatcaggatccccagcaaaacttcctagtgcaggtgatggggaggaagtacatccggctgtattccccgcaggagtcaggggctctgtaccctcatgacacgcaccttctccataacacgagccaggttgacgtggagaatcccgacctggaaaagttccccaagtttgccaaggccccattcctgtcctgcatcctgtctcctggagagatcctgttcatcccggtgaaatactggcattacgtgcgggctctggatttgagcttctcggtcaagcttctggtggtcgtagccaggataggagctgaaaggggctgacattgcagacagcattcatctgttcactaatttcctgggtcctggaatctatagagacaagcaggactgaacctgtgtcctgaagagccttcactgcccagtggcagccctggggggctgagctccagcactggacaggcacagagcaggggctgcccaggaaggagcacactccaggccaggggtgcatggcagaggaaggtggggagagcccagaaggacattgcagacagacagcctgcatggggactctggcatcagaaagccgaatgtttttgggaaacgggtgggtcacacaggcaggggtgaaacatgggctctgaggttggctacctgatttcaaacccggccgcgctgccaaccttgctgggtgacttggccagggttcccccactttcgcttgttgcccatatggaaaagaggggcaaggccagtcctcactgccgagggccgagaaggcggtgccgagcccctgctgctgcatgaaccttagccgctgtcactgatcccaattactctgatccttttgcccttccttcccataacggcctgctggacgccacagcctgaatactggagagagctgggcattgcccaggtcacaggagagagtccgtagagacctgcgcaggagccgggacccctgctgagcagtgggagctttctgtcatacccatggctcaaggataacctacctgcctgcagagaagtgcgaaggtcttgctggatgacttttcacccgcactcacccaggagcaggctcccaagtgaagaaacccccgaaccatcaccagctcctagaagcctccctcctacccccttctagtcaccatcccccagaagtaatgactctcaaacctgggggatttgaggccagggggagagccaggctctatgctttctgtaattgtgtctcgtttgtgtgcacgcaggtttgttttatgttttggccattaagattttccccagccaaaaaaaaaaaaa

SEQ ID NO: 5272 - DNA, 572 bp, Homo sapiens
  SIMILAR (221)..(304): 751254mologous to Cyprinus carpio natural killer cell enhancing factor,accession number AB010959,Smith-Waterman Score= 125.
acgagatcatcgcgttcagcaccgtgcagaggacttcgcaagctgggctgtgaagtgctgggcgtctcggtggactctcagttcacccacctggcttggatcaacaccccccggaaagagggaggcttgggccccctgaacatccccctgcttgctgacgtgaccagacgcttgtctgaggattacggcgtgctgaaaacagatgagggcattgcctacagtttgtcccgctggctggaagcctggcagtgacacgattaagcccaacgtggatgacagcaaggaatatttctccaaacacaattaggctggctaacggatagtgagcttgtgcccctgcctaggtgcctgtgctgggtgtccacctgtgcccccacctgggtgccctatgctgacccaggaaaggccagacctgcccctccaaactccacagtatgggaccctggagggctaggccaaggccttctcatgcctccacctagaagctgaatagtgacgccctcccccaagcccacccagccgcacacaggcctagaggtaaccaataaagtattagggaaaggtgtgaaaaa

SEQ ID NO: 5273 - DNA, 488 bp, Homo sapiens
  SIMILAR (229)..(486): 501254mologous to Homo sapiens Human myelin oligodendrocyte glycoprotein gene,accession number AAZ29204,Smith-Waterman Score= 199.
  misc_feature (1)...(488): n = a,t,c or g
gtttcttttttgttgttgttgagacagaggtttgctcttgntgcccaggctggagtacaatggcacgatctcggctcactgcaacctccgcctccccggttcaagtgattctcctgcctcagcctccgtcaccgtgcccagctaatttttgttatttttagtagagatggcggtttccttatgttggccaggctggtctcgaactcccgacctcaagtgatctgcccgtctcagcactttgggaggctgaggtgggtggatcacaaggtcaggagatcgagaccatcctggctaacacggtgaaaccctgtctactaaaaaaaattagccgggcgtggtggtgggcgcctgaagtcccagctactcgggaggctgagacaggagaatggcatgaactccggaggcagagcttgcagtgagccaagatcacaccactgcactccagcctgggtgacagagagactccttctcaaaaaaaaaaaaaaaaa

SEQ ID NO: 5274 - DNA, 1313 bp, Homo sapiens
  SIMILAR (179)..(571): 541254mologous to Homo sapiens Similar to thioredoxin peroxidase 1,accession number BC000452,Smith-Waterman Score=223.
  misc_feature (1)...(1313): n = a,t,c or g
cccacgcgtacgaaaggcttcgcgggccagggctcacttggcgctgagaacgcgggtccacgcgtggtgatcgtccgtgcgtctagggggttgcccacgcagctttcagtcatggcctccggtaacgcgcgcatcggaaagccagcccctgacttcaaggccacagcggtggttgatcggcgccttcaaagaggtgaagctgtcggactacaaagggaagtacgtggtcctctttttctaccctttggaacttcacttttgtggtgccccaaccgagatcatcgcgttcagcaacccgtgcagagggacttcccgcaaacttgggctgtgaagtgctggggcgtctcggtgggactctcagtttcacccacctgggcttgggatcaacaccccccggaaaagaggggaggctttgggccccctggaacatcccccctgctttgctgaacggtgaaccagaacgccttgtctgagggatttacgggcgttgctgaaaaacagattgaggggcatttgcttacaagggggcctctttattcattcgattgggcaaggggtgtcctttcgccaagatcaccctgttaattgatttggcctgtgggaacgcttccgttggatgagggcttctgcggcttggtccaaggcctttcccaagtacacaagacgagccatgggggaaagtttgtccccgcttggctggaaagccttgccagtgacnacggattaagccccaacgtggatgacagcaaggaaatatttctccaaacacaattagggctggcttaacggatagtgagctttgtgcccctgccttaggtggcctgtgctgggtgtccacactgtgcccccaccctgggtgccctatgctgacccaggaaaggccagacctgcccctccaaactccacaagtatgggaccctggagggggtagggcaagggccttctcaatgcctccacctagaagctgaaatagtgacgccctcccccaagcccaacccaggcggacaaaaggcctagaggtaaccaataaagtattagggaaaggtgaaaaaaacacaacaaaacagaaaaaagaaaaaaccaaagaaataataaaagaaaaacatgagggcgtgcactggccgatcgccggccggcatccaccttatgagccggatctcacctgcagcaagaactccggttgtgattgctcaccgcaccattggtttctctccctgcgttcctcttgggtgcagggggcataatgttatgtatgatcatatataggaggggtgaggggctggcttgctccntccgnnnnngtcttttgcgca

SEQ ID NO: 5275 - DNA, 433 bp, Homo sapiens
  misc_feature (1)...(433): n = a,t,c or g
gaaaaaattggccccccccaagatttttttaaaagggcccccccccnnnnnnnnnnnnnnnnnnnnnnnnnnnnnnnnnnnnnnnnnnnnnnnccttaccccatttttttnnnnnnnnnnnnngggggtttgccccctaaagggtcnnnnnnnnnnnnnnnnccctccaaaaaaaccttgggaggccccccnnnnnnnnnnaaaaaggggggaaacccccgttttttaaacccccaaatttttttcccaaaaattccccaaccccggggggggcccccttaaaacccttttggaaaaatttcnnnnnnnnnnnnnnnnnnnnnnnnnnnnnnnnnnnnnnnnnnnnnnnnnnnnnnnnnnnnnnnnnnnnnnnnnnnnnnnnnnnnnnnnnnnnnnnnnnnnnnnnnnnnnnnnnnnnnnnnnnnnnnnnnnn

SEQ ID NO: 5276 - DNA, 1570 bp, Homo sapiens
  SIMILAR (4)..(51): 871254mologous to Homo sapiens CDA08,accession number AF212247,Smith-Waterman Score=82.
ccccctcacaatgtccctcggaggtggagtgccaacctgtatcttacaccaaggtaatatggttctgcttactgctatagctctcatcggtgtctgtgttttcatcttggcaataattggcattttacattggcaggaaaagaaagcagatgatagagaaaaacgacaagaagcccaccggtttcattttgatgctatgtgacttgcctttaatattacataatggaatggctgttcacttgattagttgaaacacaaattctggcttgaaaaaataggggagattaaaatattatttaataaatgatgtatccccatgggtaaattaattgggaaagtattcaaaataaatatggtttgaatatgtcacaaggtcttttttttttaaagcactttgtatataaaaatttgggttctctattctgtagtgctgtacatttttgttcctttgtggaatgtgttgcatgtactccagtgtttgtgtatttataatcttatttgcatcatgatgatggaaaaactatgtgtaaataaaaataattaaatgagcaggaatttttgtgtccacttgacttgggcttgcttcttattctaatgatgcaaattatacttttgtgaatatatcacggagtcattacgcattcagcttcatcacagcaggtcaggggtctcactgatggcatacaatatagtgatcgggtactctgacttggtagcacagtaagacagacttgccttaaactcctaattcaaccacttacaaagtcattggttgaacttggctcttgtttaacctcttgaaaccctcagttttcttgtttattcagtggggctaatacttgagttactgtaaacattaaatgggatgatgtatgtgaagtgcttagcttggtgcctagccaggagtaagtggtcaatatgtggtagttgtcattattaatattttagatgatcttattagacttatgacatctaattattaggaaatacatagacttggatagaattttattttccagggcatggaaggaaatattctttggaaaagctaaatttttggtgattgacataaagatttacttgctcatattaactaaaaattatagtactctccaagaattaatgtgcccctaaaaattttcctccaaaaactttatccttatcatgtgataatgaagaacatttgatttcttgaaaggaaactgctgtaggcagcatctgggaatgcaaaatcttcaatcacatttctattctcaaacaccttgagaagtcctataatttacattcagacttcaatgcaaattttgtattgtgaacttcacattttccaaaaaagttactttaaaaagactttaagactgaaaaaaaaaagtttatcaatgctaataaatttctagtatgcaaatggacatgtgatgcctataaaaacacaaaaatttctttgaaaacaattttgttcttatttttttctttatagttcactgagattggcatgtgtttttactttgtatctaagcatgttaacatgtttttttaataaatattccttattggaaaaaaaaaaaaaaaa

SEQ ID NO: 5277 - DNA, 297 bp, Homo sapiens
  SIMILAR (32)..(295): 721254mologous to Rattus norvegicus zinc finger protein,accession number AF176023,Smith-Waterman Score=315.
gaaccgggaagagcagaatttggtggcttatcctcatgatggaaaaatctttttctgcacctcacaagatatccctcctgaaaatgaactgcttttttattatagccgagattatgctcaacagattggtcagaagaactacaggtgtaccttgtgtgacaagtctttcacccagaaggctcacctggagtcccacatggttatccacactggggagaagaatcttaagtgtgattactgtgacaagttgtttatgcggaggcaggacctcaagcagcacgtgctcatccacactca

SEQ ID NO: 5278 - DNA, 340 bp, Homo sapiens
gtgagtccacatgtactcatcaggagacaatccagcaggcatttgggctctctgtatctccaggccccctttgtctgaatggctggatgtttactggagacagggagccatgtctaaacctacaaagatctccacgttacaataaccaggcacctgccgaaactttggaaaacaagatctaccctaaacttccaagtggccaggagcagttaaggcaggtgacctggagatgcaaagaaacagatgacagagctcctgcctgcgagcagggcatcctacaagaaaggaagatagacacaaaggtccacagcacaaataaagagatgagtgtaggcatgag

SEQ ID NO: 5279 - DNA, 2154 bp, Homo sapiens
  SIMILAR (496)..(732): 881254mologous to Mus musculus putative,accession number AK012649,Smith-Waterman Score=358.
atgcaactaagtgtaagcagcagtgtgatgcatcctgaaatgagcactattcacaacagcaaagacatggaatcaaccaaggtgtccatcagtggtgcactggataaagaaaacatgaatgaagtgatcagccagcagctgtgcgtcatcttcacacactgctacgggccctaccccatccccaagctcacagaaatcaaacggaaacagacctcgcgcttgggggctccagattttcttctgcccacctgcagggccacgctgccatacttggtggtctgtggcaaagtgggtaaagcaggaacaactggagaagacacagaacaaaacatgtgggaaaaaaatgttcaagtggcagctctcgccgtcgggattactatgacagaggatatgatcggggctatgatgatcgggactactatagcagatcatacagcttttgtcttttctcccctgtttaaggctaccttctcctaccgcaagttttacaaggcctcctcttgtctatataacaccttggccagtacagatgacggctttgtatatgattgggatgcacgttcagataagccaatttttacacttaatgcacacaatgatgaaatctctggtcttgatcttagcagtcaaatcaagggctgtctcgtgactgcttcagctgacaaatacgtgaagatctgggacatcttaggagataggccaagtctagttcattctagggacatgaaaatgaggcgagaggcaaattacagcagtcagctgctgaagaggtccctgttaaaggaggaagacctgatgaagtacctgcagatggaaatgttgttttgcacagaggagcagcaggaatatcctcccatgtcttcttattcgggcgtcccgtggactctgcacacgtggctggagtctttgcggatcgccttccagcagcaccgcaggcctctcatccagtgcttgttaaaggagtttaagaccattcaggaggaggaatacacggaggagctcgttacccaaggcctgcccctgatgtttgagatcctgaaagcgagcaaggttctcatagctggtgacccaaagaagccaacgaaaacactaatgattgtcggatcccactccttagagggctactaccagaagcaggccatttatgctctttttggcggttgtggcctggagctgaggcactcaccagattaccctggtcaaaggttggccctggagggggacaccagaaggccgtttggtgccctgggtttgggtgtaacccctagaactgttgaggtctggacccaaatagcctttgggctagttggtgctcctgtctgtagagaacagcttctgtctgctgctaagtttttccagctggaggctttgcagcgacactgtgagattatctgtgcgaaaagcatcaataccgacaactgtgtggatatttacaaccatgccaagggtcgccctgcgtctggacgccgcgtgctgggagtgggcgcgcagcgctgcgcacggggatggcagtacttgcccgtgccgctggacagcgccttcgagcccgccttcctccgcaagcgcaacgagcgcgagcggcagcgggtgcgctgcgtgaacgagggctatgcgcgcctccgagaccacctgccccgggagctggcagacaatcgcctcagcaaagtggagagctccgcgtgccatcgactacatcaagcacctgcaggagctgctggagcgccaggccttggggctcgaggcgcggccgcgccgtcccccagcgcaggcggaatgcaacagcgacgggaagtccaaggcctcttcggcgccttcgcccagcagcgagcccgaggaggggggcagctagcgagcgcccgaactggccagaccccccgcgcccgccgcacagcgcgcagccgggcgctcaacctaaggtcctcttcgaaggtgaatgctacactagtcccatgtcataaggagaccgaagcacagagaggtgtatggactggagaaaccattcctgtgcggacttgctttggacctctaattggccagcagagtcactccatggaagtagcagaatggacagacaaggcagttaaccatatctggaaggccccacgcaacacagccctcaagatgacccagacctacaacgaccctgccgactga

SEQ ID NO: 5280 - DNA, 1339 bp, Homo sapiens
  SIMILAR (524)..(1219): 521254mologous to Homo sapiens PR-domain zinc-finger protein PFM1,accession number AF144757,Smith-Waterman Score=487.
atgaggaacaaagcagtggggcaggcgcgtgcgcccccagcgcagctggcaggttgggcagcccccttcccgaagcttctggacggaaggccccaggtgttccccgagatgccccaacccgtggcggggtgcacggccaccggccctcgggagaagttgggcggccccgggcgaccccggggacgagtggccgcgtcggtgcagcggttgatgaatgaaatgaacctgagtccagtggggatggagcagctgacttcatcctctgtgagcaatgccttgccagtctcaggaagtcacctgggattggctgcctcacccactcacagtgccatccctgccccaggcattttatcttatttagctgacagaccacctccacagtacatccaccctaactctataaatgttgatggtaatacagcattatctatcaccaataacccttcagcactagatccctatcagtccaatggaaatgttggattagaaccaggcattgtttcaatagactctcgctctgtgaacacacattggtgcccaaagtcttcatcccagtgatggccatgaggtggccttggacacagcaatcactatggagaacgtttctagggttaccagcccaatttcgacagatggaatggcagaggagcttacgatggacggtgttgcaggcgagcattcccaaatcccaaatggctccagaagtcatgaacctctgtctgtggattctgtgagcaacaaccttgcagcagacgctgtaggacatggtggtgtgatacccatgcatgggaatggcctgggagctccctgtggtcatggagacagaccacattgcaagtcgggtcaatggcatgtctgacagtgccctcagtggactccatttcacactgtggccatgagcaccaactctgggcctcgtgagagctctgccgtggctccagtggcttctcacttctctgtgcatgtgtttctgttctcattcatctgggtctcaccagcagatgctgagactcttggtgaatctctcttgggtcttacggtctacgggagtaatgatcaagatccttacgttactctgaaagatacagaacaatatgaacgtgaagatttcttgattaagcccagtgataatcttatagtttgtggccgagctgaacaggaccagtgcaatttagaggtgcatggaaattacattgctgtaggaaacatgacccctgttattgaagtgtgggaccttgatatagtggactctttagagccagtcttcacactcggaagtaaactttcaaaaaagaagaaaaagaaaggaaagaaggtaaagaagttaataaatatttaa

SEQ ID NO: 5281 - DNA, 3776 bp, Homo sapiens
  SIMILAR (1931)..(2410): 391254mologous to Homo sapiens PR-domain zinc-finger protein PFM1,accession number AF144757,Smith-Waterman Score=193.
atgaaaatgaacctgagtccagtggggatggcgcagctgacttcatcctctgtgagcaatgccttgccagtctcaggaagtcacctgggattggctgcctcacccactcacagtgccatccctgccccaggcctcccagtggcaattccaaacctgggtccctccctgagctctctgccttctgctctgtctttaatgctaccaatgggtattggggatcgaggggtgatgtgtgggttacctgaaagaaactacaccctacctccaccaccttaccctcacctggagagcagttatttcagaaccattctacctggcattttatcttatttagctgacagaccacctccacagtacatccaccctaactctataaatgttgatggtaatacagcattatctatcaccaataacccttcagcactagatccctatcagtccaatggaaatgttggattagaaccaggcattgtttcaatagactctcgctctgtgaacacacatggtgcccaaagtcttcatcccagtgatggccatgaggtggccttggacacagcaatcactatggagaacgtttctagggttaccagcccaatttcgacagatggaatggcagaggagcttacgatggacggtgttgcaggcgagcattcccaaatcccaaatggctccagaagtcatgaacctctgtctgtggattctgtgagcaacaaccttgcagcagacgctgtaggacatggtggtgtgatacccatgcatgggaatggcctggagctccctgtggtcatggagacagaccacattgcaagtcgggtcaatggcatgtctgacagtgccctcagtgactccattcacactgtggccatgagcaccaactctgtaagcgtggcactctctacctcacacaaccttgcctccctagaatctgtttccctccatgaagttggcctcagcctagaacctgtggctgtctcctccatcacccaggaggttgctatggggacaggtcatgtagatgtatcttcagacagtctttcttttgtatcaccttcactgcaaatggaagactccaattcaaacaaggagaacatggcaaccttgtttacaatttggtgtactctgtgtgaccgcgcctatccctcggactgtcccgaacatggaccagtgacttttgttcctgacactccaatagagagcagagcaaggctttctctcccaaagcagcttgttctccgtcagtcaattgtgggagcagaagttggtgtatggactggagaaaccattcctgtgcggacttgctttggacctctaattggccagcagagtcactccatggaagtagcagaatggacagacaaggcagttaaccatatctggaagatataccacaatggtgtcctagaattctgcatcattacaactgatgaaaatgaatgtaattggatgatgtttgtgcgcaaagccaggaaccgggaagagcagaatttggtggcttatcctcatgatggaaaaatctttttctgcacctcacaagatatccctcctgaaaatgaactgcttttttattatagccgagattatgctcaacagattggtgttcctgaacacccagatgtgcatctctgtaactgtggcaaggagtgcaattcttacacagagttcaaagcccatctgaccagccacatccataaccatcttcctacccagggacatagcggcagcatcgggccaagtcacagcaaagaaaggaagtggaagtgctcaatgtgcccccaagcttttatctctccttccaaacttcatgtctactttatgggtcacatgggtatgaagccccacaagtgtgatttctgtagcaaggcttttagtgatcccagcaacctgcggacccacctcaagatacatacaggtcagaagaactacaggtggtaccttgtgtgacaagtctttcacccagaaggctcacctgggagtcccacatggttatccacactggggaggaagaatcttaaagtgtgattacttgttgacaagttgttttatggcgggagcagggaccttcaaggcaggcacgtgctcatccacaactcaagaacgcccagatcaagtgtcccaagtgtgataagcttgttcttgagaacaaatcactttaaagaagcatctcaattctcatgaaggaaaacggggattatgtctgtgaaaaatgtacaaaggcttatctaaccaaataccatctcacccgccacctgaaaacctggcaaagggcccacctccagtttcgttcaggcaccagaggaggaagaagaggatgactcagaagaggaagatctagcagactctgtggggacagaagactgtaggattaacaagtgctgtgtattcagcggatgagtctctttctgcacataaataaaaggaaaagaaacaagcaattttggatgaaaatgcaaatggaaaaatacacataaccagttatctactataatggtttttatataaaatggttcctgatttattttcagccagtaatcaaaacagactgggaatgaataaagcacttacagaagagtatcctaatgaaaacactttaaaacagattgggaaaactgagcatgtgtcctgttttaagtggtggactgggagggaagtgtcaacttctgaggtctttatttacatgataatctgggagatgcatttatgcctgaatcaaagctgccttctgctcaaacaaatcagatttatttcacattcttccattattccattttcctgctggtcctgtgacttggtaacattctaaacggtccttgccccatagccatcctgattgctgatagtgttttatgcagactcttgtgacttatactcaccacagaatggattgggacacagcagcataagtgtgctactttggcagctaagtaagtttaaagcaggacctgccttaactgctcctggccacttggaagtttagggtagatcttgttttccaaagtttcggcaggtgcctgggaggcaatataaaaaagcagcagtcagtcagtagtcagtgatgggagagaacaagagggagagatgcctgggcctctgcccaagaaattagctttgatggaagcctgagcaagtcaccctgtttaatgtaccttggagatctttgtaggtttagacatggctccctgtctccagtaaacatccagccattcagacaaagggggcctggagatacagagagcccaaataatgcctgctggattgtctcctgatgagtacatgtggactcacctgaggaagggaaggaagggaataatcttttatgtttcatttacccttaatgaaaagtgttaaaacattgcccaactcaaaataacattattttaatgcatgtgcaaagttaggtcttcccaagttgtctcagtgctgaggaacctcatcagagaagcatggaagatgccaaaaggatttttggaaggtaaagaagggctgaatagtgaccacatgggcctgtttttcagggtcccagcttagttaagtccaccccatgcacctgggtccattgtgtctcccgtgcacatccagcgtttctcaggaaccagacccacccttaagttgacaggattgatggaacatgctctcctgctcaaggcacaacctctgggctggagtagaggactctggtgggaaggttttgctgctaatgtatttatggaatgaatgtatttcattcaaatctgtattcctctaggaaggattaaaattaaacttttttaaaatacaaa

SEQ ID NO: 5282 - DNA, 1770 bp, Homo sapiens
  SIMILAR (649)..(1725): 481254mologous to Mus musculus microtubule-associated protein 4,accession number U08819,Smith-Waterman Score=743.
atgcaggcattgattcctttggaaagtggatcaggcatgactcagacttctggtgttagcacagaaacaggagatgtagtcaaagatatgggtgtcaataaccagagcaaggaaggaaggtgtccatggaaggatcatgaggcagctccctggatttctgaaaagcctaaaaagagaggcaatgaaggcaaaagcaaaaagtttaaaaataattattccacacagcctgctagaatggagaggaaggaagaaatccttaacccaccttttgaagggaaggatggagatactggtagtattccccataaaagcaaggaaataggatttactttccccaaaatgcatgattcttcgttctcacatacaccagatacacccacagtggaagcagttgacaggaagggtggaaattttcaggttaattttgttgagcttgggactcttggggaaaacaagataagcacagtcaaggcttctactgttactgaaccacctgccaaggtgacagatgtgagctgccaagagcaaatccagggggcaggatttgttccttcagtagtatctgaggagaataagacagatgcagccaatagatacactgcagtggctgacaaaccaagtgaaaggagtaatgatggaaaaagttctggatcagcagcctgtgaaaaactgcccactcctactcctcaagtagtaaaggaaggtgattcctttccagataccttggcaaaaaatgggcaagagatagccccagcccagatttccaaatcattaatggtagataactacaccaaagatggagtcccaggtcaagaaagacccaagggtccctctgctgttgtgccctctacaagcacaggaggagttgctctacctattacaacagccatagaaacagttaacattcatggagatcactctcttaagaataaagctgagcttgctgattccatgaaaaatgaagcagggatcgatgaagggcatgtgataggagaatctgagtcagtgcacagtggtgcgtctaagcattcagtagagaaagtcacagagctagcaaaaggtcacctccttcctggagtgccagtagaagaccagagcctaccaggagaggccagagccctagaaggatatgcagatagaggtaatttcccagcacatccagtgaatgaagagaaagagactaaagaagggtctgttgcagttcagattcctgacttactggaagacaaagcacaaaagctcagtttttgtgaggaccaaaatgctcaagatagaaattccaaaggttcagatagtttgaataagaaggtagatctgactcttttgtctccaaaaagtgaaaatgataaattgaaagaaattagtctggcttgtaaaatcacggaattggaaagcgtttccttgccaacaccagaaatccagtcagatttcttacatagcaaagtcgaagctcctccttcagaggtggcggatacgttagtaataatgactgcttccaagggtgttcgactcccagaacccaaagataagattttggagacacctcagaaaatgacagaaaaatctgaatcaaagacaccaggagaagggaaaaaggaagataaaagcagaatggcagaaccaatgaaaggctacatgagacccaccaagtcccgaggacttactccacttttgccaaagtctacaatccaggaacaagagagacataagcaactgaagtccgctggtatgaacctgccatggggaaatgtgtgtgcttgtggcttttga

SEQ ID NO: 5283 - DNA, 3825 bp, Homo sapiens
  SIMILAR (1357)..(3498): 441254mologous to Mus musculus microtubule-associated protein 4,accession number U08819,Smith-Waterman Score=1360.
atggtagcctcacagcatcccattgcagatgcaaaggctcctgagaagcgggcctcaccatccaagccagcttctgccccagcctccagatctgggtccaagagcactcagactgttgcaaaaaccacaacagctgctgctgttgcctcaactggcccaagcagtaggagcccctccacgctcctgcccaagaagcccactgctgacttgagtcgcccaaagagcacctccaccagttccatgaagaaaaccaccactctcagtgggacagcccccgctgcaggggtggttcccagccgagtcaaggccacacccatgccctcccggccctccacaactcctttcatagacaagaagcccacctcggccaaacccagctccaccaccccccggctcagccgcctggccaccaatacttctgctcctgatctgaagaatgtccgctccaaggttggctccacggaaaacatcaagcatcagcctggaggaggccgggccaaagtagagaaaaaaacagaggcagctgctacaacccgaaagcctgaatctaatgcagtcactaaaacagccggcccaattgcaagtgcacagaaacaacctgcggggaaaaaatgtgagaaaagagtaactagcgaaccatctccagacattgagggagagataaagcgggacttcattgccacactagaggcagaggcctttgatgatgttgtgggagaaactgttggaaaaacagactatattcctctcctggatgttgatgagaaaaccgggaactcagagtcaaagaagaaaccgtgctcagaaactagccagattgaagaaaccgtcacaggaacggggaaaaagtgcagcttgccggccgaggaggattctgtgttagaaaaactaggggaaaggaaaccatgcaacagtcaaccttctgagctttcttcagagacctcaggttgggtctctggttcatcctcctgtggtgggcctgggaaccaaagaaaaagtattcatgttgactcacttgaaccccagagggatcttggcagggaggcctgggatatagaaagcacaccaataatgatgaagaaaaagaagaagaaaccaaagcaaaagagatattctcaaccacgggctggaggaccttcggatgatgacaatgcagataagcctaaaggtcatccatttgcagctgacacacaaaaatcaggtgttctccccagccagcctaccactatgggtacagaatatggacttgtatctggagaaaacttgaaaagggaatgtttagttaactccagtgcagccagactggtagctgagaactttgtctcagagagtctcagaattcctttatatccttctgaagaagcccccaaaactgcaataagttctcagtctaagctgagagtagaggaagagagcaaaagtaacaagtcagtactacaaaaccaagacaagaaattgctgaagcaacatgaatacaaaccacagcctgcaccccacctgaagactcctgtagataaaagccagtcagtaggccctctcaatctgaaaggacccctagcagaagtttctgcatacaatgtagaaacccctttggatatcagacttaaagagggttgctcttttttcttggaccaagaggttatgggtgtagtttcaaaacccacagcagcaaaagaaataccaaatttggtacccactttgatagcaagtaatccattagaatgtaatctaaaagaagggaataatgaaagtaaaatgactaaactgcagaatgtcaaactgaaggagtttcctgaaggagctgaagaggataaagaactaaaaaaggaagcttttcccaacgaaagacaagagatcagcatctttacttctgagcagctgcagggccaagtgttggtacaggtccctggggtagagaatgaaccatttaagagaatggcaggtgatggcaaaagcaggaagggaaggggaagttctgggaaaatgagaacagattctgggaaggtaaaagcaaaatctgagctgccatttcttctggacagccagaaggacggaagggctgttctcataccgagtgagccagtctctaaaactgaaggaatgactactcaggataagagtgaggagctggggctgaattcttcaaagcaaccaggcactaaggctgatctcacggaggcagtggtgatgggggagcctaaagagatgactcagcctaaggtggcaggcaccatgcaggcattgattcctttggaaagtggatcaggcatgactcagacttctggtgttagcacagaaacaggagatgtagtcaaagatatgggtgtcaataaccagagcaaggaaggaaggtgtccatggaaggatcatgaggcagctccctggatttctgaaaagcctaaaaagagaggcaatgaaggcaaaagcaaaaagtttaaaaataattattccacacagcctgctagaatggagaggaaggaagaaatccttaacccaccttttgaagggaaggatggagatactggtagtattccccataaaagcaaggaaataggatttactttccccaaaatgcatgattcttcgttctcacatacaccagatacacccacagtggaagcagttgacaggaagggtggaaattttcaggttaattttgttgagcttgggactcttggggaaaacaagataagcacagtcaaggcttctactgttactgaaccacctgccaaggtgacagatgtgagctgccaagagcaaatccagggggcaggatttgttccttcagtagtatctgaggagaataagacagatgcagccaatagatacactgcagtggctgacaaaccaagtaaaaggagtaatgatggaaaaagtaaaaaggttaaaaatagttctcctgagaagcacattctggagaataagatagatgcaacaaaaatacatgttcccatggaaaccacaggggaccagggaattgaaggaatggcctatatggacgaaaatagaaatattacatttacctgtcccagaacaccatcagagctgataaataaatcatctcctctagaggttctggaatcagcagcctgtgaaaaactgcccactcctactcctcaagtagtaaaggaaggtgattcctttccagataccttggcaaaaaatgggcaagagatagccccagcccagatttccaaatcattaatggtagataactacaccaaagatggagtcccaggtcaagaaagacccaagggtccctctgctgttgtgccctctacaagcacaggaggagttgctctacctattacaacagccatagaaacagttaacattcatggagatcactctcttaagaataaagctgagcttgctgattccatgaaaaatgaagcagggatcgatgaagggcatgtgataggagaatctgagtcagtgcacagtggtgcgtctaagcattcagtagagaaagtcacagagctagcaaaaggtcacctccttcctggagtgccagtagaagaccagagcctaccaggagaggccagagccctagaaggatatgcagatagagaacccaaagataagattttggagacacctcagaaaatgacagaaaaatctgaatcaaagacaccaggagaagggaaaaaggaagataaaagcagaatggcagaaccaatgaaaggctacatgagacccaccaagtcccgaggacttactccacttttgccaaagtctacaatccaggaacaagagagacataagcaactgaagtccgctgaaccactttatggaggatgtgagattaacctgatccagttctaa

SEQ ID NO: 5284 - DNA, 6474 bp, Homo sapiens
  SIMILAR (4954)..(3971): 931254mologous to Homo sapiens putative p150,accession number U93563,Smith-Waterman Score=1562.
tcaaacccttgatccagttgcagtcacagacaactgggcaccagggttcttggctccagctgtgcctgtgaagcctccacctctgacaggtggtggctcaagtctccactccaaggcccgtgaggacaggccacctgggtgggagcaaggtttctctaagttttccttaaaatgccttccgtgtatctgttcttcatcttcctgagagcacagtgtatcagacttgaaggggtggcctgcccctccacacctgtgggcgtttctcatcaggtgggacaagagaaggaggggtttgctggagatcatggggatgagaaccactgtgctttcttcatcagttaggccagcacaggctacatcgagagcaaagcaggtgagctgatcctccaatgagtacaacgtgctgttgtaaggttgctggcagtcagacaggtcatgggggagtgaaggagtcaagtaaacttcatccagggagtcctgtgggacgtcctgttcctccacctctggcagatccgggctcagcctggggcattgtgggtcttggtcttcttcttcttcttgatttttttcaatgtctgcaacaaagtcagacagggacagacacattaagtctattcccctattcatgcaacaatccactgtccaatctgtccccatcaagagccaagccaacatgctgttcctccaatgagtaaaagtacttctgtagggctggcatgagtcaggcagttcaagataactggtaggagtcgaataatatctatccagtgagtcctgcaagacttcaggctcttccacttccaacagctccctgctgagcttgaagaagtaggaaaaactgggacatgttgcctctcgatcgtcctttttcacttgatcacactgaggtccagcaagatgatggacagatgagctaaaacaagccaacttagaagacacagaaaatggagataaattcagtgaaacctgggtcacatcttccactgagaggtagacaagggtgacactggcctgggatgctaactggagctttatcaccttcacaatggagtactcactacctatgtcaagagccaagccaacttgctgttcctctaatgagtgaaaggtgctcctgtaagacctcctttcctctggtctcggttgagacactgcaaagggcatcgtcctggagcatttctcctctccccaaggcccctcgaaggaaggatgggcggacggaagcttcaccccgaagtggtcaagcgcgcagagctccagcttccgcaggagcatttcccggtgtctctcatgggtaagagtgggtcctgcaggataatgcctcccgttccctgaggagcagtgctggagatgcccatgtggccagctcctaggccacgcgacccaggccctccaggaggagcgaggagtcctgggccctgaaccagccccctggacccggggctgggggccttgctgtcccaaggacagctggggagaaagaggaagccggctgagatgtgtaaagcagctcttgctaccgcgggaagggagagggcgcgcgggacccaggagccactgtgcgaagccaggcctcaggagcagccgccttgttcctagaaggggtgcctccatccatctggtgtccaaagactgcagggagaccttctcgtccggtgggaaagcgaggtctcccatgctttcccaccacgcaggccttgtgtcctttctcctgctagtgtctgcccgccagcgggcgggagctgcggctgcggcggttccacactctgtggacgctgcccgccagcgagccaagagccgcgcttggaggcgggagtcggggagtcgtgtgcaggtcggaaggagacccaagctctgggtcagggcttttttgccaatagccaaattcagcgtgtaaaagacagagagctcacatctgtctgttcgagagcggccacagttttccatttgtgcctgctccacgtgctgtctttgttgggtcagcaaacatcgcctccctttaccgctcagtcccacttccaacctcgcgggcatcgcctccagtcgcttcttctgaaggcctaagaagcacgttacccgcgaacggaggtgaggaggctccactgaccgtcccctgtcagctgataatttgtggcacgcacaaacgccacgacttgccttggcctctctcttagttattcgcagctcagcccgatcggcgcctccgggacggcagaggcggcaaagacggtgggcttcttgggtgcagttccaggagggctggcatctagcgggcgtaaaggaagattcctgcgggaaggcagtcagtgcaaaacaattccctgactggtaatccaacccgagctgcggcggtgaaagcgctaaattcaaggacacaagtcccggagccagttgcagcgtccgggcagaacctgaccaccgacctagagatgcgcctttgtgaagcggcagcgcatggagagacagtagcgggtcaccgggccagagccgcgcactgccattttcccatcttaggctatactgcaacgccacccttccgtatgctctgggcaaagctccaagggttcccgctgacgtttgagttttttcctcagggccaagatcgaactggtcaccaattcgtgatttcccatcggccaagtgcgtgggcattgatctacacgcgagtttctccacctccgcggaatgggtattacggggtgggggaggggcccttcggtggattgtaaggtgtttagccgcatccctcgcctccgctgacttaggatttgaggcttttaacatctcgacatcatgagtttctacctttaggtctttccttctgttctgtcctccaaatcggcctcttctgagcctgttgaccagggccagccaggtagaaggctgggttcgctcaccgaggatcctctcgcccctccatgaagtcgacctcacctcctctgaaggtcctcccggtcctccagtggctggagaaggtgagtcgagtccctgtctccagtttgcaaagtggacaaagcctacgacaatgggccccgaatcagctactaggcatccctgtctttccagttggtggtactcgagcttccctacccaggatttctgtggattccaagggtacaactgaacaccttttgtcgttccaactgctcttatttgaattaagggctgatcctgacgcgcctggttgcggggagcaaaacggatcagctgactacccagacgagcaactttgccgtgactcggattcgaaccgaggttgctgcggccacaacgcagagtactaaccactatacgatcacggcgggccacaaggcaagcggtgatgcttgaccttgctcgaccgaagccgagttgagctaggggagcccaagcggcgtagaaagtcgggtgaaggcggagccaagaacggaaagagccatcactagagtccacggggcgttctgcttcctttgggaagtcgcggacccgggcgtttcccgggacgctggctctgacgctttttgatggggttgtttttttcttgtaaatttgtttgagttcattgtagattctggatattagccctttgtcagatgagtagtttgcaaaaattttctcccattctgtaggtttcctgttcactctgatggtagtttcttttgctgtgcagaagctctttagcttaattaaatcccatttgtcaattttggcttttgttgccatggcttttggtgttttagacatgaagtccttgcccatgcctatgtcctgaatggtattgcctaggttttcttctaggttttttatggttttaggtctaacatgtaagtctttaatccatcttgagttaacttttgtataaggtgtaaggaagggatccagtttcagctttgtacatatggctagccagttttcccagcaccatttattaaatagggaatcctttccccatttcttgtttttctcaggtttgtcaaagatcagatggttgtagatgtgtggtgtttatttccgaggcctctgttctgttccattggtctatatatctgttttggtaccaataccatgctgttttggttactgtagccttgtagtttagtttgaagtcaggtagcatgatgcctccagctttgttatttttgcttaagattgtcttggctatgcaggctcttttttggttccctatgaagtttgaagtagttttttccaattctgtgaagaaagccattggtagcttgatggggatgacattgaatctataaattaccttgggcagtatggccattttcacgatattgattcttcctacccatgagcatggaatgttcttccatttgtttgtatcctcttttatttccttgagcaatggtttgtagttctccttgaagaggtccttcacatcccttgtaagttggattcctaggtattttattctctttgaagcaattgtgaatgggagttcactcatgatttgggtctctgtttgtctgttattggtgtataagaatgcttgtgatttttgtacattgattttgtatcctaagactttgctgaagttgcttatcagcttaaggagattttgggctgagacaatggggttttctagatatacaatcatgtcatgtgcaaacagggacaatttgacttcctcttttcctaattgaataccctttatttccttctcctgcctaattgccctggccagaacttccaacactatgttgaatagcagtggtgagagaggacatccctgtcttgtgccagttttcaaagggaatacttccagtttttgcccattcagtatgatattggctgtgggtttgtcatagatagctcttattattttgagatacgtcccatcaatacctaatttattgagagtttttagcatgaagggttgttgaattttgtcaaaggctttttctgcatctattgagataatcatgtggtttttgtctttggctctgtttatatgcagttcctccttgtacctctggtagaattcggctgtgaatccatctggtcctggactttttttggttggtaagctattgattattgccacaatttcagatcctgttattggtctattcagagattcaacttcttcctggtttagtcttgggagggtgtatgtgttgaggaatttatccatttcttctagattttctagtttatttgcatagaggtgtttgtagtattctctgatggtagtttgtatttctgtgggattggtggtgatatcccctttatcattttttattgcatctatttgattcctctctcttttcttctttactagtcttgctagcagtctatcgattttgttgatcttttcaaaaaaccagctcctggattcattaattttttgaagggttttttgtgtctcaatttccttcagttctgctctgattttagttatttcttgccttctgctagcttttgaatgtgtttgctcttgcttttctagttcttttaattgtgatgttagggtgtcaattttggatctttcctgctttctcttgtgggcatttagtgctataaatttccctctacacactgctttgaatgtgtcccagagattctggtatgttgtgtctttgttctcgttggtttcaaagaacatctttatttctgccttcattttgttaagtacccagtagtcattcaggagcaggttgttcagtttccatgtagttgagcggttttgagtgggtttcttaatcctcttaatcagtggaatcttggtgctccaattgttgaaggacccagagatgaagacctccttgcctccttcagaccagcggataacagtgggccgggcctgctgtgtgggctttacggagtcctccaaatcctgctgccatgatacaaactctttgtccccagggagagagtgaaaacaagttgttctcttcctgaaagtccttggaattgagagcaaggtcttcagggcagctgtgggttgtcgtttttttagccacgcaacattttgaagtactactgaggagtaaacaagtcgtggaatcattggctcttccaccttggagtcagggaggctgaacacgctggggtcgtccgtactccccaccatgatcttgtgctccttccccggggcatggccgcctgcgccctcggagcgtgcagccttggcgccgtggcgctccccggacacccggtcgctggtggtgtttcccatggctgcagctcgtcggggaccacctaccgcggggaacgacaccgggttgggaggatgaggcagaagaatcgcttgaacccgggaggcggaggttgcggtgagccgagatcgcgccactacactccagcctgggcaacaagagcaaaactctgtctcaaaacaaaacaaaacaaaacaaaacaaaaaacaccggctggttcattggaacagaaagaaatggatttatctgctcttcgcgttgaagaagtacaaaatgtcattaatgctatgcagaaaatcttagagtgtcccatctg

SEQ ID NO: 5285 - DNA, 1968 bp, Homo sapiens
  SIMILAR (1)..(1821): 441254mologous to Mus musculus microtubule-associated protein 4,accession number U08819,Smith-Waterman Score=1146.
atgcaggcattgattcctttggaaagtggatcaggcatgactcagacttctggtgttagcacagaaacaggagatgtagtcaaagatatgggtgtcaataaccagagcaaggaaggaaggtgtccatggaaggatcatgaggcagctccctggatttctgaaaagcctaaaaagagaggcaatgaaggcaaaagcaaaaagtttaaaaataattattccacacagcctgctagaatggagaggaaggaagaaatccttaacccaccttttgaagggaaggatggagatactggtagtattccccataaaagcaaggaaataggatttactttccccaaaatgcatgattcttcgttctcacatacaccagatacacccacagtggaagcagttgacaggaagggtggaaattttcaggttaattttgttgagcttgggactcttggggaaaacaagataagcacagtcaaggcttctactgttactgaaccacctgccaaggtgacagatgtgagctgccaagagcaaatccagggggcaggatttgttccttcagtagtatctgaggagaataagacagatgcagccaatagatacactgcagtggctgacaaaccaagtaaaaggagtaatgatggaaaaagtaaaaaggttaaaaatagttctcctgagaagcacattctggagaataagatagatgcaacaaaaatacatgttcccatggaaaccacaggggaccagggaattgaaggaatggcctatatggacgaaaatagaaatattacatttacctgtcccagaacaccatcagagctgataaataaatcatctcctctagaggttctggaatcagcagcctgtgaaaaactgcccactcctactcctcaagtagtaaaggaaggtgattcctttccagataccttggcaaaaaatgggcaagagatagccccagcccagatttccaaatcattaatggtagataactacaccaaagatggagtcccaggtcaagaaagacccaagggtccctctgctgttgtgccctctacaagcacaggaggagttgctctacctattacaacagccatagaaacagttaacattcatggagatcactctcttaagaataaagctgagcttgctgattccatgaaaaatgaagcagggatcgatgaagggcatgtgataggagaatctgagtcagtgcacagtggtgcgtctaagcattcagtagagaaagtcacagagctagcaaaaggtcacctccttcctggagtgccagtagaagaccagagcctaccaggagaggccagagccctagaaggatatgcagatagaggtaatttcccagcacatccagtgaatgaagagaaagagactaaagaagggtctgttgcagttcagattcctgacttactggaagacaaagcacaaaagctcagtttttgtgaggaccaaaatgctcaagatagaaattccaaaggttcagatagtttgaataagaaggtagatctgactcttttgtctccaaaaagtgaaaatgataaattgaaagaaattagtctggcttgtaaaatcacggaattggaaagcgtttccttgccaacaccagaaatccagtcagatttcttacatagcaaagtcgaagctcctccttcagaggtggcggatacgttagtaataatgactgcttccaagggtgttcgactcccagaacccaaagataagattttggagacacctcagaaaatgacagaaaaatctgaatcaaagacaccaggagaagggaaaaaggaagataaaagcagaatggcagaaccaatgaaaggctacatgagacccaccaagtcccgaggacttactccacttttgccaaagtctacaatccaggaacaagagagacataagcaactgaagtccgctggtatgaacctgccatggggaaatgtgtgtgcttgtggcttttga

SEQ ID NO: 5286 - DNA, 4995 bp, Homo sapiens
  SIMILAR (1342)..(1536): 731254mologous to Homo sapiens Human myelin oligodendrocyte glycoprotein gene,accession number AAZ29204,Smith-Waterman Score= 224.
  misc_feature (1)...(4995): n = a,t,c or g
gtccactgcggtggaattcacaaaaccatcctaaagcgttaactgctcataattttaatcagctacagttatgaaaaaggaagaattttgctctaaagattattaataagcttagaaaatcctgcttttaccctaacagaatgaaagtggggttgaggggcggtagtatgaacagtgattcctaactctatggcgtaaattactttgaagagttcattttggaagtaagggaatccccgcttcccttggtgttgaagatctgcatctgattttgaaacgtcccagatttagctttcaaggtgcgtgcatgttgaatgatccagaagcaacgaaaactctggggtgagggattgaaaaaatctgaaatcacagttggatttttaaattcaaccatcaaaaatatgtactatcagtttttttttacattgatgtgaaataagcaaattttcatgataattaagctgcaaaatttaaagttatcaagtaaataggtcctctgtgttctgtttcatgtgatggagtgggtttcagtctgtgttcttggagccaaagggttcctcaggggtgcctcaggagtaatggtttaaaagaagaggggcaatgagagggagcgagggggaaggcctatttggtatttgagcaggggccttaggctccatatccccaccccctttacccagaacagcccatttttcttatgtatattggaatttcaagtaagctttcatggggtgcactggggcggggaggaatggatgggataaaaaaagtggagattttgctgctttaaaaaagttgagaactacttgtgtagtttttaagtattttaatgtatttcatttggccaaattcaactgccacaagcaaagctagtcatagttgtaactgtgcagtggtaatatgcttatgcctacctttttcctctcaaacaatttgttttttttacattgcattctgagtactgaagagcatcttgaaatgtatggaagtggtttctatgctatttgataatcagtaatgttcagctgtcatgatagtactttactggttgcagacccatctctcttttatattaaagcactagtgcagtttataattgtgcctacttttaaaatctttcagtaaaaaagtacataatgaatacagaaatcataactgacagggatacagtaataatgaaatgctactatcacttattttaatataccattataaagcaggcaaataccattgctttttgagtgcctttttaactttatactaatgacttaatagagctttaaaagaaagaaattggctgggcatggtggctcacacctgtaatcccagcactttgggaggccgaggtgggcggatcacctgaggtcaggagttcgagaccagcctggccaacgtggtgaaaccctgtctctactaaaaatacaaaatttagccgggcatggtggcacacgcctgtagtcccaactgcttgggaggatgaggcatgagaatccattgaacccgggaggcggaggttgcagntgagcagggattgctccattgcactccagcctgggcaacaagagcgaaactctgtcaaaaaaaaaaaaaaaaattctcctggataataaggctctttgaaaggaggattactcattgttttacgtaggaatatatgatgagtattatttagcaagactgttgctaaagaatatctgatgagctgaaaacattcttagtaaattgaataaatgtttaagggaaaaaatacgtagtatttatatttcattgtttcaacttgagaccatttcagatcacttcggaagtaatttaattcatcggagtatttgtaatatatgtttctaaaaaagtttagttctaaagatcagagaaaaagcatgacacaaagcgttttgactattttatgaatatgtgaattgaaagagaatgtacataatcatgtagtttccgttggcattggccggtttgtaatttcacaagagtcagatgaggtcatctacctgcagtatgtgaaggtgaatgtaaagtcatgtgactggacatgatgaagatgaagagggactctcgtttctttctgtttaagccaacacagctcagagtccttataagaaactgaaagaagcattatcgtcagtggaagcttttgaaaaacactacttagtaagtattaacaagtgttcaatgtctgttctgtgaatacctgtctctagaaggctttgctacatggcctgttgagttgggaaggaactggtgtggggggccccttcttgttggttttttttagtttctttggtacctggggagttgtggacaaaacatggagtagttcatcaaatgtgtattagtgcccatggtaccatgctaggcatggaatcatctttgaatatttaccgttttgttcaaattgggtttgctcacacagaaattataagagaggctagtgaatacttttctttgtaaaaaggagtaatttggacttgggcagagctattgtatttgattttgaaagacttaaattagcaaaactttaaaaaacggtgtaggcagaagtgtggtgggtcagcgtcattcccgggtcatgggcaacttgagcgtttggtctgcccgtaatggctgtacctcttatacacacaagtatgaaaaatacccagcatgtcacccacgtgcagaaagtccttggaaaagttagatgttttggatgagtttgtgggtttcttttattattatgcttcataatttatacacaggttaccaattttgcttatatattacagaaaaattcacaaaaatagatgcaaaggaaaaaataatgttacattattagcaatgtcttctgcgggctgggcatggtggctcacgcctgtaatcccagcactttgggaggccaaggtgggtggatcacctgaggtcaggagttcaagaccagcctggccaccatggtgaaaccccacctctactaaaaatacaaaaaaaaaaaaaaattagccgggtgagtatggtggcttgtgcctgtagtgccagctactcgggaggctgagacaacgagaattgcttgaacctgggaggcggaggttgcagtaagccaagatcacgccattgcactccagcctgggcaacaacgagcaagactctgtctcaaaaaaacaaaacaaaaaaacaccaaaaaaacccccaaacctgaagaaattcagatacacgtgtgtaatgttagtgatgtgagaacaaggagcaggggtgcatttgtgttgtgttcgggttggggatgggtttaggagctccaggttgggagcagtgacagagagtcatggccgtggtgagggtgaatcccaagtggatggctcaggacgggtatggaaacccttcattcctcataggtactgggaagtccatttgcaagctgagcgccaggcctggggaggaagaggcttgggctgcagatgcacgcacatttgtttttcactgatagtttttacaaaaagcttggtttaagttatggaattttatgtccctgggagtagaatttacatttgttaaattgaccactgtttaagatcagtatacattctctagtctgtgatgtctggagctagttttgagggtgaaccacactttatccaacatacaaactttcccatgcagcttctctggtgcgcagttggttttgaccgtgggactaggtgcttctgcaggttttaagtaattaacttaaaagcttctcctctgagaaacatttctgttgcgctactgactctccttctccacatttgttgtgttcctagggcttctctatagtgcacattaggacgtttcatttgttgctgaatgctttccagaattatttattccatagggtttctctcctgtgcagctctctcatgggtaatggggcgtgttttcttgccaaaggcggttccaccctcgtgattgtatagggctcttctcctgtatgaactctgagatcagtgagctctgatctccaagggaaagttttcctgcatttgctgttttctcatgtctctcccagtgtgaattctctggcttctagctgaaaacttttccacagttttacattcatgtggttttctccactgtgaactctgtgattcagaatcagaagcagttcttagtagaggcatttctacactgattgcactgaggatatctccccagtgtgaagtttctggcatagagtcctggcttcccgcagacgactttcacactctgccatgttcatgcctgtgggcctctctggcaggaactctgatgcaccgcgaggcccatgtactcctgtggctttctcacattcggtctacttgcagggtatctccacagcatgcaccattctgggtacagggggacatcctctgttactgaagatgttgtcatatttagtaccttcacaaggtttctctccttccagaattttctgatgtacacaaataactgacttccacaagagggcttttccacactcggtgtgtgcatacagtttctgcctgtgatcatttctttatgttattattttattttttcgagatagggtcttgctcaatttcttaggctggagtgcagtggcacgatcatagctcactgaagtttcgacctgggctcaagcaatcctcccgcttcagcctcctgagtagctggtgcgcacgaccatacccagctaatgttttattttttgtagagacgaggtctcactatgttgcccaggctggtctcgaacttctgagctcgagcgatcctcctgcctccacctcccaaagtgttcggattacaaacgtgagccatcatgcccggccgaaagtcaacaatttttccaaatctttttcctcaaagtcttcaacaaagactttgaactgccaaagttgtaatctagtaagtcaaactgcttatctcaattaggggtaaacaaaggcacaaaagaaaaacaagcagcataacctttatttggtcatacaataggtgaagagtgtctcaatgttttgaacacta

SEQ ID NO: 5287 - DNA, 1272 bp, Homo sapiens
  SIMILAR (522)..(590): 601254mologous to Homo sapiens Human secreted protein, SEQ ID NO: 7870,accession number AAG03789,Smith-Waterman Score=72.
agcccgggtttaccctgttaaccaagaaggtttttattttcttaccttgtgaaacaacccccctggcccccccaaaaggtggggattccaaagtgaacccccccgccccacctttttttttggttggttttgaaacaaaatttccctttttttccccgggtggaatgcaaggaccttattttgggtccctgcaacctccccattccggggttaaaaaaattttcttccccaacctttaaaatgggtgggaattcaaacatgggccctcatggccgggggggtttttttttttttttttttttgagacggagtctcgctctgttgccccaggctggagtgcagtggcgtgataccggctcaccgcaacctctgcctcccgggttcaagtgattctcctgcctcagcctcccaattaactgggactacaggtgcccaccatcacgcccggctaatttttgtatttttagtagagacggggcttcgtcatcttagccaggctggtctcgaactcctgacctcataatccaccagccttggaatccccaagagctgggattacaggcatgagcaccgcacctggccgtcttaccaaaattttcagaggaaaaaaatgtgggattttttttcaatttgttctcaccctccaagcatgctggggtgctgcgctgagccctgtgaggggctggcagcatcgcccccaagaaactgaggcttagacaggaaaggccacctgcctggtcaccgggttctcctacctggaaggaggcagttttagctgaggaaggatatccagatgggccctccatggttccttcccaccagaacttctcagccatgggcaaggaggcagccagggacccagcacctttcattcccttggtttcctgctccccttctgggtagggcacgaagtgacgcacaggtgtgggcatctctgccaagccagctctgcccaggatttaactagagctgtgaggcttgttgacccagaaaacgtgatttgggagacgccaaggcctcccctcccctgacaggactgggggcagaagttctggcctttccagtgtgcagggagaaaggttttacctgataggttcctgccctcatcctagggtcagcccagggacttagcctccctggcgggtttctggagtggagcatgggactggtcagaaccttaccgcgagttaagtaacaactgggtggaggttaaaggtaagcacgcagacaggcaggtggagttaaactgtaacatacttgattcctcgtgcc

SEQ ID NO: 5288 - DNA, 1900 bp, Homo sapiens
  SIMILAR (1712)..(1753): 781254mologous to Caenorhabditis elegans Similar to phytoene desaturase; coded for by C. elegans cDNA CEESX74F; coded for by C. elegans cDNA yk303f4.3; coded for by C. elegans cDNA yk257d4.3; coded ,accession number AF036705,Smith-Waterman Score=70.
atggctgcaagtggccgaggtctctgcaaggctgtggccgcctctcccttcccggcgtggagacgagataacacggaagccaggggaggtctgaagcctgagtatgatgcggtggtgataggagcaggacacaacggactggtggctgcagcgtacctgcagagactgggggtgaacaccgccgtcttcgagaggcgccatgtgatcgggggtgcagctgtcactgaggagatcatcccagggtttaagttctcccgcgcgtcctacctgctcagcctgctgaggccgcagatttacactgatctggagctgaagaaacatgggctgaggcttcatcttcgaaacccctactccttcacccccatgctggaagagggtgcaggcagcaaggtgcccaggtgccttctgctgggcacagacatggcagaaaaccagaagcagatcgcccagttctcccagaaggatgcccaggtctttcccaaatatgaggagttcatgcatcgcttggcattagccattgaccctctgctggatgcggcccccgtggacatggcggccttccagcatggctccttgctgcaaaggatgaggtcgctctccaccctcaagcccctgctgaaggcaggccgcatcctgggagcccagcttccccgatattatgaggtcctcacagctcccattaccaaggtgctggatcagtggttcgagtctgagcctttaaaagccactctagccacagatgcagtgattggagccatgacaagtccccacactccggggagtgggtatgtgctgctgcaccatgtgatggggggcctggagggaatgcagggggcctggggctacgtccaggggggcatgggtgccctctctgatgcgatcgcaagctcagccaccacacatggagcaagcatcttcactgaaaagacagtggcgaaggtgcaggtgaacagtgaaggctgtgttcaaggagttgtgctggaagatggcacagaggtgagaagcaaaatggtgctgtccaacacatcaccgcagatcaccttcctgaagctgacgccacaggagtggcttcctgaggagttcctggagagaatctctcagctggacacccggtcgcctgtcaccaagatcaatgtggccgtagacaggctgcccagcttcctggcggcccccaatgctcccaggggccagccgctgccccatcaccaatgctccatccacctgaactgtgaagacaccctcctccttcatcaggcctttgaagatgccatggatggcctgccttcccacagtgacttaggatctgccaaaatccatactcctaaggacaggaagtgcatcccaggtgaaaaatctgaggatgagggcaggcctgtgattgagctctgcatcccttcctcgctggaccccaccctggctccccctggctgccatgtagtctccctcttcactcagtacatgccctatacgctggctggaggcaaggcctgggacgagcaggagagagacgcttatgcagacagagtgtttgattgcatcgaggtctatgcccctggcttcaaggactctgtggttggcagagacatcctcacaccaccagatttggagagaatcttcgggcttcctggagggaacatattccactgcgccatgtccctggaccagctctacttcgcccgccccgtgcccctgcattctggctaccgctggccctctccagggcctgtatctctgtggaagtggggctcatcctgccccttattctgaaattttaacttcacttactaagcgtgtgcccatccagcacgtccaccctcagccgttgagactgtgggctgtggacctggcccctccccagacctttggtgcaggaagcctggagggagccagaatctattga

SEQ ID NO: 5289 - DNA, 767 bp, Homo sapiens
  SIMILAR (290)..(487): 741254mologous to Arabidopsis thaliana phytoene dehydrogenase -like,accession number AB023033,Smith-Waterman Score=250.
ggactggcctacccatgcatctttgggatgaattaatcatttgcttgaggactgatttttgtttttcacctattgaggtataatttgcatatgataaaataagcccatttctgtgtgtaatttaatgactgttagtaaatttgccaagttgtacacccatagtgcctcctcttcttcctaacaccatctcatttctctgtttttggcaccccagtgtttgattgcaatcgggtctatgcccctggcttcaaggactctgtggttggcagagacatcctcacaccaccatgatttggagagaatcttcgggcttcctggagggaacatattccactgcgccatgtccctggaccagctctacttcgcccgccccgtgcccctgcattctggctaccgctgccctctccagggcctgtatctctgtggaagtggggctcatcctggaggaggtgtgatgagagctgctgggcgaaatgcagcacatgtggcctttagggacctcaagagcatgtgaccctgaaccagctctgacccaggaagaagactccacccctgaatttccaagtgctccattggatcagcttcccaggaagttcagcttcgggttagtacataaggccaccacaatgctcaagaaattattttagaaaaaaacgtacgagttacatttagtgcaagttgaccttatgcccatgccttcatacatggacttggttctgttttattaaaactaatatttcatacagataaaaaaaaaaaaaaaaaaa

SEQ ID NO: 5290 - DNA, 720 bp, Homo sapiens
  SIMILAR (350)..(87): 481254mologous to Homo sapiens hypothetical protein,accession number AL162044,Smith-Waterman Score=193.
atgggctgcaaacattggatgacctgtggcagagcacggaaagaaggcaaggatgacagctacatgcagacccaatggctccatcgtgccttcgctgctccaccagagacctgtccctttcctctccgggaccacattcagacagggagggacttgtatattctaggtacatttgagaagtgtgtattttggggtggggcagaaagggaggtgtggagggagaggcaccagcgggaaccggggctgcgtgcagcatttgcgggccagttggagttcccagcgggtgtgggcttggcgggccccgcactcggagcagccggccagccctgctggccccggggcaatgagggacttagcaccagggccagtggctgcggagggtgtactgggtcctccagcagtgccagcccaccggtgctgtgctcgatttctcaccaagccttagctgccttcctgcggggcaggtctcgggacctgcagcgcgccatgcctgagcctcccaccccctccatgggctcctgtgcagccggagcctccccgacgagcaccaccccctgctccaaggagcccagtcccatcgaccacccaagggctgaggaatgcgagtgcacagcgcgggactggcaggcagctccacctgcagccctggtgcgggatccactaggtgaagccagctgggctcctgagtctggtggggacatggagagtctttatatctag

SEQ ID NO: 5291 - DNA, 345 bp, Homo sapiens
  SIMILAR (177)..(308): 591254mologous to Homo sapiens Human secreted protein, SEQ ID NO: 7874,accession number AAG03793,Smith-Waterman Score=145.
catcagagagctgaattgcagggcaattaaatagtttaaaatgaaggaaagagaggtgcctcctacaataacagagatgggctgcaaacattggatgacctgtggcagagcacggaaagaaggcaaggatgacagctacatgcagacaaggtctccagatttgccacccatgctgagtgccgtggtgtgatcatggcttatttcaacctcaacctcccccactcaagcgatcctcctgcctcagcctctggagtagctgggactacaggcacgcaccaccacacccagccataatttgcctcttgctgtaactaaaaggtcacaaaaacaaagaattctaaaaaa

SEQ ID NO: 5292 - DNA, 1101 bp, Homo sapiens; identical to SEQ ID NO: 74
  SIMILAR (94)..(1098): 1001254mologous to Homo sapiens dJ146H21.2 (similar to CYTOCHROME B-245 HEAVY CHAIN),accession number Z83819,Smith- Waterman Score=1798.

SEQ ID NO: 5293 - DNA, 953 bp, Homo sapiens
  SIMILAR (2)..(226): 771254mologous to Homo sapiens Human myelin oligodendrocyte glycoprotein gene,accession number AAZ29204,Smith-Waterman Score= 312.
acctcccaggttcaagcgattctcatgccttggcctctcgagtagctgggattacaggtgcacaccaccacgctcagcaaatttttgtatctttagtagagatggggtttcaccatgttggccaggctggtcttgaactcctgacctcagatgacccacccaccttggcctcccaaagtgctgggattacaggtgtgagccaccatgccgggccgcataggttcttaataaatatctattgaatgaattaaccatctttaaaggtttacaagtacccactgccccccgtgccccaccagtctcactgcctgactccaagtctcctacactagatttacaatgtgacttcagactcggtctctttattgggatgggttctggcacagccttaaaacctagacttttcttttgcagcacaagtgcataaatgaagcctggctggaggtccttgtccttgggccatgcacacttctgtgtctccattatagtatctgccaaacatggtcagctaccctgattcttcatctttgtgaactttgaccttcaagtcctgtggatccacacctggccctctgggaatctgtggtcaggcctgctacaactgctcatgaaagtagttcattcatttggagccaatttcatgagggcagacagcacgtctgaccaattagtgtaagctcagcatagtgctgggcacatagtttatagagccaattaatacatccatttttgtcaggtgcatctgcttctgctggacttgtctgtctgttttggtcttcttgccctcctggtagcaagactcttggtataatcctgacatccaagccctgggatggaatgaaactccagacactgacctggagccatcattaatacaacaggctgtcattaatatgtgtgaccttgcatttacatttctataggaatacttctaagcactttttttatggttt

SEQ ID NO: 5294 - DNA, 333 bp, Homo sapiens
attattttatttcatctcatttcattatttcatttcattatgtcatttcatttcatctcattacatttcatctaatttcatttcacctcatttcatctcatcatttcatttcatctcatcatttcatcttttcatctcatttcatctcatcatctcatcaactcttttcatcttatctcatcatttcatcatttcatctcatcatttcatctcatctcgtatcttatctcatttcaatttcatttcattatttcatgtcatctcatctcatctcatcatttcatctcatcacatctcatcatttcatcaatttcatcatctcatcatttcatg

SEQ ID NO: 5295 - DNA, 345 bp, Homo sapiens
catcgacgaacacagaagacagaggtaagatacaggcgaacgcgtgcgatataagaacaacagagggagcaattagaatcaaggacgctgaagtcgactgaaaaaagtcatgaaaccggattcgctacgacacacgcaccacctttaccgcatactatgtaagtcatttagcttattaggggctctctttccatatgttaaaaaaaaaggtttataagtatatgtgcatatacatgtatatatgcacacatacacacacgcatctcatatgaatgtatataaacagaccaagtctatatgattatcaattccttttctattatttgagtcaactagactcgtgcc

SEQ ID NO: 5296 - DNA, 1509 bp, Homo sapiens
  SIMILAR (646)..(870): 971254mologous to Rattus norvegicus Na-Ca exchanger NCX2 isoform,accession number U08141,Smith-Waterman Score=374.
atggggtttcaccatgttggccaggctggtctcgagctcctgacctcaagtgatccgcccaccttggacttccaaagtgctggcattacaggcggccgattcacgattgcggccaagcaccacatctccattgctgagatctatgagacagagttggtggacatcgagaaggccattgcccactacgagcagtctgcagactactacaaaggcgaggagtccaacaggtggtgttacgctgcgctgctggagcagtatcagaaggccattgacatctacgaacagttggggcactcacctcgggacatgaaccagctcccagctggccccccagtgcctggcagtggctctggccctctggctgcttgccctgagctcaccagtgccacttctccatggctacaggtggggaccaatgccatggacagccccctcctcaagtacagcgccaaagactacttcttcaaggcggccctctgccacttctgcatcgacatgctcaacgcctatatgctggctgtccaaaagtatgaggagctgttcccagctttctctgattcccgggaatgcaagttgatgaaagtaagtgctgggtgctccggcctcccccttcccgaacctcagacgggggtggctggggctccaggggatggggacaggaagctaacagccgaggaggaggaggctcggaggatagcagagatgggcaagccagttcttggggagaactgccggctggaggtcatcatcgaggagtcatatgattttaagaacacggtggataaactcatcaagaaaacgaacttggccttggtcattgggacccattcatggagggagcagtttttagaggcaattacggtgagcgcagaatttgccactggcgccaacggctctgtggaaaggacggactatacatcctgtaatcggcggacccagaagcaacggctaagccgggccacgctgcagaggagagcagcagctggagtgagggctctggacacggcacctgctctcagctctacccagtggaggctgtctggcgagcgcagcttcggcacctggtacaagcagcagcgcacgagggtaagcaatactgtacaagagttcgcgaaatcggcgctatacgatggcagtagtcagttagcagccgcccccaccagccgccgcacgccgcccgtgactcgtgaccccccaatcggcgtcaagagacctcaacgcatgcgcacataccggcgaacggcgctccactctctccccagcgctctgtacctcacctcccacgtgaccctgtggaaggcaatggcagtaccccccgccgaggccccgccccacggtgttgctgctggatcctcctccaccaatcagcaggagccctcggctcgcgctggggcggggggtcccccactcgccctccccgcggaactctggcacagtcagctgaccgcagacactcacgtgacagctcggggcccacgcccgggtttgacagttctgcgcagaacttag

SEQ ID NO: 5297 - DNA, 2121 bp, Homo sapiens
  SIMILAR (2121)..(1651): 981254mologous to Homo sapiens menin,accession number U93237,Smith-Waterman Score=783.
gggcgacaagagcaaaactccatctcaaaataaaataaaataaatcaggaacagtaagaactgccgttcattgagtgcttattacatgctgtcacattgctgagcagtttacacacgttgtctctattcatcctcctgcaaccctaacaggtgggacccctcttagcctcattttattgatgaggaaaccaaggctcggagaggttaaggaacttcctgcagctcacgtagttagaaactggcgaagctgattggatctaggcctgtgtgatcctgagcctacactccaggaccgttctgatcctgaccagtacttactgatttggggtcttgagaagacagtaatgagcaagggcccccaggagagttttctgaccttcacaaagccctgctgagatcttgacctctgttcttaaggaggtggatcttgcctcagttatgctcagccatttcattacacaggaagacctcattcttccttacattgcaatttattgttttttaaagaaactggccttgtattgtggaaataacattgggaaaatggagattaaaatgggtaatgggaaataacaatcaagtaatggcttaagaacagaagcttgattggggaaaagtcctcccgaatagaaagatgatcaaagtggggaagaaataaagtgggactttgagtttgaaatggctcactcatgcctgtaatcccagcactctgggaggccaaggcgggcggatcacctgaggtcaggagttcgagaccagcctggccaacatggtgaaacccctgtctctactaaaaatccaaaaaaaaattagccaggcatggtggcaggctcctgtagtcccagctactcaggaggctgaggcaggaggcaggagaatggcatgaaagcaggaggcagagcttgcagtgagccgagattgcaccactgcactccagcctgggcgacagagtgagacgccgtctgaaaaaaaaaaaaaattttcataggccaccagttgcggtggctcacacctgtaatcccagcatttgggagactgaggcgggcagatcacttgagcccaagagttcaagaccagtctgggccacatagtgagacaccatctctacaaaaaaaatacaaaaaattagccaggcatggtggcaggtgcctgtaatcccaactacttgggaggctgaggttggaggatctctgagcccagggagactgaggctgcagtgagccatgatcacaccactgcactccagcctgggggacagagtgagaccctgtctcaaaaaaaaaaaaaaaaaaaaatcttcatagccattattttgtttaactgcctcaaatgcagcccaatttcatcttcttgccccctaaatctgctgccgccctctgtgtctcatgcttagaactcctgtagctgttcagtggcaagggtgggggtgctgagggggcagaggtgaggttgatgatttggagccaagtgatcaggcttcacttccagccctgccatgccgtgtgtgactttggcatatcatttcccctctctgggcttcagtttcccaactgcaaagaggaaaataacacctgccgaacctcacaaggcttacagttcttaaaagggttctgtaaaccatggagggttttgaagaagtgggtcatggataagattcccacctactgggctccaacctgtgatgaagctgaagagggactggatgtgggcccgatccttgaagtaggagcggctgaggctgttccatatgacatcggagaccttcttcaccagctcacggctggagacacccccttctcgaggatagagggacaggtcgacggcgcctcggatctgggcggtgaagcgggcatagagggcggcgatgatagacaggtcggccacgggaaagtaggtgaggccgccaggcgggtcgggggcggggctgggctggaaggtgagctcgggaacgttggtagggatgacgcggttgacagccagaaaatgctccacgaagcccagcaccaaggaaaggagcaccaggtccggctcctctcggcccagctcggcagcaaacaggcgcaccacgtcgtcgatggagcgcagcgggaacagcgtcttctgggcggccttcagccccat

SEQ ID NO: 5298 - DNA, 772 bp, Homo sapiens
  SIMILAR (383)..(481): 931254mologous to Homo sapiens Extended human secreted protein sequence, SEQ ID NO. 178,accession number AAY35929,Smith- Waterman Score=166.
agtccagtgcggtggaattcggcccctggagctctgaccctaggaagcgaggcacaaaccttcttccttgccccaaatcagaacaaatgtcctcacttggaagctctctcagaaggacctcatgggcccattctcaggacaagcccagacaagtcgaacaccaagaagtggtcacagcccagaaaatggagtccctggggatacaaccaacggcttctctgggagaggattctgagccagccagctgggagagaagagaggagatgccaggccttaggggaggcaggagagaggggagagggagaggagttccaggcccttgggagggagaaagtgccagcctggcttgccgtgaacgctcaacaaaagctgcttgctttgcaggtggaaaaggccaaggttgaagtcggtgtggccccggcgcttgggatcctggttgttgctggatgctcttttgcgattaggagataccaaaaaaaaagcgacagcctgaagcagccacaaaatcctgtgttagaagcagctgtgggggtcccagtggagatgagcctcccccatgcctccagcagcctgaccctcgtgccctgtctcaggcgttctctagatcctttcctctgtttccctctctcgctggcaaaagtatgatctaattgaaacaagactgaaggatcaataaacagccatctgccccttcagaaaggacttctaccatgtttttatagacttctgaatcacaaaggaggaaggtaacattgagtgaacactcactggg

SEQ ID NO: 5299 - DNA, 775 bp, Homo sapiens
  SIMILAR (188)..(316): 721254mologous to Trachemys scripta elegans putative pyruvate kinase,accession number AJ243136,Smith-Waterman Score=154.
ttgtaagctggaactaacaaagaacattttgtaaaggtaagtggaaaggggcagcaaagatcctaatagatttaaataacttatttctctgcaagttggagcagaaaggtactgacctccctggtgatagcaatggaaaattatggctccttgggcagcaaaaagggtgtagaccttcctggtgactgtggacctgcttgccatgtcagaaaaggacatccaggatctgaagtttggggtagaatgggatgtggatatggtgtttgcctctttcatccatgtggcatctaatgtccatgaaattagaaaggcaattattgcaaactggagcaaggtgcccacttgcccaccagagttaggctcttaccttcccagaggaactgagacccacagctatttttatatatcttacagttcagatcagatacaaatatgtaaacctctacattattcctatggtagaaattatgatactctttaagcctgtcacagattttgttatttaatgcaaagaagcacatatattactatgggacacttttggtttgtttaaatattttgatagttgtattttaatgtaaagggtttcatttgtaatcttatacagatggtccccaacttacaatggttcaacttatgatttttcatctttacaacgggcatgaaagcaatacattttcagtagaaactgtaggtcaaatactcatacaaccattctgtttttcactttactgcagtatttaataaacatatgagatattcaagattttaaaaa

SEQ ID NO: 5300 - DNA, 522 bp, Homo sapiens
gtcggtctccgccagctaggatctcccccgccgtccgcccccgcccctcgtctgcctcccccgcccgcgcctccgcccgcgcttccctttcctgcctcgcgccccactccctttcctcccctccctgtttcccttcctgtccttcccagctcacgctctctttccctgccgcctgcctttcttttttcctttttttgcattggcgtcttggggctgttacacacacgcgcgctgtccattgcagcttacataaaggcgggcgcgattatgcaattatattgttagcgatatttcaagagcaatggctcgttttcttaggatttcaacacgaaggcatcatgcatttttgaaaaactagtattgagaataataccttgcaacgtaaagaatgttttttggtatttttacacaatctctactttgaccaaacgagtctggacagttttcttttaatggaaaataggagaaatggtgagtagtaccatttttttttagcgtagttcacagaactttactataaac

SEQ ID NO: 5301 - DNA, 4237 bp, Homo sapiens; identical to SEQ ID NO: 1820
  SIMILAR (26)..(2668): 1001254mologous to Homo sapiens plakophilin 2b,accession number X97675,Smith-Waterman Score=4540.

SEQ ID NO: 5302 - DNA, 637 bp, Homo sapiens
  SIMILAR (2)..(193): 761254mologous to Homo sapiens PRO2550,accession number AF130089,Smith-Waterman Score=265.
attttattttttgagatggagtttcactcttattgcccaggctggagtgcaatggcgcgatcttggctcaccgcaacctctgcctcccaggttcaagcaattctcctgcctcagcctcctgaatagctgggattacaggcatgcgccaccacgcccggctaattttttgtgttttcagtagagacgaggtttctccatgccggtcaggctggtctcgaactcctgacatcaggtgatccacccaccttggcctcccaaagtgctgggattacaggcgcgagccaccgcaaccggccagtacagagcatcttaaggttggaaggactcttagagaccatagtccagcctcccacttgatactgaaacacgtttgtgaattcatggcagatgtctaacttccctcaccacctttccgatatggacagttctcatgcccagaagcaaaaccttctttattgtgcttgtcctcccttgactgtcatgcatataatcagcatctttcccactaagtgaagggcccagactcgagcacaggagcacagcaccccttaaactcacgaggggctgcattcacaccatcagcagggagattacacttgtgtcatttgtgacactagacaggtcagctagcaccatt

SEQ ID NO: 5303 - DNA, 763 bp, Homo sapiens
  SIMILAR (47)..(295): 771254mologous to Homo sapiens Human myelin oligodendrocyte glycoprotein gene,accession number AAZ29204,Smith-Waterman Score= 365.
ttttttttttggagacagagttccgctccactcagtcgcccaggctggagtgcagtggcgcaatctcggctcactgcaacctccagctcccgggcccaagccattctcctgcctcagcctcccgagcagctgagaccacaggtctctgccaccatgcccgactaatttttgtatttttagtagagatgaggtttcaccatgttggccagtctggccttgaactcctgacaggcgatctgcctgcctcggcctcccaaagtgctgggaccacaggcgtgagccaccgtgcccggccattttttttgtttttgtttgttgtttgtttttgagatggggtctcaaaaaaaaaaaaaaaaaaaaattaccaaggtggagatcatgaaaatggcatgaatagtgtgggattttctctaagattgttgatattaattccattagactcttatgtgagtgaagacgaagacttcccctgagtaagttcagacagcttctgataacatttctacatcgattcctcaggatttaactatatattcttgaaaacatctcaattttaaatgtttctttcaagatggtgaattaaacagagatagcccttcaacaggttgaactcagcatatgctgagtctgaaatggaaatgatggagttagagaaccatacaacaatggtaatgatttcagaaatatggtgttgagcagaacaaagcagacacaaaagagtacctatggcatggcatgcatctgtatacgtgaaattccagaa

SEQ ID NO: 5304 - DNA, 363 bp, Homo sapiens
  misc_feature (1)...(363): n = a,t,c or g
gagcaacgctgctgtctgattgcatcattttcccaagcccatctgcccagctcatttctctgcatgcatacactggccccaacacccacacacgtgtgcatgcacacaggcacacatgtgcaagcccaaacacatcacacacatgcatgcacacacattgtgtactctcaggtacgcacccctgggtgcacacaggtgtgtgcgcgcgcnnnnnnnnnnnnnnnnnnnnnnnnnnnnnnnnnnnntcaggtacacacgccaggtccatgcattgcttcacactgcccagccccagaggctgaaggcctcagagcccacacctgcccagctacaacctggcaggcaggaggggctcactggttt

SEQ ID NO: 5305 - DNA, 859 bp, Homo sapiens
  SIMILAR (18)..(215): 711254mologous to Homo sapiens ubiquitous TPR-motif protein Y isoform,accession number AF265575,Smith-Waterman Score=241.
caagcactgccacctgggctggagtgcagtggtgcaatctcagctcactgcaacctctgccttccgggttcaagccattctcctgcctcagcctcccaggtagctgggatcacaggcacctgccaccatgcccagctaactttttgtattgtttttttttagtagagatggggtttcactatgttggccaggctggtctcaaactcctgacctcgtgatctgtgcgcctcggccccccaaagtgctgggagtacaggcgtgaaccaccgcgtccggctggggctgcttatttacatcccctagaaagagggattctccagctacacctcaccctcacttggaaggaccctcctcccagagagggagctgtggaaaaagcctgacctgccccacagggcagtaggtcgagcctggctggtgagcaaggaggtacggggatccctgaggcctcccacccagggcccagggagcctgcctgctgtgagcacttcctccagtcctgatggactcggctctgcccggagcccccggtctctgcacacacagctgactggagaaagccacttccatctcatggacagggacagaacaaggctgagggaggtgagcaatgcagccaggcccgggggctacaatggctgctggcaaaacccaccatctcagcaatagttcagcgcgaagggctgagaactgtgagaagcgaatcgcgacgtttattttgctcttccttagcctcttgtggcagatttggggcaaaacaacagattaaatcttgtgtacatatatttacatgtggatagacacactgcagaagaggtctctgttttgtaaactctaacgacagataactgcgaattcc

SEQ ID NO: 5306 - DNA, 338 bp, Homo sapiens
cgaaggtgtcacataggacagatacgaccagacatcatatcgcaggagatgacgaccggaaggagaccaccgcgtagcggcataatgaagcagtaggacctcgaccgcgccacatggaatcaaaccacgcaccacctttaccgcttactatgtaagtcatttagcttcttaggggctctctttccatatcttaaaaaaaaaggtttataagtatatgtgcatatacatgtatatatgcacacatacacacacgcatctcatatgaatgtatataaacagaccaagtctatatgattatcaattccttttctattatttgagtcaactagactcgtgcc

SEQ ID NO: 5307 - DNA, 363 bp, Homo sapiens
catttggcaaatgagattccattttcacattggtttgtgctgagcatataaatttcctgcgggccggccagcattggggatgtgtaattgattgcctgcattataataaacaagctgtgacaggtgatcattcatcatattccgctgaacgttccagcacaccagaaaacggaggaagagagggaacgcgcgagcaaggggagaggagaggaggaacctgggggaggggagggggtcggaaagaccgagtattcccgacagacagaaaaaccaggggaggggcgggggagggaatccgctgagcgggcgggggaaagtgaaagcaattactataattcttttgattatctaatttgttctttc

SEQ ID NO: 5308 - DNA, 415 bp, Homo sapiens
  SIMILAR (227)..(415): 1001254mologous to Mus musculus putative,accession number AK014268,Smith-Waterman Score=315.
  misc_feature (1)...(415): n = a,t,c or g
gagaatcgtccggaattanttggtggaagatttcgtgtggtaccaagcggcgcccaccctcagagcactacttccatctctgataggcttcgctgggtgcccgtcgctactccactcgccgctgataggccattcaaccgccgctctgcgcggcgccggctccgcccccgtcgggtgtttgtggtggggctgcggagtcgccgatcccgccggaagcgccaggacaatggggacccgggacgacgagtacgactacctattcaaagtggtgctcatcggggactcaggcgtgggcaagagcaacctgctgtcgcgcttcacccgcaacgagttcaacctggagagcaagagcaccatcggcgtggagttcgccacccgcagcatccaggtggacggcaagaccatcaaggcgcag

SEQ ID NO: 5309 - DNA, 508 bp, Homo sapiens
  SIMILAR (127)..(495): 481254mologous to Moloney murine leukemia virus reverse transcriptase,accession number M32803,Smith-Waterman Score=295.
attatttatgaaaactgcaatagtcatcatttaaagttatggaactgtgtccggaattggtgggttcttggtctcactgacttcaagaatgaagccgcggacccttgcgatgaagaacacattcatcccgatatatggtcaagagacaggaatagaggaaagttacagattcctctgaaaaatgttaaattaaaaacccctggggaagtagtaaagcgaacgcaatactctattcctttagaagccagggtaaatttaaaacctataattgaagatcttctttgtgatgggcttcttaaaccctgtatgtctccctataacactccaatactgcctgtaaagaagccagatgggtcatatcagttagtgcaagaccttagagctattaatcagatagtccaaactacacaccctattgttcccaatccttatgctattatcagtaggatctcatacagtcaccagtggtttacagtaatagatttaaaagatgcctctgggcttgtcc

SEQ ID NO: 5310 - DNA, 1044 bp, Homo sapiens
  SIMILAR (523)..(720): 1001254mologous to Mus musculus putative,accession number AK014268,Smith-Waterman Score=326.
atggagactgcaaccgagaaaggggacccagcgctgaggtccccggaaatggtcatttatgggcttggggggcgaccagggcagcgcgcgctgacctatgacgtcatcgggacgttaagcatcgtagcattacctggacgtagccccatttctcttcccggacagagcactacttccatctctgattggcttcgctgggtgcccgtcgctactccactcgccgctgataggccattcaaccgccgctctgcgcggcgccggctccgcccccgtcgggtgtttgtggtggggctgcggagtcgccgatcccgccggaagcgccaggacaatggggacccgggacgacgagtacgactacctattcaaagcacagtgcctgcaggccctgggctccaggcatctctcgactcctccacaccgttggcagccgcgttggtgcagcacccagggaaccggcgggaaggttgtgggggcagtcgtgggtggagtgtggggattcacagaacctcgccttcccgcccagtggtgctcatcggggactcaggcgtgggcaagagcaacctgctgtcgcgcttcacccgcaacgagttcaacctggagagcaagagcaccatcggcgtggagttcgccacccgcagcatccaggtggacggcaagaccatcaaggcgcagatctgggacaccgctggccaggagcgctaccgcgccatcacctccgcaactcagcctcctcccaagctccctgtgggtcctagccacaagctctccaacaattactattgcactcgcgatggccgccgggaatctgtgcccccttccatcatcatgtcgtcgcagaaggcgctggtgtcaggcaagccagcagagagggtgcctctgacagctgctgcaggaaacatggccaagtttgccctgaatcagaacctgcccggggggaaggggaaaccccagaaccagcagatgagaattcagacgccaataccatacggcgtggtagaacgtcaccagaacgtgaacacaccgtacacattccccatcacctaa

SEQ ID NO: 5311 - DNA, 772 bp, Homo sapiens
  SIMILAR (545)..(652): 691254mologous to Homo sapiens PRO1722,accession number AF119851,Smith-Waterman Score=123.
ccaccacaaacacccgacgggggcggagccggcgccgcgcagagcggcggttgaatggcctatcagcggcgagtggagtagcgacgggcacccagcgaagccaatcagagatggaagtagtgctctgagggtgggcgccgcttggtaccaccctcctcgccctcggtgtcctggagaaaggcggaaggaatgcggacctttttgaagtgacggacgcgccagcctatcaggggcgagctcaagagggcggggcggaagactgcaggaatgaaatggattgacagaccaaataactaatgagaggcttgattgagaacctacccgactatcagaggacctgtccgggaagagaaatggggctacgtccagacagaatctcgctctgttgcctgggctggagtgcagtggcactgttatcacggaattgagggggttcttggtctcactgacttcaagaatgaagccacggacccttgcggtaagtgttccagctcttaaggtggcgcgtctggagtttgtttcttctgatgttcagagatgggggttccaccatgttggcccggctggtctcgaactgctgacctcaagtgacctgcctgtctcggcctcacaaatggctgggattacaggcacgagacaccgtgcctggccctgggaacatgtttacatggactttgttcactttttaaaacaaactgagggtaacttactagatctgtgaactaaagaaagagaaaaaaaagaaagaaaacaaacaagaacaaagaacaaa

SEQ ID NO: 5312 - DNA, 1005 bp, Homo sapiens
  SIMILAR (5)..(145): 701254mologous to Homo sapiens Human secreted protein, SEQ ID NO: 7870,accession number AAG03789,Smith-Waterman Score=159.
ttttttgagacaggctcttgctctgtcgcccaggctggaatgcagtgctctgatcatggctcactgcagccttgccctcctgggctcatgggatcctcctgccttggcctctcaaagtgctgggattacaagtatgagccaccacaaccatccaaaattatttatttgaaaggggcattaactatggtacttctcagaagcatttataaaatatgggactcaaagctcctcctgattctccaatcacagctggttaatgtgaataaatcatgtgaattataaactatgaatgaaagagaagattatgtttttatgataaaatctgtgaaaaccatttatgatgaataaatctgaagaagatgggaattccatgctcattagtgatttgtcctaagagtttgtttatcagcatttaaaacttctaaaaagtatttcaagtttggtgtgacatagctgtgtgtatacccactgccaacttcatcttgggttattcctttattgagggatcaatgcatagataagatctggatggtgaatctgttctatcaagaacagtcaggactacatgggaaagacattacagtgatgtaatgtgtttattagtcactatctgaaatagcatgtgatggtaggaattataaccaattttcaacatgtttgtctaatttttttgtcacaaaagagaaaataggatatcgcaaggaaaataaggaaagcttcaaagacaaaaggtaatttaaaacatctgaaaatactcattcttttagaagctattcaatggtattgttcatattcagagcttgtctaattaatatttttggaaacaataaattcattttaatgggtttcaaggcaaattttcacagactctgaattagttgtttacattatagaaaaaaatcaaaaagaggactggaacagttggaagtctttggaaaaccttatctttttacgatacataatacacagcaaaataaattcaattgagattaaaaagtcaaacac

SEQ ID NO: 5313 - DNA, 972 bp, Homo sapiens
  SIMILAR (633)..(728): 591254mologous to Homo sapiens alternatively spliced product using exon 13A,accession number U22376,Smith-Waterman Score=104.
aggaaaactcctattttatgcgacaagccgtgcctatgtggaatctatctgttcgaataattttgacagtttcctacatgaaactcatgaaaacaaatacggaaaaggaatttactttgcaaaagatgccatctattcccacaaaaattgcccgtatgatgccaaaaacgtcgttatgtttgtagcccaagttctggttggaaagtttactgaaggaaatataacagtacacgagccctcctccacagttcgacagctgtgtggataccagatcgaatccctccgtttttgtcatctttcagaaagatcaggtttacccacaatatgtgattgaatataactgaagacaaagcctgcgtggattaggttaggaacccgtggaatacagcgtcagaaggatgccataaccattctgttcctttacagaactaaattgccccagacaggagttaaagttttatattttcctgctcagttatctaatgtcttagatcagtggtccccaaattttgctaccatattagaatcatctgggaggttttaaacaaattctgatgcccaggttgcaccccatgccaatgaaatcatttctgggcgtcagcgccaggcagttgtattttttttttttttttttttttgagactgaatctcactccatcgtccaggctggagtgcagtggcgcgatctcggctcactgcaacctctgcctcccgggttcaagcaattcttcctgcctcagcctcccgagtagctggaactacaggcacacactgccgcgcccagctaattttttgtattttttagtagagacagggtttcactgtgttgcccaggctggtctcaaactcctgagctcaggcaatctgcccgccttggcctcccaaagtgctaggattacaggtatgagccaccatgcccggctggcagttgtattttttaaagcccttctgtcgtcttctcgcacccgtata

SEQ ID NO: 5314 - DNA, 546 bp, Homo sapiens
tttttttttcttttttttcatcttatatataaagggttctccattagctaataaagtcccagaaaggctggctctcctgtaagggcagagcagtgttctgcctagtttcaaagcctcttcaagtggagagcttgacaccaggctgggcggggcaggcctggctgaggtgccctggtgtatatgctccccctggcttctggcctctggttcccacagtgctgaggcatggggtggccctgggatgactaggtggtccttctcgaggcacctggctcaccacttcctcttcctaatagtgagatgggctttgttccaaacagacctgaaatggtgtgccctcgatcaccaaccccatcaaaactgcaaaccaacaccagggcaagaagcaacaccccatccaaggtaatagaacggccccttctagctctgtgtcctacatgaaacgctgtgaactgcttcccaagggcactggtcttgaagtcgtaagggaatcaggctagtgagctgtcaccaggcactcattactctcatacatgtctggcctgt

SEQ ID NO: 5315 - DNA, 2228 bp, Homo sapiens
  SIMILAR (1)..(957): 981254mologous to Homo sapiens Na+/sulfate cotransporter SUT- 1,accession number AF169301,Smith-Waterman Score=1605.
atgggcctgctgcagggcctgctccgagtccggaagctgctgctggtcgtctgcgtcccgctcctgctgctgcctctgcccgtcctccaccccagcagcgaggcctcgtgtgcttacgtgctgatcgtgactgctgtgtactgggtgtcggaggcagtgcctctgggagctgcagccctggtgccggccttcctctacccgttcttcggagtcctccggtccaatgaggtggcggcggagtacttcaagaacaccacgctgctgctggtgggggtcatctgcgtggcggctgccgtggagaagtggaacctgcataagcgcattgctctgcgcatggtcttgatggccggggccaagccgggcatgctgctgctctgcttcatgtgctgtaccacgttgctgtccatgtggctgtccaacacctccaccaccgccatggtgatgcccatcgtggaggccgtgctgcaggagctggtcagtgctgaggacgagcagctcgtggcgggcaactccaacaccgaagaggccgaacccatcagtctggatgtaaagaacagccaaccttctctggaactcatctttgtcaatgaagacaggtccaacgcagacctcaccactctgatgcacaacgagaacctgaatggtgtgccctcgatcaccaaccccatcaaaactgcaaaccaacaccagggcaagaagcaacacccatcccaggaaaagccacaagtcctgacccccagccccaggaagcagaagctgaacagaaagtacaggtcccaccatgaccagatgatctgcaagtgcctctccctgagcatatcctactccgctaccattggcggcctgaccaccatcatcggcacctccaccagcctcatcttcctggaacacttcaacaaccagtatccagccgcagaggtggtgaactttggcacctgggttcctcttcagcttccccatatccctcatcaatgctggtggtcagctggttctggatgcactggctgttcctgggctgcaattttaaagagacctgctctctgagcaagaagaagaagaccaaaagggaacagttgtcagagaagaggatccaagaagaatatgaaaaactgggagacattagctacccagaaatggtgactggatttttcttcatcctgatgaccgtactgtggtttacccgggagcctggctttgtccctggctgggattctttctttgaaaagaaaggctaccgtactgatgccacagtctctgtcttccttggcttcctcctcttcctcattccagcgaagaagccctgctttgggaaaaagaatgatggagagaaccaggagcactcactggggaccgagcccatcatcacgtggaaggacttccagaagaccatgccctgggagattgtcattctggttgggggaggctatgctctggcttctggtagcaagagctctggcctctctacatggattgggaaccagatgttgtccctgagcagcctcccaccgtgggctgtcaccctgctggcatgcatcctcgtgtccattgtcactgagtttgtgagcaacccagcaaccatcaccatcttcctgcccatcctgtgcagcctgtctgaaacgatgcacattaaccccctctacaccctgatcccagtcaccatgtgcatctcctttgcagtgatgctgcctgtgggcaatccccctaatgccatcgtcttcagctatgggcactgccagatcaaagatatggtgaaagctggcctgggagtcaacgttattggactggtgaatagtaatggtggcccatcaacaccctggggagttagccctcttccacctggacacttacccagcatgggcgagggtcagcaacatcactgatcaagcctaacgcccaagtgtacaaactggcccaaccacaggagctgccagtatccagcagtatttggacccacaggcaaagaaaaccactaggaccacccaggagcacacaaccccagacccacgccggagggcatccctccaccagaagattccgccaccttcaagttgaactgcaggaattcttccaacaaccacaaacacatgcttcgctgttagtgtcttcttcctgccctcagcaccacagctcaagaaaacctaaagtttcaatacaagccataggctcacagaaaaagaaaaagaacctaacaattaaattaaaaaaaaagaagacaaaaaaaccctaaa

SEQ ID NO: 5316 - DNA, 907 bp, Homo sapiens
  SIMILAR (204)..(566): 1001254mologous to Homo sapiens Unknown (protein for MGC:13198),accession number BC005105,Smith-Waterman Score=620.
cgtcgacaaaaaaagaaaataaagaagtacaagagtataatcccttcatgacagtacagctgactcaatccggaccacgtgtcaaggtgtaatctcgaccttgaaagctcattatctgagaaggacttttcagcacatcctagaagcagcggatggtgaggacccaagttatatcaagggaattttggagaaactacagcatcatggatgctgtggacatggccatcgcatgggaggagctcaaaccagcactaatgaacagcatgtggaagaagatttggcctgagtgtgttcaggcccagcgtttttcccaggcagataacattgcacagcttcaaaaaaacattgtgacccttgccagaaatgtggcctttgaagaggttgctgaggctgctgtggaccagttgctgcagtcccatgaagaagatctctcaaatgaggaactgatgcggctggaacaggagctggcagtgggggaggaggagagggaagatggtccctgggcactgtggcagctaaccacaggaagactgtcggcagccctctcacattttgaggctggcttgtaggtccttgctagtaacagccctaatgatgactggaaactgagaggttccagaaaaatcagtgttgcaagtaaactgctagcaggagctgtacaatgagaaaaagcgccactcaaaacaactctcttaggtcatttttcaatgtgtgtaaccaaaagttaatcagaataaagcggaagcaccatgatgacctcaacagtggaggcccagccaggcctccctgctctgtggtgttggacatccctggaaaccttgctgttggtatttccattttgatacttgagagcatcaaattttgtcattaaaatgttatttaaatatatgcttttaaaagctcaaaa

SEQ ID NO: 5317 - DNA, 412 bp, Homo sapiens
  misc_feature (1)...(412): n = a,t,c or g
ctaaaatatttactacctgcccttttacaggaaaagtttgtttacctgatcaaaagggataggacatcgagcaaaagttttcctgttatggnnnnnnnnnnnnnnnnnnnnnnnnnnnnnnnnnnnnnnnnnnnnnnnnnnnnnnnnnnnnnnnnnnnnnnnnnnnnnnnnnnnnnnnnnnnnnnnnnnnnnnnnnnnnnnnnnnnnnnnnnnnnnnnnnnnnnnnnnnnnnnnnnnnnnnnnnnnnnnnnnnnnnnnnnnnnnnnnnnnnnnnnnnnnnnnnnnnnnnnnnnnnnnnnnnnnnnnnnnnnnnggccctattttttaaagtacagtatttaaaaagaattttattcctttagtttttggcccaccatgtgcatgggggactgtgctgtgtgccacaaagggt

SEQ ID NO: 5318 - DNA, 851 bp, Homo sapiens
  SIMILAR (27)..(365): 831254mologous to Mus musculus putative,accession number AK006369,Smith-Waterman Score=486.
cccacgcgtccgcccacgcgttcgggcagctttcatgtgtatccaagttaatgagggatgtgtgtgggcagccctgcttcagtccccgtggcatggtccatacctgcagtgggggaaaaggaagtattccagaaggaaattcatcatggcagataaaagaaaaggtatggcgatttagtactgcattttgttctgttaatgaatggaaatttgctgacatcctaagcatggcagaccacttgaagaaatgcagttacaatgttgtcgagaaacgggaggaagcaatccctttgccatgtatgtgtgtgacacgagaactcactaaagaaggacgttcactacgctcagttttaaaacctgtactttaaaagttgtaatattactagcacatatattgcaagcacctagtataattcctttgtaatatgtgaaactttattaatgtattaaatattacaactagctaaatttattgtcactgtgtatataatgttttgaagtgacatctatttttataaagtactgtttagttggaaaaagttgccttaatgtttgaaatgtgtgaaatttttggaacttgctggacagggtgatttaatttttagctacataattttaagaattagtattttcagtggtgtgcatattttggttcttaaatttttgcttcttaaactaaaaaaatcctgaccaatttatttgttgttttctgtgggttgcgacccatgcaatcaaaaagcaaaattttgattgagatttttttacagcataggtttttcatataaaaatattctgaatttgttaagcactgccataatatcattataatgtttttgtcttttagtgcttcc

SEQ ID NO: 5319 - DNA, 435 bp, Homo sapiens
  misc_feature (1)...(435): n = a,t,c or g
nnnnnnnnnnnnnnnnnnnncctagtcaaaaatttactacacatactcagtagcggaaaaacatatcccataagcagaggacaaatcacagatgctcctcgacttacgatggagctacatccgaacaagctcatcgtcggccgacagatcgcacgcaagtggtccacggatcgcacataagtggtccacagtcgacagaaacagacctagatatgacagtaataatgaattagcagaaaaggaacaattatcttaaatttgctccatatgctcgagggtattttttaaagcatgattatgattaaaagagaaatggaagacactggtgtgctttttttttttttttttttttttgagaccgtcactctgtcacaaaaaaaaaaccagatacaatgaccaaattttcttcatcaattaaagaggtagaacaaagtc

SEQ ID NO: 5320 - DNA, 578 bp, Homo sapiens
  SIMILAR (267)..(85): 601254mologous to Homo sapiens Human secreted protein, SEQ ID NO: 7492,accession number AAG03411,Smith-Waterman Score=183.
acattccttggactttgttctacctctttaattgatgaagaaaatttggtcattgtatctgggcgacagagcgggaatctgtcttaaaagaaaaaaaattggccgggtttggtggcacgtgcctgtggtcccggctgctcggggggctggggtgggaggatcgcttgagcctgggagtttgaggctgcagcgggccgtgattgcgctactgcattccagcctgggtgacagagtgacggtctcaaaaaaaaaaaaaaaaataaagcacaccagtgtcttccatttctcttttaatcataatcatgctttaaaaaataccctcgagcatatggagcaaatttaagataattgttccttttctgctaattcattattactgtcatatctaggtctgtttctgtcgactgtggaccacttatgtgcgatccgtggaccacttgcgtgcgatctgtcggccgacgatgagcttgttcggatgtagctccatcgtaagtcgaggagcatctgtgatttgtcctctgcttatgggatatgtttttccgctactgagtctgtgtagtaaatttttgactaggaaa

SEQ ID NO: 5321 - DNA, 556 bp, Homo sapiens
  SIMILAR (491)..(556): 681254mologous to Homo sapiens WD repeat protein,accession number AB039887,Smith-Waterman Score=79.
tttcgtctggccacctccatagcaagcagtgatgatgacagcctcttcatctatgactgcagtgctgcagaaaagaagtcacaagaaaataaaggggaggacgcgcccttggaccaggggagcggtgcgattctggcgtccaccttctccaactctggcagctatttttgctttaaccgatgacagaccgtggcaaggaggtgtacagccctgactttcatagcctcggaggagaaggtcttggtggccgacaagtctggagacgtctactccttttcggtgctggagccacacgggtgtggccgtctagagctggggcacctgtctatgctgttagatgtggctgtgagtcctgatgaccgcttcatcctcactgccgaccgggacgagaagatccgagtcagctgggccgcggcgccccatagcatcgagtccttctgcttggggcacacagagtttgtgagccgtatctccgtggtgccaactcagcccgggctgcttctgtcctcctctggggacaggcaccctgaggctctgggagtacaggagcggccgc

SEQ ID NO: 5322 - DNA, 1490 bp, Homo sapiens
  SIMILAR (13)..(255): 901254mologous to Homo sapiens WD repeat protein,accession number AB039887,Smith-Waterman Score=351.
gcgggcgggtacatggcgggctctgtgggactggcgttgtgcgggcagacgttggtggtgcggggcggcagccgattcctggccacctccatagcaagcagtgatgatgacagcctcttcatctatgactgcagtgctgcagaaaagaagtcacaagaaaataaaggggaggacgcgcccttggaccaggggagcggtgcgattctgggcgtccacctttcctccaactctgccagctattttgctttaaccgaatgacagtaagcgtctgattcttttccgtacaaaaccatggcaatgtctgagtgtcaggaccgtggcaaggaggtgtacagccctgactttcatagcctcggaggagaaggtcttggtggccgacaagtctggagacgtctactccttttcggtgctggagccacacgggtgtggccgtctagagctggggcacctgtgtatgctgttagatgtggctgtgagtcctgatgaccgcttcatcctcactgccgcccgggacgagaagatgcgagtcagttgggccgcggcgccccatagcatcgagtccttctgcattggggcacacagagtttgtgagccgtatctccgtggtgccacactcagcccgggctgcttctgtcctcctctggggacggcaccctgaggctctgggagtacaggagcggccgccagcctgcactgctgtcaccgtggccagtctgcaggagctcggtggacccccaggccccccagaagtttgccgcgtccaggattgcattctggtgccaggagaactgcgtggcgctcctgtgcgacggcactccatgtggtctacatcttccagctggacgcccgcagacagcagttggtgtacaggcagcagctggcgttccagcaccaagtgtgggacgtggctttcgaggagacccaggggctgtgggtgctccaggacttgcaagaaagcccccctggtgctcttacaggcatgtgggcgaccagtggcagtctgttcctgagagcaccgtgttaaagaaagtctctggtgttcttcgtggaaactggcccatgctggaaaggctttgccggcgcagacgccagctttcagcagtctcttacaaggcccacgttccgacaacgtgaacctcctacctgaagaagaaagaggagaggctgcagcagcagctagagaagaagcagcggcgccggagtccccccgcttgggcccgcgggccatgccaagaagatgagaccgggggaggcgacgctaagttgctgatcgtggcggtctgtttctgtcgactgtggaccacttatgtgcgatccgtggaccacttgccgtgcgaatctgtccggccgacgaatgaacttgtttcggatgtaactccatccgtaaatccgaggagcatctgtgatttgtcctctgcttatgggatatgtttttccgctactgagtctgtgtagtaaatttttggctaggaaaaaaaaaaaaaaaaaaa

SEQ ID NO: 5323 - DNA, 391 bp, Homo sapiens
  SIMILAR (1)..(363): 901254mologous to Homo sapiens Human TANGO 239,accession number AAB01426,Smith-Waterman Score=599.
  misc_feature (1)...(391): n = a,t,c or g
gcccccatggctggctgcctgtctttttattacttgatccagcaggggaangacaaggggttttccctttacactcgggatggggctggcctttacaaggaaatctggaaagcagacaggccagggaatgctgcctggaaccttgcggagggcgagttcaatgctccttaccccatggaggttatttttgaagatgctttcaatggtcccaagggaggttatgttgccctggatgatatttcattctctcctgttcactgccagaatcagacagaacttctgttcagtgccgtggaagccagctgcaattatgagcaagatctctgcaacttttaccaagataaaaaaaggccagggtggaccccgagtgaaaggaaaaccaaacatgttg

SEQ ID NO: 5324 - DNA, 1460 bp, Homo sapiens
  SIMILAR (993)..(1436): 541254mologous to Homo sapiens p40,accession number U93567,Smith-Waterman Score=410.
agaaacttccacctccacctggagagtgtactttcgagcaagatgaatgtacatttactcaggagaaaagaaaccggagcagctggcacaggaggaggggagaaactcccacttcctacacaggaccaaagggagatcacactactggggtagttgtttccagccaccttgctagtgagtgtccatttggcctcaatagtgatgcactcctgcctaagaagatatgcagcttggtcctactgctgacctcttttcttgctgcttcagcagattctgggacaatgttgcttcggtggggctgcttaaagtccaagatcaagatgtcggtagggttggttccttctgaaatttctctccttggcttgcagatggctgccttcttgcttcacatggcctttcctctgtgccagtgcacccccgatatgtatcttcttctgactgtgggtaaccgaaaccatggaaggcaaaaacagataaagggggcactactatattggacatttaccacgtgtaggcactgcgctaggaacctcaacatcctttccacaacctgtaaggacaaagttggagaatttgctaaactcagcaaaattgaactcctcgaagccactgaaaagtcaattggtcccccagaaatgcacaaatatcactgtgaactcaaaaacttaagggagaaagaaaaacagctcgaggatttattggctaccaaaattgcctctaaggttgctaaactgggaatcctactagggatgccaactttggaaattgggggaaaagagggtgggggttggggtactggatattggcttagagcagaaaaggaggatggagattatttgtgtatagaagggagtgaaggactgaatactgagaaaatagtgcctgtgatgcaagaaaggaacagtatcaacatcaataaaaaggacgtccactcagagaccccagccaaaggtcaccaacttcaaagaccaaaggtagataaatctatgaagatggggagaaaccaacacaaaaaggctgaaaattccaaaacccagatcacatcttctcctccaaaggatcccaaatcctcgccagcaagggaacaaacatgtatggagaacgagtttgacaagttgacagaagtaggcttcagaaggtgggcaataacaaactcccccgagctaaaggaggatgttctaacccaatgcaaggaagctaagaatcttgaaaaaaggttagacaaattgctaactagaataaccagtttagagaaaagcatgaatgacctgatggagctgaaaaacacaggacgagaactttgtgaagcatacacaagtatcaatagccgaatcgatcaagtggaagaaaggatatcagagattgaagatcaactcaatgaaataaagcaagacgacaagattagagaaaaaagagtgaaaagaaacaaacaaagtcccaagaaatatgggactctgtga

SEQ ID NO: 5325 - DNA, 396 bp, Homo sapiens
  SIMILAR (1)..(153): 961254mologous to Homo sapiens Human TANGO 239 (form 2),accession number AAB01432,Smith-Waterman Score=263.
atgtatggagggggcactggcctgctgagtgtttatctgaaaaaggaagaagacagtgaagagtccctcttatggaggagaagaggtgaacagagcatttcctggctacgagcactgattgaatacagctgtgagaggcaacaccagctactgcgtgtaaagtatactgcaatgggacaaggagactttgggggctgctgcagtagccctggcaagaggagtgatggcttaggctatgcagcagagataatttttgaagccattcgaggagtatcaataagaagtgatattgccattgatgatgttaaatttcaggcaggaccctgtggagaaatggaagatacaactcaacaatcatcaggatattctgaggacttaaatgaaattgagtattaa

SEQ ID NO: 5326 - DNA, 1140 bp, Homo sapiens
  SIMILAR (241)..(498): 981254mologous to Homo sapiens Human TANGO 239,accession number AAB01426,Smith-Waterman Score=462.
atgaaaagaaaacatgttccaattgatgacaaaatgttgcaacagaaagcattgagactacatgaagacttcagcaagggatcccctgaaacaagtgacaccaagccatttactgcaagtccagagcaactgcagagctcagaaatttctgctcaaaagggaggggatgaggttacatggcagtttccttcctctacctcttccatgagtggttcgcttaagccccctcctttagatcaaggccactacatgtacgtggactcagtttatgtgaagcacttccaggaggtggcacagctcatctccccgttgaccacggcccccatggctggctgcctgtcattttattaccagatccagcaggggaatgacaatgtcttttccctttacactcgggatgtggctggcctttacgaggaaatctggaaagcagacaggccagggaatgctgcctggaaccttgcggaggtcgagttcagtgctccttaccccatggagcccttcccccttggcaaagacaaacttctaggcttccccgtggattttggagagtttaggtaccaggtccttatgggaccattactgttaaggttattaactcacacaagaggaatgcatacctgggtggtttttccagcacaggtgaaggctgtgctgacatctgattcccccatggtcacaggcagaaggtggttgactgagctcacagttaaagttgctggtagagaagaaagcaaaactaaaggggttatttttgaagttgctttcaatggtcccaagggaggttatgttgccctggatgatatttcattctctcctgttcactgccagaatcagacagaacttctgttcagtgccgtggaagccagctgcaattttgagcaagatctctgcaacttttaccaagataaagaaggtccaggttggacccgagtgaaagtaaaaccaaacatgtatcgggctggagaccacactacaggcttaggtaaatcagagatctgtctatgtggggacatcttgggtagtcgtgagctttattggccattcctacttcacacctgcaaagacatcgacttaaagaaaaaaggcagctgtgaagaagcaaagacaatcagtagtcttgtgtttgaccatttttaa

SEQ ID NO: 5327 - DNA, 2754 bp, Homo sapiens
  SIMILAR (854)..(1720): 991254mologous to Homo sapiens Human TANGO 239 (form 2),accession number AAB01432,Smith-Waterman Score=1547.
atggcggaaacagcggttatcaatcacaagaaacgtaaaaatagcccgcgaatcgtccagtcaaacgacctcactgaggcggcatatagtctctcccgggatcaaaaacgtatgctgtatctgttcgttgaccagatcagaaaatctgatggcaccctacaggaacatgacggtatctgcgagatccatgttgctaaatatgctgaaatattcggattgacctctgcggaagccagtaaggatatacggcaggcattgaagagtttcgcggggaaggaagtggttttttatcgccctgaagaggatgccggcgatgaaaaaggctatgaatcttttccttggtttatcaaacgatgcgcgacggcggtggggagacagcgaacgcacgcggacaaagagcgaggggcgcgagaaaagggaggagaaaaaaaagcgaaagcgaaaaaaactagcgggacgcgaaaaagaggaggggggagagagaggaagaagaagggggaacaggagggcaaggatgggcagagaaacgcacaaaccaagggagagaaacgacaaccgcacaaagcgaacaccccgccgaaaaccttacagcagcgaaaggaaaaaaagacgggagatagtcacagaaggaaaaaaaagctgtttaaagagagtgagaaagtgttatcccaggaatgggagcatgattttgtcattgagaccatggccactggagcaagaccacaacttctgttcagtgccgtggaagccagctgcaattttgagcaagatctctgcaacttttaccaagataaagaaggtccaggttggacccgagtgaaagtaaaaccaaacatgtatcgggctggagacccacactacaggcttagggtattacctgctagccaacacaaagttcacatctcagcctggctacattggaaggctctatgggccctccctaccaggaaacttgcagtattgtctgcgttttcattatgccatctatggatttttaaaaatgagtgacaccctagcagtttacatctttgaagagaaccatgtggttcaagagaagatctggtctgtgttggagtccccaaggggtgtttggatgcaagctgaaatcacctttaagaagcccatgcctaccaaggtggttttcatgagcctatgcaaaagtttctgggactgtgggcttgtagccctggatgacattacaatacaattgggaagctgctcatcttcagagaaacttccacctccacctggagagtgtactttcgagcaagatgaatgtacatttactcaggagaaaagaaaccggagcagctggcacaggaggaggggagaaactcccacttcctacacaggaccaaagggagatcacactactggggtaggctactacatgtacattgaggcctcccatatggtgtatggacaaaaagcacgcctcttgtccaggcctctgcgaggagtctctggaaaacactgcttgacctttttctaccacatgtatggagggggcactggcctgctgagtgtttatctgaaaaaggaagaagacagtgaagagtccctcttatggaggagaagaggtgaacagagcatttcctggctacgagcactgattgaatacagctgtgagaggcaacaccagataatttttgaagccattcgaggagtatcaataagaagtgatattgccattgatgatgttaaatttcaggcaaggcctctgtggagaaatggaagatacacctcaacaatcatcaggatattctgaggacttaaatgaaattgagtattaagaaatgatctgcatttgtttttactatacaaaaaccatacctctctttaatcaaaatgaaaacaaagcaaatgaatactggacagtcttaacaattttataagttataaaatagactttaaagcaccctccttcattacttttgcaaaaacatactgactcagggctcttttttttctttttgcatatgacaactgttactagaaatacaggctactggttttgcatagatcattcatcttaattttggtaccagttaaaaatacaaatgtactatattgtaggcattttaaagtacacaaagggcacaatcaaaatgagatgcactcatttaaatctgcattcagtgaatgtattgggagaaaaataggtcttgcaggtttccttttgaattttaagtatcataaatattttttaagtaaataatacggggtgtcagtaatatctgcagaatgaatgcagtctttcatgctaatgagttagtctggaaaaataaagtcttattttctatgttttattcatagaaatggagtattaatttttaatattttcaccatatgtgataacaaaggatctttcatgaatgtccaagggtaagtcagtattaattaatgctgtattacaaggcaatgctaccttctttattccccctttgaactacctttgaagtcactatgagcacatggatagaaatttaacttttttttgtaaagcaagcttaaaatgtttatgtatacatacccagcaacttttataaatgtgttaaacaattttactgatttttataataaatattttggtaagattttgaataatatgaattcaggcagatatactaaactgcttttatttacttgtttagaaaattgtatatatatgtttgtgtatcctaacagctgctatgaaattataaaattacctaataaaaataatttgaaaatcttaaaaaaaaaaaaaaaaaa

SEQ ID NO: 5328 - DNA, 980 bp, Homo sapiens
  SIMILAR (786)..(595): 571254mologous to Homo sapiens Human secreted protein, SEQ ID NO: 4718,accession number AAG00637,Smith-Waterman Score=176.
tactttttaaaaggttgaattttatggtacataattacatctcaataaagctattattttaaaagtattctatatgtaagtgtatatacatgtataaatatgcaaacacacattttatgctaattcagagattgacatagttttatatctacttaaattttttttaggattctaaaatattaacatgcaagaacatactgggaatatcacaagaactagtttgatagaactgatatagtctatcaaacctgaaagactttaaaacctgaaagctccgttgaaatcagcaacttttaaatcctagaaaacagtggccaatctccctctctcctgagtgagcttaactcctaatttcaatgtccatatttgtatggaatcaagaaagcctccaaattagctggtgcatctccaaccacacgaatagtgggagccgcatcttttccaccctcatcacctttgtggcacacagcacagtcccccatgcacatcgtggaccaaaaactaaaggaataaaattctttttaaatactgtactttaaaaaatagggccacagcccgggcaacatagcaagactctgtctctataaacaataaaaaaaaaattggccaggtgtggtggcacgtgtctgtggtcccagctacttgggaggctgagatgggaggattgcttgagtgcaggtagttgaggctgcggtgagctgtgatcataccactgcactccagcctgggtgacagagcgagaccttgtctcaaaaacacaaaaaaatagggccataacaggaaaacttttgctcgatgttctatcccttttgatcaggtaaacaaacttttcctgtaaaagggcaggtagtaaatattttaggcttcatggacaaaactgtttctgacacaactacttaactctgttcccataacacaaggcagtcatagacaatatataaacaaatggacgtaaaacaaatgatctgctgagaacctca

SEQ ID NO: 5329 - DNA, 396 bp, Homo sapiens
  SIMILAR (174)..(353): 1001254mologous to Homo sapiens sentrin-specific protease,accession number AF151697,Smith-Waterman Score=333.
aagaaataaaaagcaaggctatccagcatttcatgtattcagtactttcttctatcctaaatgaaagtctgggggttaccaagcagtgaaacgatggaccaaaggggtaaatctctttgaacaagaaattattctggtgcctattcatcggaaggtacattggagcctggtgtcagtatttacaggatgaaagtaagaccaaaagaaatagtgatctgaatcttttagagtggacccatcacagcatgaaaccacacgagattcctcaacagctgaatgggagtgattgtggaatgtttacttgtaaatatgcagattatatttctagggacaaacctatcacatttactcaggtgagtgaagaccctcttcatccatttacttgttactaagcaa

SEQ ID NO: 5330 - DNA, 1805 bp, Homo sapiens
  SIMILAR (380)..(487): 1001254mologous to Homo sapiens sentrin-specific protease,accession number AF151697,Smith-Waterman Score=200.
catgaatcttctggtggaaagaaataaaaagcaaggctatccagcacttcatgtattcagtactttcttctatcctaaattaaagtctgggggttaccaagcagtgaaacgaatggaccaaaggggtaaatctctttgaacaagaaattattctggtgcctattcatcggaaggtacattggagcctggtggtgattgacctaagaaaaaagtgtcttaaatatctggattctatgggacaaaagggccacaggatctgtgagatgggtccttgggtatttacaggatgaaagtaagaccaaaagaaatagtgatctgaatcttttagagtggacccatcacagcatgaaaccacacgagattcctcaacagctgaatggggagtgattgtggaatgtttacttgtaaatatgcagattatatttctagggacaaacctatcacatttactcagcaccagatgcctctcttccggaagaagatggtgttggggaatccttcattcagcagttgctgttgaggaaaactttgcctggtccctctagctgctggtgggttctttcacagacatttccatatacctcatgcattgtgggttaaaaagtccctgcatcacttctgttctcacaggtactgagctgtcaaaagtgcatgaaggcctctcactgttactctagtcctgacttggggtgcagagggctgcttgcaatcctgtttgtaaaggctgtgcctgctcagagctttggactgttcaacccacacaagaacaaacgctaactaatattttttttaagagattcttttccctatgaatgtgggaaatgcaggatttatcctgtgaatcgggtgtttctgagagtaggctaagcgaattgattcactcactcgtttgcaaacataatgggcaggggtcatttactgctgctcttttacagtgagctctaaattacttgtttgaactatatatttctgaaaggaatgttactcaagctgccactccctggtggaaaaccaggagggaactctcactggggccgaaagataatggaccttgaaccataactggccacaatgaagctggagggtttgggattttttttgtttttgtttttttgaggctcaaaaaatgctgggagaaatgaaaatgctgtgggatagggctcctgttgcctttgcagaggaagtctgacactacagcgttggcacagtgccgtgaacagtggaactgtgcccaagggacttctgattatccaagcatcttccgaagagtggtgtggccaccttaaagagaactccctttctgggaaagggggggattgggcttaagccttgaaattggaattcatggatttgaagtaactgtaaaccctaaatcttcattttcatcccacatctggttgagtataaaccctcagaaattgtaggggctggccctgagcctgtttatttccaaaagatacctattcaatttaaagcctatttttccctcagagtttttgttttctatatattaagtcctaaattaagttttcctacctcattaagacctaacattttcgcccactcccatcccccactgaaatttgtggaagaaaatttagtacttggcctctgaggttgcccagttatacaataatcctattttgcatatgaaagtttgtatttaacttttttgttcattaaaaaccttactgatatggttataacttcagacagtttagagttggtcagaacatattttgcaagatctagtggcagaccaccttttattacatcagaaaagcaacactaggcactaggtcgac

SEQ ID NO: 5331 - DNA, 424 bp, Homo sapiens
  SIMILAR (110)..(253): 851254mologous to Mus musculus Similar to RIKEN cDNA 0610030G03 gene,accession number BC005702,Smith-Waterman Score=213.
tcggtgggggtgtcttaacactactggtggaagtcagcaacatcttcctcaccattcgcatgatgatgaaaatcagtaatgcccaggatcatctcctctaccgggttaacaaaggaccctgggcaccttcctgctgggtatcctgctcatgctggacgtgatgatcataatctacttttcccgcctcctccgctctgacttctgccctgagcatgtccccaagaagcaacacaaagacaagttcttgactgagtgaggggcacagagcctgggacaacaaaaacggacaaggccagaaacagcttcatatggacactgggacttagccccaagcctgggtgtcctctgaggccagcctctcccccttttgagcctgcgcccacactattgaaaacactaatgaaagtaaaaaaaaaaaaaaaaa

SEQ ID NO: 5332 - DNA, 833 bp, Homo sapiens
  SIMILAR (9)..(227): 871254mologous to Mus musculus Similar to RIKEN cDNA 0610030G03 gene,accession number BC005702,Smith-Waterman Score=358.
  misc_feature (1)...(833): n = a,t,c or g
gcacgaggcgcgccgaccccctgcgcacctggcgctggcacaacctgctcgtctccttcgctcactccattgtgtcggggatctgggcactgctgtgtgtatggcagactcctgacatgttagtggagattgagacggcgtggtcactttctggctatttgctcgtttgcttctctgcggggtatttcatccacgatacggtggacatcgtggctagcggacagagcgcgagcctcttgtgaataccttgtccatcacgtcatggccatgggtgccttcttctccggcatcttttggagcagctttgtcggtgggggtgtcttaacactactggtggaagtcagcaacatcttcctcaccattcgcatgatgatgaaaatcagtaatgcccaggatcatctcctctaaccgggttaaacaagtatgtgaaacctgggtccatgtaccttttctcttcacgcctggcaccctcaggccctaccctcaacccatttcttctttgcgttatgtgaaccaggaggaccctgggcaccattcctgcttgggtatcctgctcatgctggacgtgatgatcataatctacttttcccgcctcctccgctctgacttctgccctgagcatgtcccccaagaagcaacacaaagacaagtttcttgactgagnnctgagtgaggggcacagagcctgggacaacaaaaacggacaaggccagaaacagcttcatatggacactgggacttagccccaagcctgggtgtcctctgaggccagcctcctccacccttctgcagcctgcgcccacacatattgaaaacactaatgaaagtaaaaa

SEQ ID NO: 5333 - DNA, 400 bp, Homo sapiens
  SIMILAR (400)..(200): 951254mologous to Mus musculus putative,accession number AK014046,Smith-Waterman Score=362.
ttttaatgttaaaaatatttattttttttcctaaaagatcacacaaaagtcgggaagagaaggatgtcaattagactacatcaaaatctgggcagagggaggacaaagagctgcctaaagaaactggtagctggagcaaactgcagagatcaagatgaccctagtccacggaaccagcagcccaggtcagccacattcaggccttctcccaatcgctgccattgaattcctcagtgaccatactccgcacagtgccctcatccaggcagtggggggcaattccgaagcctccggggtttgatcgtggagtatagaagctctgaacgccacatctcttacagaaggtatgctgggctttgtgagtattgaacgtgtaagtcgttatgtgctcagctccctt

SEQ ID NO: 5334 - DNA, 1120 bp, Homo sapiens
  SIMILAR (88)..(828): 401254mologous to Mus musculus putative,accession number AK014046,Smith-Waterman Score=356.
atgcggcgatcgaggagctctgcggccgccaagctgcgcgggcagaagcggtccggggcctccgcggcccccgcggcctccgcggccgctgccttggcacccagcgccacccgcacacggcgctccgctagccaggccgggagcaagagccaggcggtcggagaagccgccgtcggagaagccgcggctgaggcgctcgtcgccgcgggcccaggaggagggcccgggggagccgccgccgcctgagctggcgttgctcccgccaccgccgccgccgccgccgactcccgcgaccccgacgtcctcggcgtccaacctggacctgggcgagcagcgggagcgctgggagacgttccagaagcggcagaagcttacctcgaaagggtgccgccaagctcctgctagacacctttgaataccaagggcctggtgaaagcacacaggaggctgccacttgtggaagcagttcgtttttgaaagttttgggcctcagcagactttgcatatatttgactgcaattgcagcattttgcaagaagaagcagaatagacacttcattgttccagcttctcgcttcaagctcctgaagggagctgagcacataacgacttacacgttcaatactcacaaagcccagcataccttctgtaagagaatgtggcgttcagagcttctatactccacgatcaaaccccggaggcttcggaattgccccccactgcctggatgagggcactgtgcggagtatggtcactgaggaattcaatggcagcgattgggagaaggccatgaaagagcacaagaccatcaagaacatgtctaaagagtgagcttctggcctctcctgccctgaaaaggaggaatgattggggccagcaactttgctctccctgccgtgcctcggtggtgctcctgaatgtggctgacctgggctgctggttccgtggactagggtcatcttgatctctgcagattactccagctaccagtttctttaggcagctctttgtcctccctctgcccagattttgatgtagtctaattgacatccttctcttcccaacttttgtgtgatcttttaggaaaaaaaataaatatttttaacattaaaaaaaaaaa

SEQ ID NO: 5335 - DNA, 1213 bp, Homo sapiens
  SIMILAR (75)..(293): 281254mologous to Mus musculus putative,accession number AK014046,Smith-Waterman Score=55.
gcggccgctgccttggcacccagcgccacccgcacacggcgctccgctagccaggccgggagcaagagccaggcggtggagaagccgccgtcggagaagccgcggctgaggcgctcgtcgccgcgggcccaggaggagggcccgggggagccgccgccgcctgagctggcgttgctcccgccaccgccgccgccgccgccgactcccgcgaccccgacgtcctcggcgtccaacctggacctgggcgagcagcgggagcgctgggagacgttccagaagcggcagaagcttacctccgagggtgccgccaagctcctgctagacacctttgaataccagggcctggtgaagcacacaggaggctgccactgtggagcagttcgttttgaagtttgggcctcagcagacttgcatatatttgactgcaagtaccggaattatatatgaataataagcacatacgatggaattactcaaatggagaactgaccaggctactaacaatagagtccagattggaaaagaagcactgtggaataacttgtgagaggattctgtgctaaattagaactttttcaaaggtggcctgaaaagaggggacttcagtttaattccagagatggtaattctggggacgtgttttacttggagctggacttcttgtgacgtggtgatgaagaaagagggaaacctaaacttccttgtccatttttggtgtggatgtctcagagacatcaggttgtagcagcgtctgaaatttgtttcctaagtgtctctgaagtccagcgcttctcttcactgtaaagaactgaggggtgggcagtacagacctgtctgttggtcctgtgttctgagcaatgcacaacctcgactgctgacttggcacccccctgggctctgctgtacctgcaaaccacaggcactgctatccaggcctttgccccagctcctcggccctggatggtgcagaaaggggcatcatctgtggggacggctggctctcatggctgcgccgctcacgcatagaggatgcacgtggctgctcacaatctggaatttgctctgtctttctgtaggtgcagcatttgccataagaagcagaatagacacttcattgttccagcttctcgctataagcttctgaagggagctgagcacataacgacttacacgttcaatactcacaaagcccagcataccttctgtaagagag

SEQ ID NO: 5336 - DNA, 1681 bp, Homo sapiens
  SIMILAR (82)..(312): 641254mologous to Homo sapiens Human secreted protein sequence encoded by gene 112 SEQ ID NO:282,accession number AAB56188,Smith-Waterman Score=256.
  misc_feature (1)...(1681): n = a,t,c or g
ttttttgatggagtctcgctctgtcaccaggctggagtgcagtagcacaatcacggctcactgcaatctctgcctcccggtttcaagtgattctgctgtctcagcctcccaagtagctgggactacaggcatgcgccaccacgcccagctaatttttgtatttttagtagagacggggtttcaccatgttggtcaggatggtctccatctcttgacattgtgatccacctgcctcggcctcccaaagtgctgggattacaggcatgagccactgcacccagccttgaatttttaattttatctctgatatacttcattaagtgtctggagacctaattatcctaaaagatcatacattttctacctatgaattttgctgcatacagaaagtgccctttcctcaggaagttgctgtggtttcattttctttgggatggattcttatctagaataacatagcagctctgcaaagggaccagtttttaaaaatgggaactttctaacattgaaaagtccccatttttgtgccaactatgattagtgagaggaagaaatcttattctatgggcatatgtatggaagggtgtaaagatcccttttgaaaggtttattcacattgtaggaacagcaaatgacatttttacagtatttttttgtaaaggcaaactattttgtgccttggaatttgggtatatgtgtattagtgaaacattgtaaaggtgaacttctacctctgtatcctaaatgtataccatccacttgtaaatgactataaactattatgtgattgcttttttttttagaatgtcttgtttaaatagtggccaatgtttaaggctgttaaaataagccaacttttactaattggggagttttataaatgactgattaaatttaaagaattaacttacatgcaattgtgtgattattagttatcagcagtgttgtaaggaaaattattgtgtttttttttatgatcattatcccactttaggtaaagaaaaatattggaatgggaatagtgttgggaaacagacattaacaacctagggtgcctgcactcaaatagccgatgttactgtccctagattagagacttgattaagggcttgtttgtaccaaaagttggggaaacaatgccattgacctgtgttttagtttgggctgcacccacagatccaaatctggcactgtgtctacatataggaaaggtcctggtgtgtgcttanggtccccaatgccgggacttgagggaaagagctctgttaatatgtttcccatttcccctttatccaaagataacccaaaccttatggccccttataaccaatggaggcactggctgccctccttaattttcaatcatggaccctaaagaagtactctgaagggtctcaacaatgcccaggtggggacagatatactcagagattatcccaggtctgcctcccagcgagccctggagtacaccagaccctcctagagaaatctgtatataatttaacaacccacttatccacccttaaacactgaggaaagttcgtcttatacatcataattttattcttgtgtgttataacttaaacctatttctatttttgtttgttattgacaattataacggtgtccatctccaagttcaataaactaattcagttaactgtaaaaaaaaaaaaaaaaa

SEQ ID NO: 5337 - DNA, 780 bp, Homo sapiens
  SIMILAR (34)..(246): 631254mologous to Homo sapiens PRO1722,accession number AF119851,Smith-Waterman Score=228.
tggttggttggttttggttttggtttttttgagatagagtctcgccctgtcgcccaggctggagtgcaatggcgcaatcttggctcactgcaaccttcgccttccaagttcaagcgattctcctttctcaaccttccaagtagcttggattacaggcacacgccaccaagcctggctaattttttgtatctagtacagatggggtttcaccatgttggccaggatggtcttgaactcctgacctcatgatccgcccaccttggcctcccaaagtgctgagattacaggtgttagccatcgcacccagcctaggagtgctattcttcttcagtcccaatcatcactccttcctttgctaagaacttttattagctctgtaccagtcacagaataaaatacaagtattttacaacggcattcaattccctccataatctggttccaatctattttccagttctctaattctgcccctcttatactgtatctctataagtcagctactcaaatgcctccagccccagggtggtgttacgtatgtgtgaaaaggtagacaaggtgtaagataatagggaatggtaggaccaatatctagctataaatatctgtataaaaaaaattttttctaactatgcaacccagacaaaaaacatctacaaacagatctcagttactagccaagccttttacaactcctgcaagttaagccaaatagtttcctgctattaaaaataagctctgggctttcctactactaaatactttgtgcccacgcgtccg

SEQ ID NO: 5338 - DNA, 1969 bp, Homo sapiens
  SIMILAR (832)..(1305): 881254mologous to Homo sapiens Human secreted protein clone qs14_3 protein sequence SEQ ID NO:52,accession number AAY94923,Smith-Waterman Score=732.
ggcacgagatttccttaggagcaatttgtgcagtgttgctggttattatggggctatttgcaactaggtgtaaccgcgagaagaaagacactagatcctataactgcagggtggccgaatcaacttaccagcaccacccaaaaaggccatcccggcagattcacaaaggggacatcacattggtgcctaccataaatggcactctgcccatcagatctcatcacagatcgtctccatcttcatctcctaccttagaaagagggcagatgggcagccggcagagtcacaacagtcaccagtcactcaacagtttggtgacaatctcatcaaaccacgtgccagagaatttctcattagaactcacccacgccactcctgctgttgagcaggtctctcagcttctttcaatgcttcaccaggggcaatatcagccaagaccaagttttcgaggaaacaaatattccaggagctacagatatgcccttcaagacatggacaaatttagcttgaaagacagtggccgtggtgacagtgaggcaggagacagtgattatgatttggggcgagattctccaatagataggctgttgggtgaaggattcagcgacctgtttctcacagatggaagaattccagcagctatgagactctgcacggaggagtgcagggtcctgggacactctgaccagtgctggatgccaccactgccctcaccgtcttctgattataggagtaacatgttcattccaggggaagaattcccaacgcaaccccagcagcagcatccacatcagagtcttgaggatgacgctcagcctgcagattccggtgaaaagaagaagagtttttccacctttggaaaggactccccaaacgatgaggacactgggggataccagcacatcatctctgctctcggaaatgagcagtgtgttccagcgtctcttaccgccttccctggacacctattctgaatgcagtgaggtggatcggtccaactccctggagcgcaggaagggacccttgccagccaaaactgtgggttacccacagggggtagcggcatgggcagccagtacgcattttcaaaatcccaccaccaactgtgggccgccacttggaactcactccagtgtgcagccttcttcaaaatggctgccagccatggaggagatccctgaaaattatgaggaagatgattttgacaatgtgctcaaccacctcaatgatgggaaacacgaactcatggatgccagtgaactggtggcagagattaacaaactgcttcaagatgtccgccagagctaggagattttagcgaagcatttttgtttccatgtatatggaaatagggaacaacaacaacaacaaaaaaccctgaaagaactggcattgccaaatagttgcatttatcataaatgtgtctgtgtatattgaatattaaatactgtattttcgtatgtacacaatgcaagtgtgattattttaatctgtattttaaaaatacatttgtaccttatatttatgtgtaatttaacaaacaaattttattttttttactcccatgacagacatgtttttcctagtcgtgtagaaactagccactgttcaaatctgatacactattcaaccacaaagtgtaaaggcactgcttagattagttttgttggggaagaattattatgttgtatggacaaccccactgaagcatttatacaattcttaattccattaagtgatcccactttttttcaataactttttagaaattaaggaatcattaaaattgttaaggctattttattgttattttctctactttctactagccccaatagttggaactcttataggggaaaatcggaaagataaagtggaaaggtttatttcaggactgaggaaatatcttgaaggttatttattaggatggactatctccaaatggaactttttatagacatgatgataa

SEQ ID NO: 5339 - DNA, 364 bp, Homo sapiens
  SIMILAR (90)..(359): 721254mologous to Homo sapiens mono-ADP- ribosyltransferase,accession number X95827,Smith-Waterman Score= 321.
cttgcttaccacaactgatagtggggaggcagtttgaggcctagcatcacttacacttcctccaaaggcacaagagccagatgagaacgatgaatacgggactttttgaaatactgaccatgctgctgacaaccatgaatctagtggacattttccatgagaaggctgacgtggtagacatggcatataatgcatttgacgatgaatacctgaactgtacggacaggatggacattaaatacgttgtccaactgctaaaggaggaacaagcaagccatcatcactgagatactgagtgcgaaaatgcatgagccagatgggcagcccgaatgactcatatctttctccctatggattataatgg

SEQ ID NO: 5340 - DNA, 375 bp, Homo sapiens
  SIMILAR (183)..(305): 801254mologous to Homo sapiens OS-4 protein,accession number AF000152,Smith-Waterman Score=174.
ggcacgaggagtgctcctgaggcgtctccacggtagggattgggagaggaagcagactggaactgtgggctccaccagagaaatacacccctccaggaagacccagccaccctctatggctctggggcgagggagggggaagcatcaggcgggagattgacaccacatcttccccccaccaggtgcctgtgcagtcctggtttgatgacatgggaaacactgagttgctgaacctgatcccaatctttgaggagctgaacggagcaaaggacgtttacaccagccttgggcagctgcgggccccttagactgccctgctttcaagcgacggccattccactatgggactttcccacactgtgcctttacgatcag

SEQ ID NO: 5341 - DNA, 830 bp, Homo sapiens
  SIMILAR (419)..(469): 1001254mologous to Homo sapiens OS-4 protein,accession number AF000152,Smith-Waterman Score=88.
cccacgcgtccgcccacgcgtccgctcaccaggtgtatgtgctcaagaggccttatgtggatgagttcctgagaggcatgggggaactctttgaatgtgttctcttcactgccagcctggccaagtatgccgaccctgtgacagacctgctggaccggagaggggtgttccgggcccgcctattccgtgagtcttgcgtgttccaccagggctgctacgtcaaggacctcagccgcctggggagggacctgagaaagaccctcatcctggacaactcgcctgcttcttacatattccaccccgagaatgcagagcctgtgcagtcctggtttgatgacatggcatacactgagttgctgaacctgatcccaatctttgaggagctgagcggagcataggacgtctacaccagccttgggcagctgcgggccccttagcctgccctgcttccaagcgacggccatcccagtaggggactttcccacactgtgcctttacgatcagcgtgacagagtagaagctggagtgcctcaccacacggcccggaaacagcgggaagtaactggaaagagctttaggacagcttagatgccgagtgggcgaatgccagaccaatgatacccagagctacctgccgccaacttgttgagatgtgtgttttgactgtgaggagagtgtgtgtttgtgtgtgtgtttttgccatgaactgtgggccccatgtatagtgttttcagtggggggagaagctgaaagaccaagacttctccgcaattggcttgactcctctcctgtcactttattagccactagattgtgttagggtgatgatg

SEQ ID NO: 5342 - DNA, 1956 bp, Homo sapiens
  SIMILAR (1)..(1953): 1001254mologous to Homo sapiens NUMB isoform 1,accession number AF171938,Smith-Waterman Score=3425.
atgaacaaattacggcaaagttttaggagaaagaaggatgtttatgttccagaggccagtcgtccacatcagtggcagacagatgaagaaggcgttcgcaccggaaaatgtagcttcccggttaagtaccttggccatgtagaagttgatgaatcaagaggaatgcacatctgtgaagatgctgtaaaaagattgaaagctgaaaggaagttcttcaaaggcttctttggaaaaactggaaagaaagcagttaaagcagttctgtgggtctcagcagatggactcagagttgtggatgaaaaaactaaggacctcatagttgaccagacgatagagaaagtttctttctgtgccccagacaggaactttgatagagccttttcttacatatgccgtgatggcaccactcgtcgctggatctgtcactgcttcatggctgtcaaggacacaggtgaaaggttgagccatgcagtaggctgtgcttttgcagcctgtttagagcgcaagcagaagcgggagaaggaatgtggagtgactgctacttttgatgctagtcggaccacttttacaagagaaggatcattccgtgtcacaacagccactgaacaagcagaaagagaggagatcatgaaacaaatgcaagatgccaagaaagctgaaacagataagatagtcgttggttcatcagttgcccctggcaacactgccccatccccatcctctcccacctctcctacttctgatgccacgacctctctggagatgaacaatcctcatgccatcccacgccggcatgctccaattgaacagcttgctcgccaaggctctttccgaggttttcctgctcttagccagaagatgtcaccctttaaacgccaactatccctacgcatcaatgagttgccttccactatgcagaggaagactgatttccccattaaaaatgcagtgccagaagtagaaggggaggcagagagcatcagctccctgtgctcacagatcaccaatgccttcagcacacctgaggaccccttctcatctgctccgatgaccaaaccagtgacagtggtggcaccacaatctcctaccttccaagctaatggcactgactcagccttccatgtgcttgctaagccagcccatactgctctagcacccgtagcaatgcctgtgcgtgaaaccaacccttgggcccatgcccctgatgctgctaacaaggaaattgcagccacatgttcggggaccgagtggggtcaatcttctggtgctgcctctccaggtctcttccaggccggtcatagacgtactccctctgaggccgaccgatggttagaagaggtgtctaagagcgtccgggctcagcagccccaggcctcagctgctcctctgcagccagttctccagcctcctccacccactgccatctcccagccagcatcacctttccaagggaatgcattcctcacctctcagcctgtgccagtgggtgtggtcccagccctgcaaccagcctttgtccctgcccagtcctatcctgtggccaatggaatgccctatccagcccctaatgtgcctgtggtgggcatcactccctcccagatggtggccaacgtatttggcactgcaggccaccctcaggctgcccatccccatcagtcacccagcctggtcaggcagcagacattccctcactacgaggcaagcagtgctaccaccagtcccttctttaagcctcctgctcagcacctcaacggttctgcagctttcaatggtgtagatgatggcaggttggcctcagcagacaggcatacagaggttcctacaggcacctgcccagtggatccttttgaagcccagtgggctgcattagaaaataagtccaagcagcgtactaatccctcccctaccaaccctttctccagtgacttacagaagacgtttgaaattgaactttaa

SEQ ID NO: 5343 - DNA, 541 bp, Homo sapiens
  SIMILAR (3)..(188): 951254mologous to Homo sapiens S171,accession number AF109907,Smith-Waterman Score=309.
ctccacccactgccatctcccagccagcatcacctttccaagggaatgcattcctcacctctcagcctgtgccagtgggtgtggtcccagccctgcaaccagcctttgtccctgcccagtcctatcctgtggccaatggaatgccctatccagcccctaatgtgcctgtggtgggttttgtatgttcaaactgtcattttatttttacgttgttagatatgggaactgtttgggtttagggcatcttagagttgattgatggaaaaagcagacaggaactggtgggaggtcaagtggggaagttggtgaatgtggaataacttacctttgtgctccacttaaaccagatgtgttgcagctttcctgacatgcaaggatctactttaattccacactctcattaataaattgaataaaagggaatgttttggcacctgatataatctgccaggctatgtgacagtaggaaggaatggtttcccctaacaagcccaatgcactggtctgactttataaattatttaataaaatgaactattat

SEQ ID NO: 5344 - DNA, 462 bp, Homo sapiens
  SIMILAR (1)..(294): 671254mologous to Homo sapiens S171,accession number AF109907,Smith-Waterman Score=324.
atgaacaatcctcatgccatcccacgccggcatgctccaattgaacagcttgctcgccaaggctctttccgaggttttcctgctcttagccagaagatgtcaccctttaaacgccaactatccctacgcatcaatgagttgccttccactatgcagaggaagactgatttccccattaaaaatgcagacagtggacttgttcacaagtattcattacctttcagaaccgtctcacaggcctttgtgtggcctctgtacagctatgccagcctctataggtctatcctcgtcataaaatctgtagctaaagtattagatctggacctcatagttgaccagacgatagagaaagtttctttctgtgccccagacaggaactttgatagagccttttcttacatatgccgtgatggcaccactcgtcgctggatctgtcactgcttcatggctgtcaaggacaca

SEQ ID NO: 5345 - DNA, 869 bp, Homo sapiens
  misc_feature (1)...(869): n = a,t,c or g
atggtgaaacccctgtctctgcagatggtgccactgcactccagcctgggcaacagaggctccctctcagaaaacaagaacactggagtctgggagtctgcagcttcctgttgcatggctggctgtggaggtcctgcagatggtatctgttcagagccacttgggcacgaccaagatggcagagctcaaagcctgctgctctgggcaaagctgacaaggaaggacagattcagcagccaaccaaggagcataccttcatttgatttccttaaggcaaaagcactggctaaacaaagggagactatctgggagaaggtgttttcaccctttcaagctggggtgctttcaccaccgggaagtgccacgctgctttccacgctggaacaaggagctgttggccagaagcctccctcggtgccctgcctcatgggcctcttcgttgagcatctcacaacgtggcagcttacttcatcagtgcaagcaagcaagagcaagagagaggactcaccagagacagtaatagcaaaacagaaggcacagtctttcgtaatccaatcacagatnnnnnnnnnnnnnnnnnnnnnnnnnnnnnnnnnnnnnnnnnnnnnnnnnnnnnnnnnnnnnnnnnnnnnnnnnnnnnnnnnnnnntgtaaagaccagcaagaggatcattgggagctattttagaagcagcctactctaagataataataacatctagggtttgtttaaaatttaaattaaagactgcannnnnnnnnnnnnnnnnnnnnnnnnnnnnnnnnnnnnnnnnnnnnnnnnnnnnnnnnnnnnnnnnnnnnnnnnnnnnnnnnnnnnnnnnnnnnnnnnnnnnnnnnnncacaattttt

SEQ ID NO: 5346 - DNA, 3783 bp, Homo sapiens
  SIMILAR (2617)..(3780): 661254mologous to Mus musculus papilin,accession number AF314171,Smith-Waterman Score=1295.
atgtggagtgtcccatgcttggagaaggttgatgtgcttgcatggactgtcctgtgcctggctgtaaaaattaaaatgaacaaattacggcaaagttttaggagaaagaaggatgtttatgttccagaggccagtcgtccacatcagtggcagacagatgaagaaggcgttcgcaccggaaaatgtagcttcccggttaagaactggcaaaggctatttattcagagcttgctagcaatgaggagcctgtctgcctcctgctgccatcaacctgctgtctatagctcccatggcacccaggctgttcatgccaaagggtgcctgcaggcccacgctcacagagcatgctgccccagctgcacctcccctgctgcagctgccatctttgcagcagccactccagatgggccgctgctgccatcaagaccactagtaaacctgatagaaaagtcacaagctctggtgcgagagacactgaccagccaggcctcagctcccaactctggccgagcaggacagcccgtcacagtctgcctttcagtgccaatgctgcctggaggcctgcgctggaggccccagtcgacacgggtctttggcccgagacacaggctgtctctcaatgtctgggctgagaaccattcagcctgtttagagcgcaagcagaagcgggagaaggaatgtggagtgactgctacttttgatgctagtcggaccacttttacaagagaaggatcattccgtgtcacaacagccactgaacaagcagaaagagaggagatcatgaaacaaatgcaagatgccaagaaagccccaaacaagtgtgaactgaactgcattcccaagggggagaacttctactacaagcacagggaggctgtggttgatgggacgccctgcgagcctggcaagagggatgtctgtgtggatggcagctgccgggttgtcggctgtgatcacgagctggactcgtccaagcaggaggacaagtgtctgcggtgtgggggtgacggcacgacctgctaccccgtcgcaggcacctttgacgctaatgacctcagccgagctgtgaagaatgttcgtggggaatactacctcaatgggcactggaccatcgaggcggcccgggccctgccagcagccagcaccatcctgcattacgagcggggtgctgagggggacctggcccctgagcgactccatgcccgggccccacctcggagcccctggtcatcgagccccggcttcagctggagccacggctcatggagtgactgcagcgcggagtgtggcggaggtcaccagtcccgcctggtgttctgcaccatcgaccatgaggcctaccccgaccacatgtgccagcgccagccacggccagctgaccggcgttcctgcaatcttcacccttgcccggagaccaagcgcgggcctcctgggatggtggcggacttggctttgcatggggccacagggctgctctttcctctgggtccttgcacccggggcctgcagagccgctccacgcatggctggaaggcagggccatgggcaccctgctcagcctcctgtggaggaggctcccagtcccgctccgtgtactgcatctcgtctgacggggccggcatccaggaggccgtggaggaggctgagtgtgccgggctgcctgggaagccccctgccattcaggcctgtaacctgcagcgctgtgcagcctggagcccggagccctggggagagtgttctgtcagttgtggcgttggcgtccggaagcggagcgttacttgccggggtgaaaggggttctttgctccataccgcagcgtgctccttggaagaccggccacctctgactgagccctgtgtgcatgaggactgccccctcctcagtgaccaggcctggcatgttggcacctggggtctatgctccaagagctgcagctcgggcactcggaggcgacaggtcatctgtgccattgggccgcccagccactgcgggagcctgcagcactccaagcctgtggatgtggagccttgtaacacgcagccctgtcatctcccccaggaggtccccagcatgcaggatgtgcacacccctgccagcaacccctggatgccgttgggccctcaggagtcccctgcctcagcagcccccataccagcaatccctgcggtcgggctcagggccccacgactgcagacacagtcctcacgggtgctgccccgatggccacacggcatctctcgggcctcagtggcaaggctgccctggggccccctgtcagcagagcaggtccacaacacccaccagccccaggcccagcagaatgagcccagtgagtgccggggctcccagtttggctgttgctatgacaacgtggccactgcagccggtcctcttggggaaggctgtgtggccagcccagccatggtgccaggccagagagcagtgccagagtgttctcgcatccagcagtttgaacctgtggccttctggctgcttctgggaactggggaggcctaccccgtgcggtgcctgctgcccagtgcccatggctcttgcgcagactgggctgcccgctggtacttcgttgcctctgtgggccaatgtaaccgcttctggattagcttggcaggtgtggagccctcgttggtgcaggcagccctggggcagttggtgcggctctcctgctcagacgacactgccccggaatcccaggctgcctggcagaaagatggccagcccatctcctctgacaggcacaggctgcagttcgacggatccctgatcatccaccccctgcaggcagaggacgcgggcacctacagctgtggcagcacccggccaggccgcgactcccagaagatccaacttcgcatcataggtctctgtccccaccccatccaccactcacaccttgtttctcctggcctcatgacagggggtgacatggccgtgctgtctgaggctgagctgagccgcttccctcagcccagggacccagctcaggactttggccaagcgggggctgctgggccctggggccatcccctcttcacacccacagcctgcaaacaggctgcgtttggaccagaaccagccccgggtggtggatgccagtccaggccagcggatccggatgacctgccgtgccgaaggttcccgcccccagccatcgagtggcagagagatgggcagcctgtctcttctcccagacaccagctgcagcctgatggctccctggtcattagccgagtggctgtagaagatggcggcttctacacctgtgtcgctttcaatgggcaggaccgagaccagcgatgggtccagctcagagttctgggggagctgacaatctcaggactgccccctactgtgacagtgccagagggtgatacggccaggctattgtgtgtggtagcaggagaaagtgtgaacatcaggtggtccaggaacgggctacctgtgcaggctgatggccaccgtgtccaccagtccccagatggcacgctgctcatttacaacttgcgggccagggatgagggctcctacacgtgcagtgcctaccaggggagccaggcagtcagccgcagcaccgaggtgaaggtggtctcaccagcacccaccgcccagcccagggaccctggcagggactgcgtcgaccagccagagctggccaactgtgatttgatcctgcaggcccagctttgtggcaatgagtattactccagcttctgctgtgccagctgttcacgtttccagcctcacgctcagcccatctggcagtag

SEQ ID NO: 5347 - DNA, 1545 bp, Homo sapiens
  SIMILAR (448)..(1542): 931254mologous to Homo sapiens NUMB isoform 3,accession number AF171940,Smith-Waterman Score=1774.
atggtaattttactccctggtgaaattctgatctacaacgaagaaagccccaggaatttctctaagcacatcatcagtacatttttaaacactaatgagccaagcaaagtaaagcagactggaaagaaagcagttaaagcagttctgtgggtctcagcagatggactcagagttgtggatgaaaaaactaaggacctcatagttgaccagacgatagagaaagtttctttctgtgccccagacaggaactttgatagagccttttcttacatatgccgtgatggcaccactcgtcgctggatctgtcactgcttcatggctgtcaaggacacaggtgaaaggttgagccatgcagtaggctgtgcttttgcagcctgtttagagcgcaagcagaagcgggagaaggaatgtggagtgactgctacttttgatgctagtcggaccacttttacaagagaaggatcattccgtgtcacaacagccactgaacaagcagaaagagaggagatcatgaaacaaatgcaagatgccaagaaagtgccagaagtagaaggggaggcagagagcatcagctccctgtgctcacagatcaccaatgccttcagcacacctgaggaccccttctcatctgctccgatgaccaaaccagtgacagtggtggcaccacaatctcctaccttccaagctaatggcactgactcagccttccatgtgcttgctaagccagcccatactgctctagcacccgtagcaatgcctgtgcgtgaaaccaacccttgggcccatgcccctgatgctgctaacaaggaaattgcagccacatgttcggggaccgagtggggtcaatcttctggtgctgcctctccaggtctcttccaggccggtcatagacgtactccctctgaggccgaccgatggttagaagaggtgtctaagagcgtccgggctcagcagccccaggcctcagctgctcctctgcagccagttctccagcctcctccacccactgccatctcccagccagcatcacctttccaagggaatgcattcctcacctctcagcctgtgccagtgggtgtggtcccagccctgcaaccagcctttgtccctgcccagtcctatcctgtggccaatggaatgccctatccagcccctaatgtgcctgtggtgggcatcactccctcccagatggtggccaacgtatttggcactgcaggccaccctcaggctgcccatccccatcagtcacccagcctggtcaggcagcagacattccctcactacgaggcaagcagtgctaccaccagtcccttctttaagcctcctgctcagcacctcaacggttctgcagctttcaatggtgtagatgatggcaggttggcctcagcagacaggcatacagaggttcctacaggcacctgcccagtggatccttttgaagcccagtgggctgcattagaaaataagtccaagcagcgtactaatccctcccctaccaaccctttctccagtgacttacagaagacgtttgaaattgaactttaa

SEQ ID NO: 5348 - DNA, 2310 bp, Homo sapiens
  SIMILAR (230)..(907): 991254mologous to Homo sapiens NUMB isoform 1,accession number AF171938,Smith-Waterman Score=1200.
agggtgcttcagtgtggctgacacagcagcatggtcttgacaagttttcttcatcctaccacaaaatcccagttggtaatagagactttactcctacctatcaaaaccacaaaatgtcccattagggggggacatgttgtacatgttaggatcattcaaataaccaagattataaggtgaggaaagatgcccctaactgattcttttgtctctcatcttgttggttccagggaccgagtggggtcaatcttctggtgctgcctctccaggtctcttccaggccggtcatagacgtactccctctgaggccgaccgatggttagaagaggtgtctaagagcgtccgggctcagcagccccaggcctcagctgctcctctgcagccagttctccagcctcctccacccactgccatctcccagccagcatcacctttccaagggaatgcattcctcacctctcagcctgtgccagtgggtgtggtcccagccctgcaaccagcctttgtccctgcccagtcctatcctgtggccaatggaatgccctatccagcccctaatgtgcctgtggtgggcatcactccctcccagatggtggccaacgtwtttggcactgcaggccaccctcaggctgcccatccccatcagtcacccagcctggtcaggcagcagacattccctcactacgaggcaagcagtgctaccaccagtcccttctttaagcctcctgctcagcacctcaacggttctgcagctttcaatggtgtagatgatggcaggttggcctcagcagacaggcatacagaggttcctacaggcacctgcccagtggatccttttgaagcccagtgggctgcattagaaaataagtccaagcagcgtactaatccctcccctaccaacgcctttctccatgtgacttacagaagacgtttgaaattgaactttaagcaatcattatggctatgtatcttgtccataccagacagggagcagggggtagcggtcaaaggagcaaaacagactttgtgtcctgattagtactcttttcactaatcccaaaggtcccaagggaacaagtccaggcccagagtactgtgaggggtgattttgaaagacatgggaaaaagcattcctagagaaaagctgccttgcaattaggctaaagaagtcaaggaaatgttgctttctgtactccctcttcccttacccccttacaaatctctggcaacagagaggcaaagtatctgaacaagaatctatattccaagcacatttactgaaatgtaaaacacaacaggaagcaaagcaatgtccctttgtttttcaggccattcacctgcctcctgtcagtagtggcctgtattagagatcaagaagagtggtttgtgctcaggctgggaacagagaggcacgctatgctgccagaattcccaggagggcatatcagcaactgcccagcagagctatattttgggggagaagttgagcttccattttgagtaacagaataaatattatatatatcaaaagccaaaatctttatttttatgcatttagaatattttaaatagttctcagatattaagaagttgtatgagttgtaagtaatcttgccaaaggtaaaggggctagttgtaagaaattgtacatragattgatttatcattgatgcctactgaaataaaaagaggaaaggctggaagcatgcagacaggatccctagcttgttttctgtcagtcattcattgtaagtagcacattgcaacaacaatcatgcttatgaccaatacagtcactaggttgtagttttttttaaataaaggaaaagcagtattgtcctggttttaaacctatgatggaattctaatgtcattattttaatggaatcaatcgaaatatgctctatagagaatatatcttttatatattgctgcagtttccttatgttaatcctttaacactaaggtaacatgacataatcataccatagaagggaacacaggttaccatattggtttgtaatatgggtcttggtgggttttgttttatcctttaaattttgttcccatgagttttgtggggatggggattctggttttattagctttgtgtgtgtcctcttcccccaaacccccttttggtgagaacatccccttgacagttgcagcctcttgacctcggataacaataagagagctcatctcatttttacttttgaacgttggcgcttacaatcaaatgtaagttatatatatttgtactgatgaaaatttataatctgctttaacaaaaataaatgttcatggtag

SEQ ID NO: 5349 - DNA, 2238 bp, Homo sapiens
  SIMILAR (315)..(1847): 981254mologous to Homo sapiens NUMB isoform 3,accession number AF171940,Smith-Waterman Score=2623.
  misc_feature (1)...(2238): n = a,t,c or g
tttcgtgaggtggtggcgcttggtggccactggcggccgatgtagatgcagtggcgcttgagttggtcgggggcagcggcagatttgaggcttaagcaacttcttccggggaagagtgccagtgcagccactgttacaattcaagatcttgatctatatccatagattggaatattggtgggccagcaatcctcagacgcctcacttatgnnnnnnnnnnnnnnnnnnnnnnnnnnnnnnnnnnnnnnnnnnnnnnnnnnnnnnnnnnnnnnnnnnnnnnnnnnnnnnnnnnnnnnnnnnntgtaaaaattaaaatgaacaaattacggcaaagttttaggagaaagaaggatgtttatgttccagaggccagtcgtccacatcagtggcagacagatgaagaaggcgttcgcaccggaaaatgtagcttcccggttaagtaccttggccatgtagaagttgatgaatcaagaggaatgcacatctgtgaagatgctgtaaaaagattgaaagctactggaaagaaagcagttaaagcagttctgtgggtctcagcagatggactcagagttgtggatgaaaaaactaaggacctcatagttgaccagacgatagagaaagtttctttctgtgccccagacaggaactttgatagagccttttcttacatatgccgtgatggcaccactcgtcgctggatctgtcactgcttcatggctgtcaaggacacaggtgaaaggttgagccatgcagtaggctgtgcttttgcagcctgtttagagcgcaagcagaagcgggagaaggaatgtggagtgactgctacttttgatgctagtcggaccacttttacaagagaaggatcattccgtgtcacaacagccactgaacaagcagaaagagaggagatcatgaaacaaatgcaagatgccaagaaagctgaaacagataagatagtcgttggttcatcagttgcccctggcaacactgccccatccccatcctctcccacctctcctacttctgatgccacgacctctctggagatgaacaatcctcatgccatcccacgccggcatgctccaattgaacagcttgctcgccaaggctctttccgaggttttcctgctcttagccagaagatgtcaccctttaaacgccaactatccctacgcatcaatgagttgccttccactatgcagaggaagactgatttccccattaaaaatgcagtgccagaagtagaaggggaggcagagagcatcagctccctgtgctcacagatcaccaatgccttcagcacacctgaggaccccttctcatctgctccgatgaccaaaccagtgacagtggtggcaccacaatctcctaccttccaagctaatggcactgactcagccttccatgtgcttgctaagccagcccatactgctctagcacccgtagcaatgcctgtgcgtgaaaccaacccttgggcccatgcccctgatgctgctaacaaggaaattgcagccacatgttcggggaccgagtggggtcaatcttctggtgctgcctctccaggtctcttccaggccggtcatagacgtactccctctgaggccgaccgatggttagaagaggtgtctaagagcgtccgggctcagcagccccaggcctcagctgctcctctgcagccagttctccagcctcctccacccactgccatctcccagccagcatcacctttccaagggaatgcattcctcacctctcagcctgtgccagtgggtgtggtcccagccctgcaaccagcctttgtccctgcccagtcctatcctgtgggccaatggaatgccctatccagcccctaatgtgcctgtggtgggcatcactccctcccagatggtggccaacgtatttggcactgcaggccaccctcaggctgcccatccccatcagtcacccagcctggtcaggcagcagacattccctcactacgaggcaagcagtgctaccaccagtcccttctttaagcctcctgctcagcacctcaacggttctgcagctttcaatggtgtagatgatggcaggttggcctcagcagacaggcatacagaggttcctacaggcacctgcccagtggatccttttgaagcccagtgggctgcattagaaaataagtccaagcagcgtactaatccctcccctaccaaccctttctccagtgacttacagaagacgtttgaaattgaactttaa

SEQ ID NO: 5350 - DNA, 328 bp, Homo sapiens
cgcgtctacgtcaaggatggggttctgactctattcaacatgtgctacaagttctggccactttaacaaggcaaggaacataaaaagacaaacacactggaaaggaaataaaactccctaattgcaggctacatacttgtctatgtaaaaaccccaaggactcaaaaagaaaagtccttcttaaaggtattaagcacatatatcaaagttgcaaaatacaaggtctaaatcctaaaatccattacatttctatttactaccaaggaatattcaaaaatcaacattaaaatgccatttacaacgccatttacgactccaaattaaatgt

SEQ ID NO: 5351 - DNA, 2729 bp, Homo sapiens
  SIMILAR (936)..(2726): 921254mologous to Homo sapiens NUMB isoform 4,accession number AF171941,Smith-Waterman Score=2813.
ttttattatatataacagttatatattacataacatatgctggccctgaattgaacatattctctaatttgatttttgaatatttaaaaatatacacatatatttgtttttttttttaaagagatggaggagtttcaccatgttgcccaagctggcctcaaacccctggcctcaagtgagcctcccacctcagcctcccaagtagctgccaccatgcagtctctaatttaaattttaaacaaaccctagatgttattattatcttagagtaggctgcttctaaaatagctcccaatgatcctcttgctggtctttacatccttgtgtaatctccttgagtgtgggctggacctaatgacttacttctaactcacaggatgtggcaacagtgatgggatgtcacatctgtgattggattaccaaagactgtgcccttctgttttgctattactgtctctggtgagtcctctctctttgctcttgcttgcttgcactgatgaagtaagctgccacgttgtgagatgctcaacgaataggcccatgaggcagggcaccgagggaggcttctggccaacagctcctggggaaccaaggccttaggaagtgagtcctgccaacaataacgagagccttgaactttgaaaccacagtaccttgttccagcgtggaaagcagcgtggcacttcccggtggtgaaagcaccccagcttgaaagggtgaaaacaccttctcccagatagtctccctttgtttagccagtgcttttgccttaaggaaatcaaatgaagatttgaggcttaagcaacttcttccggggaagagtgccagtgcagccactgttacaattcaagatcttgatctatatccatagattggaatattggtgggccagcaatcctcagacgcctcacttaggacaagctgtaaaaattaaaatgaacaaattacggcaaagttttaggagaaagaaggatgtttatgttccagaggccagtcgtccacatcagtggcagacagatgaagaatgcgctcgcaccggaaaatgtagcttcccggctaacgaccttggccatgctgaattttttgaatcaagaggaatgcacatctgtgaagatgctgtaaaaagattgaaagctactggaaagaaagcagttaaagcagttctgtgggtctcagcagatggactcagagttgtggatgaaaaaactaaggacctcatagttgaccagacgatagagaaagtttctttctgtgccccagacaggaactttgatagagtccttttcttactatatgccgtgatggcaccactgcgtcgcatggattctgtcgcatgcttcatggctgtcaaggcacacaaggtgaaagagttgagcacatgcagtagatctgtgcttgttgcagccttgtttagacgcgcaagacagaagcgggagaaggaatgtggagtgactgctacttttgatgctagtcggaccacttttacaagagaaggatcattccgtgtcacaacagccactgaacaagcagaaagagaggagatcatgaaacaaatgcaagatgccaagaaagctgaaacagataagatagtcgttggttcatcagttgcccctggcaacactgccccatccccatcctctcccacctctcctacttctgatgccacgacctctctggagatgaacaatcctcatgccatcccacgccggcatgctccaattgaacagcttgctcgccaaggctctttccgaggttttcctgctcttagccagaagatgtcaccctttaaacgccaactatccctacgcatcaatgagttgccttccactatgcagaggaagactgatttccccattaaaaatgcagtgccagaagtagaaggggaggcagagagcatcagctccctgtgctcacagatcaccaatgccttcagcacacctgaggaccccttctcatctgctccgatgaccaaaccagtgacagtggtggcaccacaatctcctaccttccaagggaccgagtggggtcaatcttctggtgctgcctctccaggtctcttccaggccggtcatagacgtactccctctgaggccgaccgatggttagaagaggtgtctaagagcgtccgggctcagcagccccaggcctcagctgctcctctgcagccagttctccagcctcctccacccactgccatctcccagccagcatcacctttccaagggaatgcattcctcacctctcagcctgtgccagtgggtgtggtcccagccctgcaaccagcctttgtccctgcccagtcctatcctgtggccaatggaatgccctatccagcccctaatgtgcctgtggtgggcatcactccctcccagatggtggccaacgtatttggcactgcaggccaccctcaggctgcccatccccatcagtcacccagcctggtcaggcagcagacattccctcactacgaggcaagcagtgctaccaccagtcccttctttaagcctcctgctcagcacctcaacggttctgcagctttcaatggtgtagatgatggcaggttggcctcagcagacaggcatacagaggttcctacaggcacctgcccagtggatccttttgaagcccagtgggctgcattagaaaataagtccaagcagcgtactaatccctcccctaccaaccctttctccagtgacttacagaagacgtttgaaattgaactttaa

SEQ ID NO: 5352 - DNA, 1826 bp, Homo sapiens
  SIMILAR (1713)..(1823): 1001254mologous to Homo sapiens NUMB isoform 1,accession number AF171938,Smith-Waterman Score=195.
  misc_feature (1)...(1826): n = a,t,c or g
atgaacaaattacggcaaagttttaggagaaagaaggatgtttatgttccagaggccagtcgtccacatcagtggcagacagatgaagaaagcgttcgcaccggaaaatgtagcttcccggttaagtaccttggccatgtagaagttgatgaatcaagaggaatgcacatctgtgaagatgctgtaaaaagattgaaagctcaaaggaagttcttcaaaggcttctttggaaaaactggaaagaaagcagttaaagcagttctgtgggtctcagcagatggactcagagttgtggatgaaaaaactaaggacctcatagttgaccagacgatagagaaagtttctttctgtgccccagacaggaactttgatagagccttttcttacatatgccgtgatggcaccactcgtcgctggatctgtcactgcttcatggctgtcaaggacacaggtgaaaggttgagccatgcagtgggctgtgcttttgcagcctgtttagagcgcaagcagaaacgggagaaagaatgtggagtgactgctacttttgatgctagtcggaccacttttacaagagaaagatcattccgtgtcacaacagccactgaacaagcagaaagagaggagatcatgaaacaaatgcaagatgccaagaaagctgaaacagataagatagtcgttggttcatcagttgcccctggcaacactgccccatccccatcctctcccacctctcctacttctgatgccacgacctctctggagatgaacaatcctcatgccatcccacgccggcatgctccaattgaacagcttgctcgccaaggctctttccgaggttttcctgctcttagccagaagatgtcaccctttaaacgccaactatcccctacgcatcaatgagttgcccttcccactatgcagaggaagactgatttccccattaaaaatgcagtgccagaagtagaaggggaggcagagagcatcagctccctgtgctcacagatcacaaatgccctcagccccacctgaggacccctttttcatctgctccgatgaccaaaccagtgacaggtgntggcaccacaatctcctaccttccaagggaacgaagtggggtcattcttctgggtgctgcctctccaggtctcttccaggccggtcatagacgtactccctctgaggccgaccgatggttacgaagaggtgtctaagagcgtccgggctcagcagccccaggccccagctgctcctctgcagccagttctccagcctcctccacccactgccatctcccagccagcatcacctatccaagggaatgcattcctcacctctcagcctgtgccagtgggtgtggtcccagcacacatgcaaccagcctttgtcccctgcccagtcctatcctgtggccaatggaatgccctatccagcccctaatgtgcctgtggtgggcatcactccctcccagatggtggccaacgtatttggcactgcaggccaccctcaggctgcccatccccatcagtcacccagcctggtcaggcagcagacattccctcactacgaggcaagcagtgctaccaccagtcccttctttaagcctcctgctcagcacctcaacggttctgcagctttcaatggtgtagatgatggcaggttggcctcagcagacaggcatacagaggttcctacaggcacctgcccagtggtttccttttgaagcccagtgggctgcattagaaaataagtccaagcagcgtactaatccctcccctaccaaccctttctccagtgacttacagaagacgtttgaaattgaactttaa

SEQ ID NO: 5353 - DNA, 386 bp, Homo sapiens
  misc_feature (1)...(386): n = a,t,c or g
gggacaactatgatgtctcaatgtaggttcctcattttaacaaaggtactaccatggttgggggaggtgttgaaaagggcgaaggatacatatatatgtgcattagggtatataggaaatctatgtacttcttaattctgctgtgaagttaaaactgccttaactaatgaagtatatttattctaaaaaggaatctaaccatctaaaaatgtttttaataacaaaaattaaatcaatattaaaagccctatcgccatttgtaataagaactctccctaatnnnnnnnnnnnnnnnnnnnnnnnnnnnnnnnnnnnnnnnnnnnnnnnnnnnnnnnnnnnnnnnnnnnnnnnnnnnnnnnnnnnnnnnnnnggcttataccagaaag

SEQ ID NO: 5354 - DNA, 391 bp, Homo sapiens
cagtgttccggtttattatctgagggacaaacattcagactagaggaggagtgttctgaaatcctgtgtgaggtacaatcattcagaccgcagcagcagtgttctggaatcatatgtggggggcaatcattcagacgacagctggggtgttctagaatcctatgtgtgggacaggcattcagaccctcgtagcattgttctggaatccagagatttattcattgtttgctgatcgtgaaaatgcacagagcactctggaagcatagcttgggataacagtcgaatggagtgggttaaggagagaactgatgtggcttggtcctagattctcctgcccaaaatgttctacacaatagctggaaaagactgcagggacaaagacccgaacccc

SEQ ID NO: 5355 - DNA, 1356 bp, Homo sapiens
  SIMILAR (741)..(845): 481254mologous to Homo sapiens Human secreted protein, SEQ ID NO: 7376,accession number AAG03295,Smith-Waterman Score=88.
tttttttttttttttttaacaggggatttatagcagctttattcaaaataactaaaatttggaagcaaccaagatgcccctcagtaagtgaatgggataaactatggtacacacaatagaacataattcagcactaaaaagaaatgggctatcttgtcctcaaaagatgaggaaacttaaaagcatattactaagtaaaagaaggcagtctgaaaaggctacttactatataactgcaactatgtaacatgcgaaatgatggagatggtttgcagggttaaggggatgatatgtaataaacaggaagagcagggatgacttttagaacaaagtgttctgtgaggtactataaggctgggatacatgtccattatacatttactccaaacccataagcatgtaaaaccacaagagttaacccctaatggtaaacctatgggcccttgggaccacctatggatgtctcaatgtaggttcctcatttttaacaaaggtactaccatggttgggggaggtgttgaaaagggcgaaggatacatatatatgtgcattagggtatataggaaatctatgtacttcttaattctgctgtgaagttaaaactgccttaactaatgaagtatatttattctaaaaaggaatctaaccatctaaaaatgtttttaataacaaaaattaaatcaatattaaaaaccacttcgccatttgtaataagaactctcactaataatgaatgcataaagaaaatgtggtctatacatgcaatgaattattactcagccttaaaaaggaagaaaatcttgccatttgcagaaacatgcacataccagaaagatattgtgctaagaaataagccaaacaggaacaaagtattacataatcccatctgcaataagtctggatgtatgtattcccctctaattcctatgttgaaatcttatcaccaagggtgatagtattagaggttaagggcctcagggaagtgatgaggtgagggctcttccctctcgaatggactgggagtatattcattctctgccactcttttgtcttccaccatgtaaggatgcaggaagaagtctctcatcaggtaccagatgacagtgccttgatcctggacttcccagcttccagaacagagatttattcattgtttgctgatcgtgaaaatgcacagagcactctggaagcatagctgtgataacagtcgaatggagtgggttaaggagagaactgatgtggcttggtcctagattctcctgcccaaaatgttctacacaatagctggaaaagactgcagggacaaagacccgaaccccagagcttccagaacagcctcttattgcagcaggagcc

SEQ ID NO: 5356 - DNA, 1015 bp, Homo sapiens
ggactagccggggttgtatttggaaacgcggagtgacgtttttccgtgctgtgtaggggctaacaatggacacccagaaggacgttcaacctccaaaagcagcaaccaatgataatatatctgtggagagtgtcaccaccggaaaatgaaataaaatctaggggatccaatccagatgcagagaatgtggataccagaataatgtacaagaaaaggactaaaagattgggtcggtttttgatggctcgatggaatgctggggaattccagagggaatggccttcaccttataccttgggatttggctctcttccccatttctggattgtttgttatagcttttcgatttttgctttacagtaagttccccctttatctttcgggggagatacattcccaagggccccccagtggaactcctggaaaccttcaaacagtacccaaacctttgttacactggttttttccatatatatatacctatggataaagtataatggtataaattaagcatagcaagagattaataataatggtaatagaccaatgataacatacctataataaaagttagcgtgaatgtggttggtctcctcttgcttttcaaaatatcttcttgtacagtactccacctattttagaatgtggttgacctaccgggtaaccccaaaacccacagaaaggggaaacctttggatgaggggggcacctactgtaccttaggaatacaacctatatacatatgattttatttttaagacccatattatatttgggtatcctacctaatattttgtataaagcaatttttttgttcccattacggtgactttttgttttattgtatatgtaatttaacacacaataaagggtaaagttgcttccccaaaccacacttttaatcaaaacctaggaatcatctgcagtccttgttaaaaatgcaggtttctaggaaccctctggaagttctgattaaataaaaatattccaaaccacaaaaaaaaaaaaaaaaaaa

SEQ ID NO: 5357 - DNA, 4006 bp, Homo sapiens
  SIMILAR (3441)..(3602): 611254mologous to Homo sapiens neuronal thread protein AD7c- NTP,accession number AF010144,Smith-Waterman Score=143.
  misc_feature (1)...(4006): n = a,t,c or g
ggacaaaactatgctactttagaaacgcagtctgtttttcaccaattgacatactactgatctgaagtaaccagtgccatcataagaaattactgcattaagaaaatccttgctgtgccctttgaaaagctgttcagaaatcatttacagtgatctttcatctcggtcgctgtagtgaaacattttagtgtgataaatttcaaaattctaaacaaattacccacttttatattggaaatctctaccagaactccctcttcattttttaaggcatacatttgcttgttttcaagatcaagaattctgagctagctttaagtagcaaactgatttatatgtgcaattataggatgcattaagatgaatgatagcctttacatattgaaaactttgcagacgttttgttttgaaaatggcattgtatagtaaatgcaaattaattttgtaaaattatgttaaagagtatgttcagacactttctgccatggccaaaaagtatgtatgaaagtatgtgtgtatttgtttgtaaaaggatgccaatgttttacctgatatcttagtgacacttcagttatctatgcattctttagatctgtgattcggtaaacaggcagccatgttcacgatgccttctatgtcttaccatatttttaattaacctgttaaatacagcttaaaatatttttattttatttattctatttttactgaaatatactgcattattgtgttaatgtattatctttcctggatattatctcccagtgtatccagatctaagtaatctcagtgaactatacattgcctaaaaagtggttttgtaatgatttgtagtcacatttctattgggatatgtagaagaaaaggcaaaatgcttaaagttccttttattttttaaaagcagctagatagacacagacttgccacctcatacatctgctccttggcaacatcaaggggaacgactagccaacatgcctatggctaaaaactttcctttgcagactaaagcactgcttggtgcttcgtttttctacccttcacaacatgtgtgatttcatctaagagatatatacatgtacacatgccctttgtttccacctggatacaagatcactcatagctaattaggaccattgttttttgttcatctgtcttgttgcatgaagggacattagacccatttccattaaaataagttcttggtgataaactgtggcactgctacttctttttaaatccactttatgaatttcaagatgggacacttgttaagatgaactcgaacacaaggccattgccctggaagcccccagagctttccctctgtttgtaatggcccgttccatgtccccaggcattgcaacacaaactcctcaagatttcaccacaacatgacaagcattttcctaactgatattagcacaattttaactaataagccccttcgctctctagttggccaggcttaacctaatacacatctaacgtgtgtgccacacggccagtagaaagtttaacttcagcttcagggcaaagatacccactcacaccgtgtcaacgcaagcagtagttcctggcctccagagcagcttacttcccctgaaagaacgctttgttttcctttatgcccttttccctgttgaccacttttacacatttaaatgtaatttgttgtgagaataaatttagctgcataaaacgttcggctcatttatctgacatcttagtcacatatacaaggaatagaaatagaaactcggtgtctctagttatttttaaattattcttacctcagacttcttagaaatcactttagtaatggagcattttgctttgattagttactacatatttctgcctggtaagaactaggaagtaacttcaaattttgagtaatcaccctgtacttatttggtgatcancgaaggccagctggccttccggacatagaagcctatttagtcaccaactcgagtcttttgtaagcggtcttgctaggattgtgatattttagcacgaagaagtttatcacttcctttaagaacctgacatcaaagaataaagaatagaggtgtacacacactaaatccaaaatgaaaggtaactagagaaatcagttgaatctggtttagcttaactgttaggcgcaggaaggcagataaacagaatttaaagtatgtccccgctttttgttcatcttgcacttccacagtggtttctctctagtcagtaacaaaatttcattatggtttcaggcattatatggtggtaaataatttcagattaaaaatgtgtttgctattggagtatctgaatactagtaatttcattatttagaattttgcagcacttttatctcaagaagaagtccaagaatgtaaaatgccaaatgaaacatgtcagtggaatcaatattctccttcattagaattccctcatattgctttttttttttttcttcagacagaggagtcttactctggagtgcagtggtgtaatttcagctcaccacaacctccacctcccaagttcaagcaattctcgcctcagcctcctgagtagctgggattacaggcatgcaccgccacgcctggccaatttgtatatttttagtagagacagggtttcgccacgttggccaggctggtctcgaactcctgacctcaggtgatccgcccgccccaacctcccaaagtatgtgagccaccacgtccggcctcatattgcttttatccaaaattcttttcccttttcactctaccaaagtatttaaataatcctgtccttcatagaagattctcaaagaagaaaactgcagtgtaattaatgaatggtttaattcagaatcttcatatacttctaaagagaaaaataatttagtgccaaatgcatgttaggagataatcaatgtaagtggcaacaaattgtgacttcacatgctactgtagagatcagaaaattatcctaaactattccataacaatgagacaacatcacagaaaatacacttgaaaataaaaatctcaagaccagctacttctggacaatggaatacttttcagtctggtatggtggagggcccgaaaaggataagggattcttatgatacacaatgggattctttactgaacaatatgttaaattaagctgcaccgccttccttgaggcatggactaccctaaccaaccagatagaaatctgggtgggataagaggatgagccacacgctataattttagggcaaggagatagtgtttgattttcaaaatcagcaaaataagctgagcactttatatctttctgtacaagagtgataacatgaagaattcttcttcagggatttaaaatacaataagcctggttcaactataaaaagtcttgtttcctttcttcattgacacttttttttttttttttttttgaggcaaggtctcactctgcttcccaggctggagtgcagtggggcaatattggctcactgcaacctgcacctcctggactcaagagatcctcgtacctcagcctcctaagtagctgggactacaggcgtgtcccaccacacccagctaatttttgtattttttgtagagatggggttttggggtttcgccatgttgtccaggctcgtctggaactccggtgctcaagtggcgtgcccacctcagcctcccaaactgctgagattacagatgtggagccactgcacccagcccacttgacacgttttactgataaatgtaaatctaagctaaaataaaaataatgtattaccgctataatacaattcaccattctcttttctcacttcaagtaagaaagtaaaaatagaatatcagagctgaagtagacctaagtattcatcttgaagaagataatattctaaaaatcatgccacctgaattgagcatttaggaatttatgtaacatttctatacaactgaattgcaaaaataaaactttaaattcaaactttaaaaaaaaaaaaaaaaaaaaaaaaaaaaaa

SEQ ID NO: 5358 - DNA, 1050 bp, Homo sapiens
  SIMILAR (510)..(629): 701254mologous to Mus musculus putative,accession number AK003940,Smith-Waterman Score=133.
  misc_feature (1)...(1050): n = a,t,c or g
aaataccgccaggacctgactgtgcctccaggctactgcacaggtgagcaaggggcaggcggcaggcccggggagacggagccctggctaaggccgccggccctgctcccctccagacttcctgctgtgcgccagcagctctggtgctgtgcttcccgtgaggacccaggaccccttcctgccatacccaccaagggcctgcccacagggccaggctgcctctagcgccactacttcgagaccctgcccagaggtaaaggaggcagggtgggggagccctggccaccttgcccgccatgccctgagccacgtccctccccctgcaagggtggtgctggtgttgcgggaacgctggcatttctgcggggacggccgggtgctgctgggctcgagggccctgagggagcggcacctaggcctgatgggctaccagctcctgccggtgagtggccctggcctggcccgtggcgcatcctcactcccagcctgcgggtaacctgccgccctctcctctccccacagctacccttcgaggaactggagtcccagagagggcctgcccccagctcaagagctacctgaggcagaagctccaggccctgggcctgcgctgggggcctgaagggggctgaggggatgatgtggggttcaggatggccccccccatggggggtggatgatttgcactttggttcccctgtgttttgatttctcattgaaagttcctttccttcccnnnnnnnnnnnnnnnnnnnnnngggcggccgttttaaaggacccctgggggggcccaagtttacccgggcaggcaaagacatacctttctccctatagggagcggttttttaagctacctgggaatcttgggaaaggacccttactttgggggggggacatattgggccaacctccctccagaattttaaggctttaaggaaaatttaaattttttaagggtataaggggttaaacaacctgcttatgctcgtggctggaaagtttggctccctgggtatcttttataaaaatttcatccccggagactggggc

SEQ ID NO: 5359 - DNA, 476 bp, Homo sapiens
  SIMILAR (2)..(244): 811254mologous to Mus musculus putative,accession number AK009235,Smith-Waterman Score=332.
tgaggtacgagtgtatgacctgacacaatatgagcactgcccagatgatgtgctagtcctgggaacagatggcctgtgggatgtcactactgactgtgaggtagctgccactgtggacagggtgctgtcggcctatgagcctaatgaccacagcaggtatacagctctggcccaagctctggtcctgggggcccggggtacccccccgagaccgtggctggcgtctccccaacaacaagctgggttccggggatgacatctctgtcttcgtcaatccccctgggagggccaggcagttactcctgaggggctgaacaccatccctcccactagcctctccatacttactcctctcacagcccaaattctgaagttgtctccctgacccttctttagtggcaacttaactgaagaagggatgtccgctatatccaaaattacagctattggcaaataaacgagatggataaaggaaa

SEQ ID NO: 5360 - DNA, 1108 bp, Homo sapiens
  SIMILAR (1005)..(376): 1001254mologous to Homo sapiens pregnancy-specific glycoprotein 13,accession number U25988,Smith-Waterman Score=1136.
gggcactcagagagcaaaagcaaatgtttcaatttttgtttacaaaagtatactttaccaattgctgaagaaaaaaattcataaatctggagggataaaacattcaaaaaatcagcacatttttccaataaaaaattatgaaaacattatccttttgttatttagtccaatgaaatggagttcttttcttctttgtcttgaatttcatgaaggtatcagcctgttcatcaaaattttgaaagttcttagtccagtggtatgatcttgaagttatcaggaacttgtattcaagagtccttttcatagtcttttccataaatctcctgccagtcttcctgaaatacaaaaatgacatcagggctgctacttggattattgaaagcaaaaagttcctaatcctggaggagcaatgactctgattgtcaaggatgtggagctttcctcgccagtggctgagttacgagcagagcaagcatagagcccattatgctttggagtaatctgagggataaagagcttttgtcctgatagctgaaacttcccattaattgtccaagaatactgtgctggtgggttagagtttgcgaagcaggacaagtcgaggttctctcctgaatagtaagaggtgactgaagggaaaattctggggaggtctggaccatggaggagattcagggtgactgggtcactgcggctggcactccctgagttccatatttcacattcatagggtcctgcagtatactttgtgacaccaaatagaaagagggtcctgttggtttcagacagctgcatcctatgagtcatagggaggctctgaccattcatccaccacaggtagcttgcgtccggagtctcaggattacaggttaagatcacagtctccatggcctccctggggtttaagttgctgctggagatggagggcttgggagtctccactgtgagcaggagccccttccatttgatgtgctctgtgcagggaggggctgagaggggccccatgatctctgctgcgtgcatgttctcctctgtggagatgagcctaggatccagaagcttccagagcacggctggtcagctgtgctgtccttcctcctgcaaaaaa

SEQ ID NO: 5361 - DNA, 424 bp, Homo sapiens
  SIMILAR (180)..(407): 1001254mologous to Homo sapiens E2F-related transcription factor,accession number L23959,Smith-Waterman Score=379.
gccagggtgagccccgcgtcccggcgccactcggcccgcgcctctccgcgccgccccgcgctccgcaccgcgccctctccgcgtccccgcccgcgcggccggaccgggcagccagaaaaatcatttttcttctctgggaaggtgaacatttgtagcattgatttcccggatctggtaacatggcaaaagatgccggtctaattgaagccaacggagaactcaaggtcttcatagaccagaaccttagtcccgggaaaggcgtggtgtccctcgtggccgttcacccctccaccgtcaacccgctcgggaagcagctcttgccaaaaacctttggacagtccaatgtcaacattgcccagcaagtggtaattggtacgcctcagagaccggcagcgtcaaacaccctgggtgggtaggaagccca

SEQ ID NO: 5362 - DNA, 531 bp, Homo sapiens
  SIMILAR (428)..(529): 911254mologous to Rattus norvegicus transcription factor,accession number L24051,Smith-Waterman Score=160.
ttacaaattggttgatgcattaaccacgtacatgacgttccacatgagcaccagcaataagcaagttgggtagattttgttgtaagaggagtacatgctgcctgggcgtctgtgaagacaaccatgtgcgggggaatggcctttgttggttgcttgaacacagttgttggttcccatgtcactaacgtatttcccacccgggttacccagtggccccacaataaacacataaaagatctccagtaatgaaaggtagcacgtgctaagttctgtatagtgaaagtggatgagagcctgcgaattcagggaaggtttgtgctggaagcatcgtctgagcagggcagagcaaggtggctgggtgagggatggatctgagcttctttgcttcaggatgccatgaaaggcactgatttctcctttctcattgcccctctcagtagtgccatccagccccaccatggcctcctccacaagcctcccctccaactgcagcagctcctcgggcatcttctccttctcaccagccaacat

SEQ ID NO: 5363 - DNA, 867 bp, Homo sapiens
  SIMILAR (94)..(183): 1001254mologous to Homo sapiens dJ860F19.1.2 (novel protein similar to olfactory neuronal transcription factors (COE1, COE2, COE3, EBF3, OLF1) (isoform 2)),accession number AL035460,Smith- Waterman Score=164.
atggcgggtgttcctgtggggagcacacagccaccaccctgtcagccacagaaaattcttaaggaaaggctcagctctcccaaaacggaaggagcgctcaacgaacccaccatcgattatggtttccagaggttacagaaggtcattcctcggcaccctggtgaccctgagcgtttgccaaagcttggtgaacctccttggagtatcagttcgtcatcaaatcctacccgtgtgctggctgcccttgtaggcagggccacctgtcagaactggccctgtctgggagaaatccacccctcaggccactacacagagccacttgatcgtgcaagggctggccggagcccaccccaggaagctctcagtgtgactcagagccgagtggctgtcctcttggctttgaatgttaaagtggagcgagagttcaagggcaggcatcattctccaagtacattccatggagcactagttctggaagatgctaatgagtgttaccaaaaagaagttggggtttctcattcagttatatttggaaaagactggatgacatacattaagcctttattatgtcaagcacacattgttatcctccagacaggtgactctctgtttcccacaccaatgggaaagacatggagctttctgtatcccgggttcttgccttggtgttctggaagaatcggatcacgtgtgggcttggagaatgagtgcaaggtttcattgagtggaagtagctctcagccaatgggagagccagaagggagatggtcttcccctgaagttggaccactcgccagccccggctctcccctgatagcctgggccaaactccgctttgtcccgcctgtcgatgacctgccagtgtga

SEQ ID NO: 5364 - DNA, 1273 bp, Homo sapiens
  SIMILAR (42)..(410): 971254mologous to Mus musculus early B-cell factor,accession number L12147,Smith-Waterman Score=619.
gtaactagtacatcgtaaccacattacgccagcttggcacgaggggaacaccaggcagattcatttatacagcgctcaacgaacccaccatcgattatggtttccagaggttacagaaggtcattcctcggcaccctggtgaccctgagcgtttgccaaaggaagtaatactcaaaagggctgcggatctggtagaagcactgtatgggatgccacacaacaaccaggaaatcattctgaagagagcggccgacattgccgaggccctgtacagtgttccccgcaaccacaaccaactcccggcccttgctaacacctcggtccacgcagggatgatgggcgtgaattcgttcagtggacaactggccgtgaatgtctccgaggcatcacaagccacgcgatcagggtttcacccgcaactcaagcagcgtatcaccacacgggtacgtgccgagcaccactccccagcagaccaactataactccgtcaccacgagcatgaacggatacggctctgccgcaatgtccaatttgggcggctcccccaccttcctcaacggctcagctgccaactccccctatgccatagtgccatccagccccaccatggcctcctccacaagcctcccctccaactgcagcagctcctcgggcatcttctccttctcaccagccaacatggtctcagccgtgaaacagaagagtgctttcgcaccagtcgtcagaccccagacctccccacctcccacctgcaccagcaccaacgggaacagcctgcaagcgatatctggcatgattgttcctcctatgtgaaagaattgccttgaagaattgtattaatgaagaggttggattctgctacagagagtaatctgatacaagtcccagagtggaacttttaactcaggcctttttaagaggaatcacaataactgcagatttttaaacaaacaaaatcaccgaccttgcaaatactgaaattggaagagggatctgcaagtgcagggtgttggttaaagttgtacctcccaaggtatttggggggatatatttattctgtattgacaaaagcaaatccactttttctttttctttttttttttttaagcttaattctgcaatcatttgtcttttataacccgtaaagctctatacaagggacactataaataagactccatgttttaatttatgatgtttttaaagctgtgtaaaggaagaatgaagtggtgatatttacaaaaaagtaaaaaaaaaaaaaaagaaaaaaagt

SEQ ID NO: 5365 - DNA, 1907 bp, Homo sapiens
  SIMILAR (278)..(367): 531254mologous to Homo sapiens PRO1722,accession number AF119851,Smith-Waterman Score=48.
  misc_feature (1)...(1907): n = a,t,c or g
cccttncattnncccannnnttncaaannnatanccntttggccccttccccnagttttttaccccnnggccttccctnaaaangggncttccagnaanccnnnttaacccancnccatttggnttaaangncccncntgcccttggttggaaaanngattttttctggcntanacaagctttttntaggcncccattaagggggggacccntnnggncnagttattcnccacagaaccntttcttgnatnaaaggaaaatggccccaattttnctttcccggaatttggttgccnacttggagggccattgccataatctcagctcactccaaatctctgcctccctgggtttcaagcgattttccctgcctcacctccccaagcagctggggattncaggaacacaccaccatgcccagctaatttttgtggtttttagtagaaaatgggtttcaccatgttggccaggctggtcttaaactcctgacctcaagtcatccgccctctatggcctcccaaagtgctgggattacaggcatgagccaccaggcctggccgacatttccagtcttgattaattttaattcattaaaaatgtgtcgcatgtgcccaatggctacccatcttggacagtgtccgtctagagaatacaaaatccattcttgcagttgtgctgagctggagggccaagcccatcacgaaccagacgtgggagtgactatctcgataagaaagtgcccagtgcccaatgccctgtggtggaaagagctggtcccaggtgctcaaggccatgggccccatttggagccagaaggtctagggtgaagtcagagaagacgtcccctgcccatatcccatttccagccttgctgaaaagggcaacagaggcctctccctgaggtccctagcctgcgagacccccattctctgcctgacctctgtgttactccttagtgaacaagaaacccagagagaagagaagcccaagaccaatgtgccgaccttggcttccaggagaacagagccttggtcctaaccatctagcagggtggctgagggccctgccatgaaagaggcacaccaggatgaagcaagaggaggtgtttaatgagttctggttcaacacagaggccgccaacggggtctagctatgagtctgtcctgggacccgttcccaccaggccccttgtgggcagtggccaccatccctccctcaggctgtcctggccctcaaggaccccatggcagggccttttccaccatggcctccactgtgctgccatctcttgggaacagggggtcatcccatcctcccaagaaacacttcctcaggcctggccccgatgggctcaggcacacctggcggacatcagaaatggggccctggagtccagaccacaggccagtagttttggggggacagctcctccacctccttccaccggcctatctggggggctctgggtgcccaggggagccgggcacctgaaagggacaaaaagcacagctgaggctcagcctcttgcgctcactggtcaagtggcaaattttggaaaagccagacctcagaggatccttaccagtacgtgggtgagtacgtgggcccagcacagggacaggggcggggacagaaaggtcccttcgctgtcatggggctgtcacggggctgagcctggctcgaggaagcccccttttccagaagagatgtgaaacaagacatacaatttcacagattccagagctctgggtacggccggccaatgctgctccccacccaaccccacccctgggactcttaaaagagggaaacagaacaactgcctagccagacccaggggcccatgaccaagaagaaagcaagccccatgaatgggtccaggccggacgcgtgggcggacgcgtggg

SEQ ID NO: 5366 - DNA, 7641 bp, Homo sapiens
  SIMILAR (1214)..(1540): 661254mologous to Homo sapiens Human myelin oligodendrocyte glycoprotein gene,accession number AAZ29204,Smith-Waterman Score= 318.
gcctccaggattcagcaccatggcggaagacatggagaccaaaatcaagaactacaagaccgccccttttgacagccgcttccccaaccagaaccagactagaaactgctggcagaactacctgggtaagcaggacctttccctggccacatacctcgagtcactcaccgcttgcctcttcctaggggacccatccaccccagcctcctcccttttattctgaacatccttactctggaaggcccatgcctctcatcacctgctgttcaggtccaggctagggttacaaactttagttcctgcaatgattttttttttaatttaaattttttattattattatggtttggttttgtttttttccagagatggggtctcactttgtcacctaggctggagtgcagtggtgcaatcatagctcactgcagcctcaacctcctgggctcaagaggtccccctacctcagcctctcgagtagctgggaccacaggcccacactactgtacttggctaatttttttgtagagaagaggtctcagtttgttgcccaggctggtctcaaactcttggcttcatgcgctcttcctgcctcagcttctcaaagtgttgggattataggtgtgagccaccgtgcctggcccctacaatgatttttttttaagctgtatgtgtgtgcgtactgtaacatgtacagaaagcacataacaaacatgtacagctaaatgaataattctaaagtgaaccccttgtgcaaccataacctggagagaaaagcagacattgcccacactctcatctccctgccttcttttttttttttttgagatggagttttgctcttgttgcccaggctggagtgcaatggtgcaatcttggctcactgcaacctccgcctcccaggttcaagcaattctcctgcctcagtcccccaagtagctgggattacaggcacctgccaccacacccagctaattttttgtatttttagtagagacggggtttctccatgttggtcaggctggtctcaaactcctgacctcaggtgatccacccgcctcggcctcccaaaatgctgggattacaggcatgagccaccgcgcctggcctccccaccttctttatgtcctgtctggaacacagcaccccgctctccccagtagagaagtgacgccactaactgggggttatcacatctttgtttttggttttggtttttgtttttgagactgagttttttgttttcgttgcccaggctggagtgcaatgtcacgatctcggctcactgcaacctcttctgcctgctgggttcaagcaattctcctgtctcagcctcactagtagctgggattacaggcacccgccaccatgcccagctaattttttgtatttttttttttttttagtaaagacaaggtttcaccatgttgatcaggctgatcttgaactcctgacctcaggtgatccacccacctcagcctcccaaagtgctggaattacaggcgtgagccactgtgcccggcctcacatctttgttttttaccaccatgtttattattttattttattttatatatgttatgttgttatgttattgatggagtctgtttcttgttgcccaagttggagtgcaatggcacgatctcagctcattgcaacctctgcctcccgggttcaagtgattctcctgcctcagcctcctgagtagctgggaatacaggcgctcgccaccacacccagctaatttttttttttttttttttttgagacggagtctcgctttgtcgcccaggttggagtgcagtggtgcaatctcgactcactgcaacctccgcctcccagcttcaagcacttctctgcctcagcctgccgagtagctgggattacagtcgcctgccaccatgcctggctaattttttttttttgtatttttagtagagacagggttttaccatcttggccaggctggtcttaaactcctgacctcgtgatccacccccctcagcctcccaaagtgctgagattacaggtgtaagccaccatgcctggccaattttatttatttatttgagacagagtctcgctctgttgcccaggctggagtgcagtggtacaaccttggctcactgcaacctccgcctcccgggtttaagcaattctcctgcctcagcttcctgagtagctgggactacaggcgcgtgccaccatgcccggctaattttttgtgtttttagtagagacaggatttcaccatgttggccaggctggtctcgatctcctgacctcatgatctgcctgcctcggcctcccaaagtgctgagattacaggcgtgagccaccgtgcctggccaattttttgtattttttttttttttttgagatggagtctcgctctgtcgcccaggctggagtgcagtggcgtgatctcggctccctgcaagctccgcctcctgggttcacaccattctcctgcctcagcctcccgagtagctgggactacaggtgcccgccaccgcgcccagctaattttttgtatttttagtagagatggggtttcaccgtggtctctatctcctgacctcgtgatctgcctgcctcggcctcccaaagtgctgggattacaggcatgagccactaggtccagccacttttttgtatttttaatagagacagggcttcaccatgttgtccaggctggtctcgaactcctaccctcaagtgatccacctgccttagcttcccaaagtgctgggattacaggcctgagccaccatgcccggctaccaccgtgtttagattcacctctttgtgaactttatacatactgtgtgtattcttttgtgtttggattttttcattcagtaccttctcagatccatacatgctgtggcatatagcttgctcattttcattgctgtccagttttctacaatttattctatgcctgtacacttgtgtgatttccattttggagttcttacaaatggtgtggctgtaaacatctttataaatgtaattttgctgggtgcagtggctcacgcctgtaatcctagcactttgggaggccgaggtgggcagatcaagaccagcctggccaacatggcgaaaccctgtctctactaaaaatacaaaaattagctgggcatggtggcaggtgcctgtaatcccagctacttgagaggctgaggcaggagaatcacttgaacccaggaggaggtagaggttgcagtgagctgagatcgcaccactgcactccagcctgagtgacagattgagaccctacctcaaaaaaaaaaaaaaatgtgttccaactcttgatctgggctgacttgaacccctttcttcacagacttccaccgctgtcagaaggcaatgaccgctaaaggaggcgatatctctgtgtgcgaatggtaccagcgtgtgtaccagtccctctgccccacatcctgggtatgtgcctcctgccagggcccttgggatgctggggtggggtcttagcagaggggagtgtggtggcttggtgggagctcatctgtgaggggcagagggaggacagggcaccacactgtcccaggactcagtgcctttcctcccgcctagaattacctccctgtctccttctgctgatgcctctcaaccagtcagggctctcagctgaggcgaccagggtgctttgctagatgtagctcactcatgcactctccaaatacacactcagcactgggctcccatccctgtgtagctcacaattctgtgcagtcctgtccttttttattaggaacatttttttttctttttttttttctttttttttttttagacaagggtcttgctgtgttgccaggctggaaaggctggagtgcagtggcgcgatcttgcctcactgcaacctccgcctcctgggttcaagcgattcccctgcctcagccttccaagtagctgggactacaggtgtgcaccaccatgcccagctagttttttgtattttaatagaaacggggtttcaccatgttagccaggatagtctcaatctcctgacttcatggtccacctgcctcggcctcccagagtgctgggattacaggcgtgaaccaccgtgcccggccctattatgaacattttcaaagcagagataataattcattgacctcaaatacatccatcacccaaagtgaatagttatcaggatttatccacggtttcttcatctaccccttttcgttttcttctttcctttgctgaagtattctaaagcaagtcccagacacgtcatttcacccctgcctacttcagtgtggacttctaaataatgacacagtaagacagtcctttcagccctgatctgaccaaatctgtcgtcaatatttaatagctctttgctatgcccctgccctttgtttaaaaaaaaaaaaaagtttttaaagacaaggtctcatgatgttgcccaggctagactcgaactcctgggctcaagtgttcctcctgtctcagcctcctgagtagcttggactacaggcatgtgccactgtgcctgtctctctctctctctctctctctctctctctctttgtcgccctctcgctctctcttgctctctttctctctcgctctctctttctcactctttctctctttctttcctttctttcttttctttcttgagccttgctctgttgcccagactggagtgcagtagcatgatctcagctcactgcagcctcagcctcctgaatagctgggactacaggcatgagccaccacacctggcccaatttttgtattttttttgtagaaatggggtttcgccttgttgcccagactggtctcgaactcctgagctcaaagcagtctgcctgcctcagcctcccaaagcgctgggattataggcatgagctaccgcacccagctgaatctttcaaaataaaaaaaattaccctttaacttggcaattccacatctagggatgctacaaaaatcttcatgtacaaagatgcccattgcagagttgttcgtaatggagaatatttggaaataacccaagttaaaacattgatcttgatagtctttatggagactatggtgatctacatgctagcacacagaaagaatgctaagacacaggaaaagtaagttgcagaacaatctatatagtaggagtcaatttgcaaggatggagtttttatggtgtggtatgtgtatgtaaataaagtaggcacataccgctggcacttattatgggccagctatgttgttagacctttttttttttttttttttgagatggagtcttgctctgtctcccaggctggagtgcagtggtgcaatctcagctcactgcaacctccgccttccaggttcaggcgattcccctgcctcagcctcccgagtgtctgggattacaggcgcctgccaccatgcccagctgatttttgtatttttagtagagacagagtttcaccatgttggccaggctggtctcaaactcctgacctcaggtgatgcacctgcttcggcctcccaaagttctgggattaccggcgtgagccaccacgcccagccatgttagcactttacatcacataaggtcaacatgctaacacaaccgtatgaggtaggtactattgttagtatcctcattttacaaaattggaaactgaggcccagaaaggttgagtaacttgcccaaagtcacacagctaggaagtgatggagcagggattcagattcagcctctctgttatccatgctttcatccactgttcgttcttgcaccagtggtcctcaccctttttggcaccagggatgagcttcatggaagacagtttttccacagacagggttggggatggtgtaaggatgagtccagcatattacatttattgtccactttatttctgttattattacattatataataaaataattatacaactcaccatactatagaatcagtgggagccctgagcttgttttcctgcaactagatggtcccatctgggggtgatgggagatagtgacagatcatcaggcattagattctcataaggatcatgcagcctagatccctcacatgcgcagttcacaatagggttcgcactcctaagagaatctaatgctgccgctgatctgacaggaggtggaactcaggcagtaatgcgagcattagggagtgcttgtaaatatagttgaagcttgtctcgctcacctgccactcacttccagctgtggggcccagttcctaacaggccacagaccagtacctggtaggcactggttggggctcggggacccctgccttatagcataaaatgtgagcgtgtatgtatataaaaacgtttatgcttgtaactgcttgtgaggtccacaaagagtagagtgttactttcagggagtgttaacttgacataggccttatatgggccttttcattttttttttttttttttttttagagacagtcttgctctgtcaggctggagtgcggtgtgcagtggtagcatcatagctcactgcagcctcgaactcctgggttcaagcagttctcccacctcagcctccctagtagctgtgactacaggtgcatgccaccatgcctggctaagttttgtattttttgtagagacagggttttgccacattcaccaggctggtctcaaactcctgggctcaagcgatcctcccacctttgcctcccaaagtgctggaattataggcgtgagccaccatgcccggcttattttttattttttgtagagatgggggtcttgccgtgttgtccaggttggtctcaaactcctgagctcaagcagtcctcccacatcggccccgcaaagtgctgggatgacaggtgcgagtcaccacacccagcctccatcattgtttatactgagcatcgcctgtggtcagtggtgggattgcactgtgtattgtttggcaccttttttgcacttgactatgtatcttgaagatccatccattcatgccagaacataaatcagcctcgttttttttcacagctgcctgctattccatctcccctgtttggacaaacagcatagtgttgacttgaggttttcaaagcagggcccacccttggagctctgtacagtgacacatctccccatcgacagctctgcagtgggcctggggttttcctgcccattactctcctcccagcatgtcagcttgttcagaacagtgatttctgtcttttggggtcactgctgattccccggcctctagaatagaggttggcacacagcaggtacctgtggatattggttgaacaaacaggtgggcaaagtgaggaagataagaagtccatccgttcagtttccccactgcggagggaataacactgtctttccacaggtcacagactgggatgagcaacgggctgaaggcacgtttcccgggaagatctgaactggctgcatctccctttcctctgtcctccatccttctcccaggatggtgaagggggacctggtacccagtgatccccaccccaggatcctaaatcatgacttacctgctaataaaaactcattggaaaagtgagactatgcgtgtgaacgggccaggcagtggcaagaagctgggctggaatcagtgccctgaccagggaggggcttgaatgagta

SEQ ID NO: 5367 - DNA, 703 bp, Homo sapiens
  SIMILAR (142)..(288): 541254mologous to Homo sapiens Human myelin oligodendrocyte glycoprotein gene,accession number AAZ29204,Smith-Waterman Score= 111.
ggccagactgggcaacatggtaagaccctgtctctacaaaaaatacacaaattagccacatgtggtggtgcacacctgtagttccagctactcaggaggctgaggcaagagaatttcttgagaatttcttgagcccatcaacaggttttgaatgttccagtcttttttttttttttttttttttttttttgagtcaggggtctcattctgtcacccaggctggggtgcagtggtgcgatcatggctcactgcagcctcaacctcctcgggcgcaagccatcctcccctctctgcctcctgagtagctgggacaaccatgcccggctaattttttttacaagaccactgttaaaagcccggaagaatcctgcagctcgctgtggtgggctgttttgcgtgtgctagagtctattcagcatttcagacagaaaagcctcagcattcctcttctgtgggtctccaccgtagctcctttgaaatctctgctttctcacactttcccatctgagtctttgtgccatggccgtcccctcctctccaatacgaagagcccacactcagtttccctccctcctcctccatcccacactgcccgagcacctcacctcccaatgactgactcgtccccggtcttgcacacacctggggagtgtagctggcctgtcctgcacaccagccttgcaggctcagtgagtagaccatc

SEQ ID NO: 5368 - DNA, 6998 bp, Homo sapiens
  SIMILAR (6997)..(4013): 1001254mologous to Homo sapiens huntingtin interacting protein 1,accession number AF052288,Smith-Waterman Score=5027.
agtggccgcaatcttcggctcacatccaacctccacatcactgggttcacgccaattttcctgcctcagcctccctgagtagcgtgggacataacagcagcccgccaccgcgcccggctaattttttgtatttttagtagagcacggggtttcaccttgttagccaggatggtctcgatctcctgacctcatgatccacccgcctcggcctcacaaagtgctgggattacaggcgtgagccaccgcgcccggccaaattttttttttttttttttttttgagatggagtctcacactgtcacccaggctggagtgcagtgatgcaatcatggctcactgcaacctcaaactcctgggctcaaggaatcctcccacctcagcctcctgagtagtctaaagattacagcacacaccaacaggcctggctgatttcttatttttatttttatagagacagggtttcgccatgttgccaaggctggtctcaaactcctgacctcaagtgatccacccgcccctgcctcccaaagtgctgggattaaacgtgtgagacaccatgtctggccttctttctcttatgtaaacaaacatcttttctctagaggtctcagggcactgtcttacaaacttaagtaacagatgcagctgttttttaacttcttgtcgatcctaagccatgattttgttgctgtcccatcttgtcatgacccatttacgctcacccgagacttgtcactagtgatgctcagtgactcatttagaaggcttgcaggttcatttttagctttaagatgtgattcccgttttaatccaaggtgtgtcattaaatagctcttcatcttcatttttagaagagtcacaataggacaatttgattttgtctagagaatggggtagccattctaatctgagctattacgaaagtaattatgtgacatctgacagctacttcctcatgtgacactgaattagcctctgcttctgtttaagtgctttcttaaccgttatgactcaggctaagtcgatgaagtttttaaacatttctgtggcttctttttagagacaggatcattcagataattttttgtttgtttttaaagagatggagtctcgctctgtcactcaggctggagtgcagtgggaaatcatggctcattgcagcctcaaactcctgggctgggctctgacacagaatctttttttttttgagcacgggtctcactctgtcacccagggctggaggtgcagtggtgcaatcatggctcactgcaggcctcaaactcctaggctcaagtgatcctcccaccttagctccccaactagctgagactacaggcatgcaccatcatgcccggctaattttgtttttgaattttagtagagatgaggtcttgctatgatgcccagcctggtctcaaactcctgagctcaagcaatcatcccgtcttggcctcccaaagttctgggattacaggcatgcgccactgtgcccggctgggcagagaatcttaatttgatccattacactagactgtttgccccatttgtaatttttttttttttttgagacggagttttgctcttgttgcccaggctggagtacaatggcgtgatctcagctcactgcaacctctgcctctggggttcaggtgattctcctgtctcagcctcctgagtagctgggattacgggcacccgtcactacgctcggctaatttttggtatttttagtagagatgggggtttcaccatgttggacaggctggtcttgaactcctgacctcaggtgatcctaccacctcagcctctcaaagtgctgggattacaggcgtgagccactgtgcccggccaccccttggtaattgggaacatatgagttagaatggctgagatctagaagtgaggactagccacttttggaaatgttgacccgcatcaagaacacaccgattggtttagttgccacaactgggacagggaagccacgcaccattccttctgagccttgaatcaaaaaaatactaagcagaaagcagcattcaacattaagactgcccaatttctagtgctgatacttccttaacccagtatggaggtcacacgtctgagtatggtcatccgaggtcctgggagagagttttttgaatgtcccacttagaaaatgcacagagagggagttggggaggggggtgggctagggagatgggggttggttcacagtgatcaaacagaagtctcacaacccgtcatgtagcaaaacctagcaatattctgttggagcagatcctgggaagtgcttgatggctaccaccaatgagttgctatagataaagaaggaagacgctgttttcccaagatcagaaggtcacttaaatgctggggtccatctagaagaggaaaagtgctgttgggctgcccatccctggcaagctgttcatgtgccctctgtcctcatcctgtccacagggcagcgagagcctggggcatgtggctgaaaggagttggagccgctggctctgtcctttctcattttctctgacccaagagctccaaatgatctccttgctttgggatccaagtcagtaacagtccagcaccttggctttcttctgattcttgaaggctgatgtagccgggcagaaagatgagctttgctagagtcacacctgaagttctgattgctccaagcatctctttgtaggctgttgctgcttaagggaggttagtaataaatactaagggtagcaaaccaagtatagggttcttccctgatgggagcaattgcatctgatcttccgggtttgtcaattgcgtagaaagtggaacgatcttcctattcaagaggatgccaaggcagacgtctgcagaaaggagttgggaatcactcccacactccgtctctgggccaagggagacggcccgcttgacagagaccattcacggacagttcattccggcagggaagtagtgttgttgatctcaccagctccattcaagcatgtgatcaagtttttgagcctcgtcacgggaactgggctgtgtgaaccctcttgtccctctttctgttgtcttctcccttgtaaaggcggacagaggctttccgccgggattcagctttaggagggaaaggcactcactctccttctgctttttgaggaaagctgtcactcagcagctccgcctgaccctggagcatggactgggtgggccagcacttggtcagtgtggaggcggagatggagcaccgagaggcctgggcagcaccatcgctggagctaccacagttggggggccctggagactcagccccaggggtgtgccctttgggagagttggctatgtgagtgaaacttaaaaaaaaaaaacaaaaccaaaaaacccaaccaaccaccataagaagcagtggaaatccatggcactgcccaaagagggggagaatggctttggcattcacagccaggacactcctgccgtccttctgactgtgcagatctcagggtagtgtcctggtttggaatccatcagccctctgatgctcacaagtttgtgcaaatgatgaaactgaaaagactgagaagaaaacagaaaagaaaaggcataagatcttccctttccaagctgtcaacaaacaacaagcagctcctctattaaggatacccattgttgtgggggtcaaatagtcagcaggactggatgttggtcctctctgttgagtggccctgccccccaccacccctcttcgtacctaggcttgctcatgggcagcactggccagcctggatgctaactagggaggcgggaaaagaacagagatgaccatgggtccaaacagaaagggtgtcgctatggagggagtctttgggaagtgtcatgcatgtcctcggcactgggtaatggcagtggtgtggctgcccctgggactccaaggatttggcctgtggctggggaaataacacacacgagataggtaacaaggatttacactgacatatggggtgttggtttggctctattctttttcggttaccacttcttgcagtgtaggtggagatgcctctgttccttcttcccagccctcagcaacaccagcaagctcgtagtgctttttccgaagctctcccagtttttgacgctccttctgcaattcattttctagctctagcaccctaacctgagaatccatctcttggcgtttgatctgtgtcagcgtcatgcttgagaagtccatgttgtctgtctcttcgatctgtgatttgccggaaatggttgaggccacaacgccggcagtggcctggttcactccccgagaggcctgctgcagctgggctaggttggggctgtccttatcagctttcaccttggatgcagccacaagctgggctgtgctagcagcaatttcatgagaacacaccattagctcctcaaatttccctctgccttgtaccaccagatcagctgcatccaccatgacagtggctccccagcccacagccttggaggctgagataagtccttctgtccatcgagagttcttggcataaaactctttaggggatgctgtacccctgccgctctccacaatctctctctggaggtccttagaggccacgatgagcacctgaatagcttgcatgaggctggtacagcaaccaaggatcctttcattcacctccaatttgactcctgtgtctcctgctcgggatttgctgagcatctcctctattctggccgtggcagtttcaatagcagctgaagtggccgccatctccttgtccaccaggtcccccagctcctcctgcttgatgtccagtcccctgggcaggagctcctcgccgatggccttgatcttgctcaggcagttcctcatggctgtgctgtcggcattctcaaggcttccctcttcctccagggaggccaggtaggcgagggtttccctgccatactgcttacaggcctcggtcagtgagtcggcaggctcaggtggggctctgaggcaggtggtggcaccatgagcaatggcgtcgctggtcaagtgggccagcagggttatggaatggagaagtccactgatgtcttctgggcaggccagatactggctccagcttttctccagttgctcgatgcagctggaaatggatgtgaccgtggagaggaggtgatctgcagacccagcgcagctgatgagaggaggttcttcaagctggttcagggcgtcttgtatcacctgctccgcagccttcctggaccccaccagaagcatttttcgttggtctttggcaagctggcacatagattcctctgtgctggccagtttgagctgagtgtcctgcagttctttccgaagagcagataattcctcctccctatgagctgcgccactcaccaggctgtcccgctccttctctagctcggcgaactcggctgcccagtttgcttctgactgggcagaagtttccaggctgccttgcagaacctgaagctcccgttggcttgtggcaagttcctgcttcaagctctctagaacttccagctgttcttgagtcttccgctggccctggtcactgatgcgctccaacgaatcctccagctcttttttctctcgttccaaatctacctgggcttgtctggccatggacacctgtttggtcacctctgcattcttccgcagcaggtcagcgtggttctgaaccagctcgctgtacttctcctttagcttgctatatcgctgttcattggcttgagctttcctttctatctcagacaggctccgctgagccttctcggtgtcctcccgctgcctcctgagctcgtccagttctgcccgcaggaattcacagtcgtcggccgcctgctgccgcaggtgctgctgctcggccagatctgcttccagctcgctgacgtggcccttcagctgcagcacaacccgctggctctcagtcttcatgttttctagctgtgccttcaatccactgatctctctgtatagtcgctcaattaagtggtccttctcatccttgttcacaccattttgactgttgaaattgaagggatcactgctgaatgaactgccaaagatgtcatcaaacttgttgtcaaataaattctgctgagaggcatccatgtccatgaggtcatccttctctaggactggctcgctgtcgggggatgaggcctctgcagggatcaccaccacagggctgatatgttctgacagggctgaggctcgcaggaagttgggtgggttctcaggcagctgggggatctgaatgagccgcttgaagtactgcaggttgctggagcggtagaacagatctttcaactttgtaaactgctccatgaagcggtcccggtggccttgcagggtgtcagctgggaggcaggagtggagtttgaagagaagcttgacagtgtagtcataaaggtggctgcagtccaagatgacctggatcagcggggcgaggcggcactgccctgctgccgtcacggacacagagcgggacatgtccagggagttgaatactgtttggaagaggttgagttcacactccaggtagtcaaacatctccactgttaactggaaaaagttgttcacgtcactttctccagcctcgtccagctggcggtcactcatctgcaggttgcctgggaacctgggatttttggtgtggtactccatcttggttcttagcagtttcaggtagatgctgcacagctggccatacccctcgctcaggtggccccacatcctgctcatgtcactcaattcatttctgtatctcagagagtccttcaggacgttcgggtgtccatctcggaggagtttgtggaacacatggcagaacttccagcagagcactgggttgctagacagaggcaggcggttgacaacagaccagaaggtctgtgcccctttctcatggtgggtgcccagtatgcacgttctggcgtgtttttcctttacagccacttcctgcgtattaatggccttattgatgctg

SEQ ID NO: 5369 - DNA, 422 bp, Homo sapiens
  SIMILAR (2)..(178): 621254mologous to Mus musculus kinesin light chain 2,accession number AF055666,Smith-Waterman Score=163.
cctcgagcacgccctcaggcccagcagtaagatgctgttaaaatgctcacaggggggcaccccccaggagccccctaaccccagaataaagcgggccagttccctcaacttcctcaacaagagcgtggaagacccgacccagcatggaggcccaggtctttttgtcagccgctctctcagctccagctccatggacctctccccattaagctccctggtgggctagtgttgaagggacagccagtccccagagcgaccacgtggcacacccccctcaccccagccttgcgaatgggcctgttgcttgtcccgcgtgtctctcccccagcccctgtcttttctgttcaatctcagggttactttggccctcgtcatctcagctagagccatggagagtgggcaagcccggtccagctccatcc

SEQ ID NO: 5370 - DNA, 616 bp, Homo sapiens
  SIMILAR (26)..(418): 701254mologous to Homo sapiens complement-c1q tumor necrosis factor-related protein,accession number AF329836,Smith-Waterman Score=432.
tcagctttctcggtggcagtgaccaagaagctacccacgggagcggcctgcccaatcaagtttgacaaagattctgatgaacgagggtggccactacaatgcttccagcggcaagtttcgtctgcggcgtgctggggatctactactttcacctacgacatcacgctgggcaacaaagcacctggccatcggcctgggtgcacaacggcccagtaccgcatccggacctttgatgccaaacaccggcaaccacgatgtgggctcaggctccaccatcctggctctcaagcagggtgacgaagtttggctgcagatcttctactcagagcagaacgggctcttctatgacccttactggacagacagcctctttacgggcttcctaatctatgccgaccaggatgaccccaacgaggtatagacatgccacggcggtcctccaggcagggaacaagcttctggacttgggcttacagagcaagaccccacaactgtatgctgggggtggggggtcgagtgagcggttctagcctcaggctcacctcctctgcctctttttttccccttcattaaatccgaaacctttttattcatccaaccatctatttattcactt

SEQ ID NO: 5371 - DNA, 2353 bp, Homo sapiens
  SIMILAR (496)..(221): 551254mologous to Homo sapiens GK002,accession number AF226045,Smith-Waterman Score=198.
ttaaccgtacgctcatctaacatgatttgagaaattcataaccaggcactcaaatatccttgtagcctacgaaaagtgagtagggtaataatttttgctttgtagggagaactacaaattgatatcttttaatctggccattttttaacatttagctcaatattaacagagaaatgtagtcagtatttagtaaaataaatgtatttttaaaatatttttaggaagctgcagaatggcgactgagtgcttcttgataagtctgcaggtgttagttctatataggctccctttccgtgcttctgtttttgcaaagaccctgattaaatttatttccctcagcagcctgatccttggccccttgagccgactggccatctgggatggagcacgtgatacagctgggaccaagttggttgcatcatcgattaaagctctctgaatctgggtcaatcagcaaaccatcaatctttttattatttacaaaataccacaccatttccaccaaagtatcttgttgaacgtaaaaggtcatattttccacgtttatctatatcttcataggtcttgtgatgaacctatccacataaaatgcaactcttcagaaacatgaaaataagaagtatgcagcattattcaacgtacactgattagcatgagtgctgcccaagcaagtaaaaccaggtctacttacagttgcctccatatcattaaccaattggtatgatttaaaccattcctagtacaacccaccttaggtgggaaggaggattctattaagaaagaattttggccaggcacagtggctcatgcctataatcccaacactttgggaagctgaggtgggaggactgcttgagcagtcctcatctctaggaaaattttttaaaaaattagctgggcatggcaggccacagaataagaccctgtctttaaaaaaattaaaagagaagaatttgtctaaatgacagcaagtctgtgccttctccactgtagaagtatgtggcagcctgaagcaaaataccaaacatttatagccatattaagtactttttggcaggccaactacaatttattaagcaccgattatgcatatagagaccactggaaataatgtagcacccacttcttggtcactatggcagaaaagaaatcaagtattttttcactactctccctttcccctatccctccccccatcaactaccctattctaccagctagcccattccatcttattaactaaaggtccttcagtcctccttccagattgatcttcctaaatgaaggttctgatgggggcattcctctgttcaaaaggctttcaaaggtctgctgactgaattccagattcctcagcctagcatctgaggtcacctatgatgtggctacatccaccttcctaacttaatctttaatcactcccctacatatgcatggcatatataagcaaaccagatcactggccgtttctcaagcctccttttttcctgcctgttgcttatactgttctctctacctgaaacacctcacccagctccacctgccacaacatttcctgcacttctagaaccctcctttacacccctatgaaggctttcttcaaagaatttgtaatcttctcttagtgtctagcattttaggcctgaggagataattatttgtatacttactagcacctttccccacagccatatccggactgctggctttggcacagcatactctatcctagttcgtggcatcacctatactacccaagataataccttacacatagaaggtactaatgaatacttactgagctgtaagacaaacacactgtacttcagcaaaattttagtaaataatttgattcctatacggtaaactgaaaagagaataggctttgtcatcaaacttgggtcctaaccctaccacttagtagctatgcaactttcagcaagctacttaactctacaagcttaaattccctcatctttaatcaagggttgttgtgattataaaatatatatctggcacacaactgtactcaatagattttcaggtatttctcttccctttcccctgtatcaaaacttacaacgaaattcattgagctagattaaaaatcttactcataaccatacttaagcctatattttagaaactaaaatctactcaccctgatatactctgtggaatctggctcaaactgggcaaagcagagattgaggacatcaacatgcctgtcctggctatacatagtctaaaaccacacagcagagttagcatcacatgagaacactgaagttcagcacctgtcctgatgtcatgacaggcctgcccacccacatactggccactctgtgctccc

SEQ ID NO: 5372 - DNA, 460 bp, Homo sapiens
ttgcggtgctgcaacaccctccacctcaatttaattaaggcgtttatttaaaattatcaattaacacagtcggtaaagataaggaaaaagtcagaaggcaccaccccatcaccacccaactgcagtgtggtatccaaggccacaacttgtgggtggtgaccgcagcttcagagatcagatccttccatctttcaccttcatcccgcttcagacgctttaaaagtatcttttgccatgttaccagatccgggaaatcaatgctacaaatgttcaccttcccagagaagaaaaatgatttttctggctgcccggtccggccgcgcgggcggggacgcggagagggcgcggtgcggagcgcggggcggcgcggataggcccgggctggggccgggccgggcggtcccggccgtggcggggtccctgccctgggccgagtggcgccgggcctcgtgccgaattc

SEQ ID NO: 5373 - DNA, 2136 bp, Homo sapiens
  SIMILAR (38)..(274): 521254mologous to Homo sapiens subunit of coatomer complex,accession number X70476,Smith-Waterman Score=178.
cagaagcagcagatcccttctgacctacagagtatgaaacttgttccttgcataaaagaagcctttttgttgaagaatgggtgaaggaaacacttgctgttctgtgccagccaaacaatacccatttgtcaccccaattgaagagagaattctcatggaagagggaaaagccttccccccctcaagatctacagctaaacagaaacttgatggaaaccctgtttctcctactccggtttattggcctctcccccacaccaaacaaagaagaaaagcagcctgatccttggccccttgagccgactggccatctggatggagcacgtgatacagctggaccaagttggttgcatcatcgattctgagaatgaaagggtttaatggtatctaggggttttcttcatttgattcacagtcctataaaagtgtgtgccaacttcaaactaaattacatttcagactttcctcaggctgggagggatttggggaaggaccttcagttttacagtttcaaaagcattttcaggaaaattgactaatttaggcctcacaccaactccgtgaggcagctagggcaggagtcactgcaggaagtgtccaatttatgaaagtgaatatattccaaatgtggctatattctttttggaaaaagagcaccatttctcacagaaacagcattcctaatggtagacaatttccaggccagcttacttcaccagcatgtaatagtctaatccaactcagaggacagaaacacagcttcatcccacataagcaggagggtggtggtcacagggatctcaaagtcacttgcctctaagtgacattttgctaacagacaaatgcctctacaagaggccccctaagattcccaaggaaaggattcacaggaacgcattagtaaaatagcatcctagtgaagcaaatttgaaattatacacacacatcagacaaaaaggaaaatcgggttctacatcagcaatcttgtcttaactttcagcatcacacaactacctatgaagaagacagaacaagaattcagttcttctggtctgtacttctcagaaatgtataaacaatttttatcaacattaaaactgtcctagcaaaaccaaacaatcactatcttttcacacagctgacactttcccaccatttgccatctcatcgctgggaggggcacaggaaaaacggacacttcaaaatgcttgtgcttttgagggtctgctatatacacttaggtggaactactgggcttccagttggggaatgggaggggctgaggacaccctaattcagtgcttccgcagctagcactcttcagccttccctgacgttccccttacctgaactgggggatgaaaagcaaggtgaacagtgggaagaaggacaagaattattcaagccttggtagccttagagaaatgctctgggcttatactgaggctcatctaccctaaaggccatctctcaggaaaacagagctgttgtatcataaagcttttcagggggaaaaaaataaaaaatgttcatcacaaatctattgtgcttgttataatctaacaaagtccactaaatgtagtaacgaaatgtctccccaataaaaaattaagattccctttggagcttaggcatgtggccttataaagagcttaactggactgctacctgttggtatgttcagggcttcattaggttcatgcttaagtataatgcctgtgccctcacggacccattttaaatttggcttaacaccccacccatacttaaagagcaaataaattatatttcggaaaagattttaaaataatcctcaatataaaaacccaacagtggggaactgagtctggaataaatgtgtgcagaatccctaattcttttcctgagctcccactcagtgaggatatggcacccctcctactgtcccagccctgtggtttgcagtaagctcactccttctgttcagaatgaccacaggagggcctttacctaggaatagcaggaaaagctaagtaagtactcaaacttccctcccagtaagcatgaattgcttcagatgtaaagcttacatgtgatgagtaatactataatatcatacattaatatatcctaactaaactttaattttcaaacatt

SEQ ID NO: 5374 - DNA, 722 bp, Homo sapiens
  misc_feature (1)...(722): n = a,t,c or g
ttgaaataaactttccgcccccttaaattnaaagatcttttttttttttttttttttgcccccccaattcaaaattttattcaaaagacccacggggttacgggttccaggaaagggaaggagggccctggggggaagccccaaaggggcaaagaaagcatggccaacccgaaggcttccaagctttaacgggtatttggaaggttcaagcaacggtgcttcaacagaaagcccaggaaactttgtcccagggaagacgttgcaaccgccaggggttgaactcggccggggaaggtggacggcccagggtcaaccaagcaggccagtggctttaggagcttgaaagttgaaccgggtccacccgaaagcttgtgcgccgtgcaggtcgctcaggggcggacagcgccgtttgggcatgtcgtcccacgttggccacggcgtttggtcagcgcgttcggccaccttctttgccgtggcccctttaacctgggcagaaaccgtggctcaggttcgaagtgcgggaagtaaggcttgggtgtggggggagggaacaggaccattcctctccagggcctccgcacacatactgcgcacagcgtgcgcgcccgacctttacccccaggcgggcccttgacgttggtctttgtcgggcaggagacagcaaccatgggtgggttctctctgagtctgtggaattccnccacatggaatatggtctcgat

SEQ ID NO: 5375 - DNA, 401 bp, Homo sapiens
  misc_feature (1)...(401): n = a,t,c or g
ttgtgcccttcccaggcatcatcctcctaccaccaacctggggccccatcttggaatgggggctccttggggccagcccagtgtggctcaccacactcttcnnnnnnnnnnnnnnnnnnnngaaaagggattttggttttgtgcccagggtggaaaaaatttgcctggaggaaattccctggaaccttcggcttcggggttaaaggaaattttcgggcttaaccttctgaataactgggaataacgggggggcccaaaaaccccgggtaatttttggatttggaaaaaagggggggtttaaccattgtggccagggtgggggtaaaacccgggccttnnnnnnnnnnnnnnnnnnnnnnnnnnnnnngggtgggaataacggggggaacctcccccccccg

SEQ ID NO: 5376 - DNA, 401 bp, Homo sapiens
  misc_feature (1)...(401): n = a,t,c or g
ttgcactccgcaagacaccccagtaaactggggcgtcccaaggtggcaagccttcatgaaggcactgcccagctcacaatcctgtgggccaacttcagtcaactctcctttccattagatttgttcctaattaaaagaccactcatnnnnnnnnnnnnnnnnnnnnnnnnnnnnnnnnnnnnnnnnnnnnnnnnnnnnnnnnnnnnnnnnnnnnnnnnnnnnnnnnnnnnnnnnnnnnnnnnnnnnnnnnnnnnnnnnnnnnnnnnnnnnnnnnnnnnnnnnnnnnnnnnnnnnnnnnnnnnnnnnnnnnnnnnnnnnnnnnnnnnnnnnnnnnnnnnnnnnnnnnnnnnnnnnnnnnnnnnnnnnnnnnnnnnnnnnnnnnnnnnnnnnnnnnnnnnnnc

SEQ ID NO: 5377 - DNA, 410 bp, Homo sapiens
  misc_feature (1)...(410): n = a,t,c or g
gnnnnnnnnnnnnnnnnnnnnnnnnnnnnnnnnnnnnnnnnnnnnnnnnnnnnnnnnnnnnnnnnnnnnnnnnnnnnnnnnnnnnnnnnnnnnnnnnnnnnnnnnnnnnnnnnnnnnnnnnnnnnnnnnnnnnnnnnnnnnnnnnnnnnnnnnnnnnnnnnnnnnnnnnnnnnnnnnnnnnnnnnnnnnnnnnnnnnnnnnnnnnnnnnnnnnnnnnnnnnnnnnnnnnnnnnnnnnnnnnnnnnnnnnnnnnnnatgagtggtcttttaattaggaacaaatctaatggaaaggagagttgactgaagttggcccacaggattgtgagctgggcagtgccttcatgaaggcttgccaccttgggacgccccagtttactggggtgtcttgcggagtgcagaaggctttc

SEQ ID NO: 5378 - DNA, 439 bp, Homo sapiens
  misc_feature (1)...(439): n = a,t,c or g
ccttgaatgcaagtggagacaggaaggggactaggggttggccggcgggaggggaggcagggtctggccaaacccaggcagctgccagaaagccttctgcactccgcaagacaccccagtaaactggggcgtcccaaggtggcaagccttcatgaaggcactgcccagctcacaatcctgtgggccaacttcagtcaactctcctttccattagatttgttcctaattaaaagaccactcatnnnnnnnnnnnnnnnnnnnnnnnnnnnnnnnnnnnnnnnnnnnnnnnnnnnnnnnnnnnnnnnnnnnnnnnnnnnnnnnnnnnnnnnnnnnnnnnnnnnnnnnnnnnnnnnnnnnnnnnnnnnnnnnnnnnnnnnnnnnnnnnnnnnnnnnnnnnnnnnnntgcgctcgtccaaactatnncgtgatgatcatgctt

SEQ ID NO: 5379 - DNA, 454 bp, Homo sapiens
ttttcttcatttttattttcaaacttacagtaaacaaaacaatcacttaaattgtcaaaagaacagcaattttacacaatgaagagcatacacaccaagccaaaatacaatagcactcaggtctatatgttgcagtggtgctggcgctggagggaaaggccatgtgtcttcctgggaggcactgaaaggccagccagcatctccaaaatgcaggccattttaacactgctgtgaatgttctggggtcaccaagggggccccttagtggtcagatgcactttgtcacaatgtacacctacatggggtgattactaggcaacgggaggtttcctgaatttcacagccagatggggagctaaaagaaattcctgaacccaacgcgtaaatattttgttctgacaaagtagattcacaagaagacatcaaacacaagacctaatgcaaggggcagtgc

SEQ ID NO: 5380 - DNA, 5349 bp, Homo sapiens
  SIMILAR (307)..(1779): 801254mologous to Mus musculus ubiquitin specific protease,accession number AF229643,Smith-Waterman Score=2216.
gcagccgcagctcgggggcggtgcctgccttgcagcctcccctcggcgatcgcgcagccccatctttgtccggcctccgcgctttgttctcggcgcccgggccttggccagcctggccagccgccgagcagcccccacgccgcgctggcgtcgtcctcgcctccctcgccgccgccccccgcgcgcggccgggccttgccccccatggtgtcccggccagagcccgagggcgaggccatggacgccgagctggcggtagcgccgccgggctgctcgcacctgggcagcttcaaggtggacaactggaagcagaacctgcgggccatctaccagtgcttcgtgtggagcggcacggctgaggcccgcaagcgcaaggccaagtcctgtatctgccatgtctgtggcgtccacctcaacaggctgcattcctgcctctactgtgtcttcttcggctgtttcacaaagaagcatattcacgagcatgcgaaggcgaagcggcacaacctggccattgatctgatgtatggaggcatctactgttttctgtgccaggactacatctatgacaaagacatggaaataatcgccaaggaggagcagcgaaaagcttggaaaatgcaaggcgttggagagaagttttcaacttgggaaccaaccaaacgggagcttgaactgctgaagcacaacccgaaaaggagaaagatcacctcgaactgcaccataggtctgcgtgggctgatcaaccttgggaacacatgcttcatgaactgcatcgtgcaggccctgacccacacgccacttctgcgggacttcttcctgtctgacaggcaccgctgtgagatgcagagccccagctcctgtctggtctgtgagatgtcctcactgtttcaggagttttactctggacaccggtcccctcacatcccgtataagttgctgcacctggtgtggacccacgcgaggcacctagcaggctacgagcagcaggacgcccacgagttcctcatcgcggccctggacgtgctccaccgacactgcaaaggtgatgacaatgggaagaaggccaacaaccccaaccactgcaactgcatcatagaccagatcttcacaggcgggttgcagtcagacgtcacctgccaagtctgccatggagtctccaccaccatcgaccccttctgggacatcagcttggatctccccggctcttccaccccattctggcccctgagcccagggagcgagggcaacgtggtaaacggggaaagccacgtgtcgggaaccaccacgctcacggactgcctgcgacgattcaccagaccagagcacttgggcagcagcgccaagatcaagtgcagcggttgccatagctaccaggagtccacaaagcagctcactatgaagaaactgcccatcgtagcctgttttcatctcaaacgatttgaacactcagccaagctgcggcggaagatcaccacgtatgtgtccttccccctggagctggacatgacccctttcatggcctccagcaaagagagcaggatgaatggacagtaccagcagcccacggacagtctcaacaatgacaacaagtattccctgtttgctgttgttaaccatcaagggaccttggagagtggccactacaccagctttatccggcagcacaaagaccagtggttcaagtgtgacgatgccatcatcaccaaggccagcatcaaggacgtcctggacagcgaagggtacttgctgttctatcacaaacagttcctggaatacgagtagccttatctgcagctggtcagaaaaacaaaggcaatgcattggcaagcctcacaaagtgatcctccctggccccccccctcccccaagcctcccaccgcctccccggcctggtgacaccacctcccatgcagatgtggcccctctgcacctgggacccatcgggtcgggatggaccacacggacggggaggctcctggagctgctttgaagatggatgagatgaggggtgtgctctgggtgggaggagcagcgtacacccgtcaccagaacatctcttgtgtcatgacatgggggtgcaacgggggcctcacagcacagagtgaccgctgcctggcgttccccagcactcggtgtggaaaggcccctacctgctgtaagattatgggtccatgaaagcagtaagctggacacagaggtgtagtgtgcgggacagagggccttgcagatgcctttctgttggtgttttagtgttaaaatacggagagtatggaactcttcacctccattttctcagcggctgtgaagcagcctcctagcttcggaagtacggacactacgtcgcgttttcaagcgtgtctgttctgcaggtaacagcatcaagctgcacgtggaagcatctcgcggttttctagaaacaggcattttcttatccctctcccgctcctttttccacaaaggtgaatttcataaatgtaatactagtaaagtgaatgaattactgagtttatacagaaatttaggtaacttctcctttagtctcaagagcgagtcttgctttttaatgggtgccgtttatgttgctgcccgccctgtgtgcctggctcctctgggtgccttggtgtctgctggtggctggcagtgggcgcagcggaggagagttgtgctgcagctcatacggtgtgtctgtcatctcagtctggagtaaatgcagtgtctgccggtgtctgatgggttctgtccctcgtattttctttgccttctatcccattgcctggctaccgctgcctggcagccaagggtgttggtcgcgaagctggagtggcctctggtggagcctgcatcttgtctcgtctgcctctgctttacatttggtgtactttcgggcgtggtggcagtaaaatgacaccgtgattgagcttgtcagcagagctgaaagagaaagtagaaggatgtgcattgtttcttgtaagatatcttgcatgtatctgtgtattcaaattcaaacagagatggtttgtccatttgtccactgagaaattataaactagggacaagggggaggaaaagtactgaaatacagtttatgaagcaagtgtgtctcgggctgtgcttgtcccaggagccccagcagcatctgaactgaggcttcttcagtcctgcaggaacaggatcatctgtctcagcggtgggcagatgttttcatagacagccagggagtaaacactgttggctctgtgggctgtatggtctctgccataaatagtacagagatgtggctgtgtctagtacaacttttagacacagaaatctgaatgacatatattgttctgtgtcaagaaacttagattttttttttaactatttaaaaacgtgaaacctattcttagctcacaggccatggagaagctggtggggaccagacccagctccttagctggctgggctggggagggggcagtgacagtggcagctgctactcactgctcagtgtggaaaacacaggacttggcaatcacagcccgcagaaccatcatgtgtggcagaagcctgagggatgcggtttcttgcccacgtgctctgttcattttctgttgtttttctgcacttaaagaattcacatggaagcatgttttataaaatgaattaccagagaaacagagatgggccgagattctcagaaatggtcccatgtgaccaagttctgctgtttgggtgacagtgctttgaagatctcctttgaggatgtgcagtctttttttttttttttttttttttgagatggagtttgttgcccaggctggagtgagtggcacagtctcggctcactgcaacctccacctcctgggttcaagcagttctcgtgccgcagcctcccaagtagctgggactacaggcatgcaccaccacgccaggctaatttttgtatttttagtagagatggggtttcaccatgtctcaaactcctgacctcaggcgatccacccacctcagcgtcccaaagtgctggggattatagggcgtgacaaccggcacctgggccttatggagtggtctttttaattagggaacaaatctaatggaaaggagagttgactgaagttggcccacaggattgtgagcctgggcagtgccttcatgaaggcttgccaccttgggacgccccagtttactgggggtgtcttgcggagtgcagaaggcttttctggcagctgctagggttttggccagaccctgcctcccctcccgccggccaacccctaagtccccttccctgtcttccacttggcattcaggggtgggctgctgttctggagaacatttagaactgggaagagagaatggagtcacatggatttttggtgggcattaattctgaacttttcgtatccaagttaagtcccccttaattccactgtgggcattgcctttctaaagcagttacctgattgcctgcttgcttgaagaagctgcttcacaggaggccggcggcggccctgggcactgccccttgcattacggtcttgagctttgatgtgttcttgtgaatttactttgtcagaacaaaatatttacggcgttggggttcagggaatttcttttaagctccccatctgggctgtggaaattcagggaaacctccccgttgcctagtaattcacccccatgtaggggtgttacaattgtgaccaaagtggcatcttgacccactaaggggggcccccttgggtgaacccccagccacattccacagcaatgttaaaaatggccctgccattttggaagaatgcctggcctggccttttcaagtgcctccccaggaagacaacatggccctttccctctttcagatgccctgaaggggagtggttttgagggcaggtgaatgtgctggggaagtgtggggcgggccctcccctctgggccccggggccctcctggtggacccttggctcccctccgttggacctggggcttccgtggtgaagcactgcaagcctcccctgggcattcccctccagcgcccagcacccactgcaacatataagacctgagtgctattgtaattttggcttggtgtgtaatgctcttcattgtgtaaaattgctgttcttttgacaatttaagtgattgttttgtttactgtaagtttgaaaataaaaatgaagaaaaaaaattccaaatgactgtgctgtggttgggaagactttatttaccaagatgtttactcttcctttccccttccattttgaggagctgtgtcactcctcctcccgaagcagtgctttgtagtctctcctatgtcataataaagctacattttctctgagaaaaaaaaaaaaaaaaaaa

SEQ ID NO: 5381 - DNA, 408 bp, Homo sapiens
  SIMILAR (9)..(341): 931254mologous to Homo sapiens sickle beta- hemoglobin,accession number M25113,Smith-Waterman Score=536.
cagacaccatggtgcacctgactcctgtggaaaagggtgccgttactgccctgtggggcaaggtgaacgtggatgaagttggtggtgaggccctgggcaggctgctggtgggctacccttggacccagaggttctttgagtcctttggggatctgtccactcctgatgctgttatgggcaaccctaaggtgaaggctcatggcaagaaagtgctcggtgcctttagtgatggcctggctcacctggacaacctcaaaggcacctttgccacactgagtgaactgcactgggacaagctgcacgtggatccttgaaacttcaggctccttgggaaacggcttggactgaatgctagcccataaatttgggaaaaaaatttcccccaaccagggcaagcttggttaatag

SEQ ID NO: 5382 - DNA, 779 bp, Homo sapiens
  SIMILAR (169)..(507): 421254mologous to Homo sapiens beta-globin,accession number L48932,Smith-Waterman Score=135.
ccactgaagcgctcagatggctgtaacgacggccgacccacgcgtccgcccacgcgtccggacacaactgtgttcactagcatcgctcatacagacacgcatggtgcatctgactcactgaggagaagtctgccgttactgccctgtggggcaaggtgaacgtggatgaaagttggtggtaaggccctgggcaggctgctggtggtctacccttgggacccagaggttcctttgagtcctttggggatctgtccactcctgatgctgttatgggcaaccctaaggtgaaggctcatggcaagaaagtgctcggtggcctttagtggtgggcctggctgcacctgggacaacctcaagggcacctttgctcacactgaagtgagcttgcactgtgacaaagctgcaccgtggatccctgaagaactttcaggctcctggggcaacgtggcttggtcttgtgtgctgggcccattcacttttgggaaaagaatttcaaccccaccagttgcaggcttgcctaatcaagaaaattggttggcttggtgttggctaaatgcccttggccccacaagtaatcacttaagcctcgctttccttgctggtccaatttccaattaaaaggttcctttggttccctaagtccaactactaaactggggggatattattgaaagggccttgagcatctggattctgcctaataaaaaacatttattttcatcgcatacaagaataaaacaagcgcggccgattaagaggatacttcaggggcgcaagat

SEQ ID NO: 5383 - DNA, 320 bp, Homo sapiens
  misc_feature (1)...(320): n = a,t,c or g
nnnnnnnnnnnnnnnnnnnnnnnnnnnnnnnnnnnnnnnnnnnnnnnnnnnnnnnnnnnnnnnnnnnnnnnnnnnnnnnnnnnnnnnnnnnnnnnnnnnnnnnnnnnnnnnnnnnnnnnnnnnnnnnnnnnnnnnnggggtttttccaaggggcccaaaaaaaaagggttcacccaaaaggtccccccgggaaatcccggttttaaaaattttttcgggcgggcccggggggttcaatttggaatccccaccatttgggaggcccaggggggccaaattgttggcccccgggatttcaaacccccccaaacaacccgggt

SEQ ID NO: 5384 - DNA, 337 bp, Homo sapiens
  misc_feature (1)...(337): n = a,t,c or g
aataaaaaaagccttatagcatgaataactaagggagaaaaagaagagtccaataaggacttcgcaatcatcaaaggccccttaaaatttaccccgtagcnnnnnnnnnnnngaatcctcaaacaattatcaactcttataagcacacaaactgcaaaaagtaaaagaaatgggtaaactcctggaaacacccaacctcccattattgagccagaaagtagctgaacccctgaaccaaccaataacaagttctaaaattgaaacactaataaaaaaaccctaccatccagaaaagagctatgggcatgatgaagtcacagccaaattctctcgtgcc

SEQ ID NO: 5385 - DNA, 2790 bp, Homo sapiens
  SIMILAR (10)..(2349): 1001254mologous to Homo sapiens striatin,accession number AJ223814,Smith-Waterman Score=4048.
gcggccgccatggacgagcaggcgggtcccggcgtcttcttcagcaacaaccacccgggcgccggcggtgccaaggggctcgggcctctggcggaggctgccgcggccggcgacggggcggctgcggcgggggcggcccgagcccagtacagtctcccggggatcctgcacttcctgcagcacgagtgggcccgcttcgaggtggagagagcccagtgggaggtggagcgggcggagctgcaggcccagattgccttcctgcagggagaaaggaagggccaagaaaatttgaagaaggatcttgtgaggaggatcaaaatgttggagtatgctcttaaacaggaaagagccaaataccacaagttgaaatacgggacagaattgaatcagggagatatgaagcctccaagctatgattctgatgaaggtaatgaaacagaagtgcagccacaacaaaacagccagttaatgtggaaacaaggtcgacaactactcagacagtatctacaggaggtgggttatacagatactattctagatgtgaaatctaaacgagtgcgagctttgttgggcttttcaattgatgtcacggacagggaagatgacaaaaatcaggactcagttgtaaatggcacagaggctgaagttaaagagacagcaatgattgcaaaatctgagttaacagattctgcctccgtgctggataatttcaaattccttgaaagtgcagctgcagatttcagtgatgaagatgaagatgatgatgttgatggaagagagaaaagcgtcattgatacttcaacaattgttaggaaaaaagcattgcctgacagcggtgaagatcgagatacaaaagaagctctaaaggagtttgacttcttggttacatcagaggaaggagacaatgaatctagaagtgcaggcgatggaacagactgggaaaaggaagaccagtgtctcatgcctgaagcctggaatgtggaccagggagtaattaccaaactcaaggaacaatacaaaaaggagagaaaggggaaaaagggggtgaagaggcccaataggtcaaaactacaagatatgcttgctaatttgagagatgttgatgaacttccttcattgcagccatctgtgggttcaccttccagacccagcagctccaggcttcctgaacatgaaattaatagggcagatgaagtggaagcattgacatttcctccttcttctggaaagtcattcatcatgggagcagatgaagcccttgaaagtgaactgggacctggagaactagcaggccttacggtggccaatgaagcagactcactaacttatgatatagcaaacaataaagatgcattgaggaagacatggaaccctaagtttacattgagaagtcactttgatggcatccgagcccttgctttccatcccattgagcctgttttgataacagcatcagaggatcacacattaaaaatgtggaatttacagaaaacagccccagccaaaaagagcacttctcttgatgtagaacctatctatacattcagagcccataaaggtccagtgctttgtgtggtaatgagcagcaatggtgagcagtgttacagtggtggtactgatggactgatccagggctggaataccactaatcccaacatcgacccctatgattcttatgatccttctgttttacgaggccctctgctaggccacacggatgcagtctggggtttggcttatagtgcagcacatcagcgtttgttgtcctgttcagcagatggcactctgcgtttatggaatacaactgaggttgctccagcactaagtgtatttaatgatattaaagaactgggaatccctgcctctgtggatctagtgagcagtgacccgagccatatggtagcatcattcagcaagggatatacaagcatttttaacatggaaacacaacaacgcattctcactttagaatccaatgtagatacaacagccaactcttcctgccaaataaatagagtcatcagtcatcctactctttcgatcagcatcactgctcatgaagacaggcacatcaaattctatgataacaatacaggcaaactgatccactcgatggtagcccacctagaagctgttacaagtttagcagttgatcccaatggcctttacttgatgtctggcagtcatgactgttcaatacgtttatggaatctagaaagtaagacgtgtatccaagaattcacagctcatcgaaaaaagtttgaagaatcgattcatgatgtagctttccacccatccaaatgctatatagccagtgctggagctgacgcactggctaaagtctttgtatgacgcaatgcatcatcttcaccttctagctgtttataagtaatcaactgcacacaagagatacagaagacgagggcaagaatcatctcgtcctgcccttttgttctgctgaaggagcacagagaacatttgttgaagtatagttttgcaattcatatactgttttctaaaactaaggtttgttcaggttgctgcaagctcagctgaatctgtgagcctgaggtctgtttcaaatttctccccaataggcgcctwtatttctgaggtggttctaattcgctaggcaggcctgagcgaatacaagtttagcttgtccctgttgagtaagtagggcatgctacaatggataatttaaaagcttgatagctgggactgaatagaagaaaacgggaaacttagacaagttctccctgagaaatctggttaaaacacattaattat

SEQ ID NO: 5386 - DNA, 1804 bp, Homo sapiens
  SIMILAR (2)..(1801): 971254mologous to Homo sapiens striatin,accession number AC007382,Smith-Waterman Score=3070.
gtatctacaggaggtgggttatacagatactattctagatgtgaaatctaaacgagtgcgagctttgttgggcttttcaagtgatgtcacggacagggaagatgacaaaaatcaggactcagttgtaaatggcacagaggctgaagttaaagagacagcaatgattgcaaaatctgagttaacagattctgcctccgtgctggataatttcaaattccttgaaagtgcagctgcagatttcagtgatgaagatgaagatgatgatgttgatggaagagagaaaagcgtcattgatacttcaacaattgttaggaaaaaagcattgcctgacagcggtgaagatcgagatacaaaagaagctctaaaggagtttgacttcttggttacatcagaggaaggagacaatgaatctagaagtgcaggcgatggaacagactgggaaaaggaagaccagtgtctcatgcctgaagcctggaatgtggaccagggagtaattaccaaactcaaggaacaatacaaaaaggagagaaaggggaaaaagggggtgaagaggcccaataggtcaaaactacaagatatgcttgctaatttgagagatgttgatgaacttccttcattgcagccatctgtgggttcaccttccagacccagcagctccaggcttcctgaacatgaaattaatagggcagatgaagtggaagcattgacatttcctccttcttctggaaagtcattcatcatgggagcagatgaagcccttgaaagtgaactgggacttggagaactagcaggccttacggtggccaatgaagcagactcactaacttatgatatagcaaacaataaagatgcattgaggaagacatggaaccctaagtttacattgagaagtcactttgatggcatccgagcccttgctttccatcccattgagcctgttttgataacagcatcagaggatcacacattaaaaatgtggaatttacagaaaacagccccagccaaaaaaggtccagtgctttgtgtggtaatgagcagcaatggtgagcagtgttacagtggtggtactgatggactgatccagggctggaataccactaatcccaacatcgacccctatgattcttatgatccttctgttttacgaggccctctgctaggccacacggatgcagtctggggtttggcttatagtgcagcacatcagcgtttgttgtcctgttcagcagatggcactctgcgtttatggaatacaactgaggttgctccagcactaagtgtatttaatgatactaaagaactgggaatccctgcctctgtggatctagtgagcagtgacccgagccatatggtagcatcattcagcaagggatatacaagcatttttaacatggaaacacaacaacgcattctcactttagaatccaatgtagatacaacagccaactcttcctgccaaataaatagagtcatcagtcatcctactcttccgatcagcatcactgctcatgaagacaggcacatcaaattctatgataacaatacaggcaaactgatccactcgatggtagcccacctagaagctgttacaagtttagcagttgatcccaatggcctttacttgatgtctggcagtcatgactgttcaatacgtttatggaatctagaaagtaagacgtgtatccaagaattcacagctcatcgaaaaaagtttgaagaatcgattcatgatgtagctttccacccatccaaatgctatatagccagtgctggagctgacgcactggctaaagtctttgtatga

SEQ ID NO: 5387 - DNA, 5833 bp, Homo sapiens
  SIMILAR (4261)..(2561): 1001254mologous to Homo sapiens TGF-betaIIR alpha,accession number D50683,Smith-Waterman Score=3037.
cacctgagtattttgctttattcaatctaataaacattttatttatgtaaaagacaaacaatgcataggataaaaattaaggtgcttgagacttttgatataaaaagagtatatagcattcacattcctattttaatacatgagtacagctgaagtgttccataaaagaataaaactttcccctttatgtatagtagtgaaaaaaggtcagtattttttaggaactaccggaatgttatttccttgggtcttttttcttggaataagaaaaaaaaaacataaacaaaacaggcccaccagtatcctctgacactacattcccagtttaatgctgaataaccccagaagtgagaatacttcttgaatccttggaatatctccatgaatggaccagtattcctagaaactcaccacctaggaggtccaatggggcaacagctattggggatggtatcaggcaatgccctacgggtgcaagtggaatttctaggcgccttctaatgatactgcagccacactgtcttttaactcctcaagccccaccccacactgaggagggtgccctagaggttcctatttcccaaaccttttgcatgtatccttaaaaatctcaataaaatgagaccttccaccatccaaacagagctgaaaatcctcaactacccagtcccccctcctaatattccctatttgggctgaaaaataagtagcttcaaaaagttttaaaaaagagaattacttgcagcattaaccacttctttgttgattaaccaagtttcctatggagttttaaagctcatactttgttcttgtccttgtggacacaaattttctaactgcaaatgggacctttgtgtcccacattcaaatcctctctagtaatttctgcaaaggttgagaaggctggcatgatggagagaacggtaaccatgaggaaagcttcttggagtaaagcactcctctctccaatgcagagggtaaaactattaacatataagcaaaagaaacttgggctaactgagacccttaaaggagttcccctttagtccaataaaaggccaacttcaaatcttaacaccagataaggtagtcaaaatcatattatatacccagagaatgactgcttgaatggacatttcttacaagggaccttggttaggtgcagatttaattcctagactggggtccaggtaggcagtggaaagagctaatgtttacagtgagaagtgaggcagctttgtaagtgtctccacaccttcacattttgtgaacgtggactggagataactgaaaaccatctgctatccttacctggggatccagattttcctgcaaaatctccaaatatttataaagtggcttcactttttgaaacgctgtgctgaccaaacaaaacatatgtttagagtgcctgaggtcatagtcctgacaatgatagtattgtgtagttgaaatcctcttcatcaggccaaactgtgcttgagcaatcaggagcccagaaagatggaacccattggtgtttgtatagaaaactagaaaatcaagtcaagtgtaatgaaaaagtaaacacgataaagcctagagtgagaatttgctcctttttagaaaaggatgaaggctgggagcagagaatagtaacataagtgcaggggaaagatgaaaaaaagaacaatttttcattagtagatggtggggcaatcgcatggatggggacatctgttctgatttttctgcaacccatgaaggtaaaaagtggggttcaaaacattcaaggtattaaagatggggtagagtttctaaactaggttgagggagagtttctaaactagccccccagatttggggcttggagcttaaatgaaaagtccaggagaaataagggcacacaggaaccccgggaacactggtcctcaaacagtgccactgtacttagttccatggccagaagagaagtgctaggcagggaatgattattttgcaaaagcaagtgcaatgtggtcatagctggctgtgagacatggagcctctttcctcatgcaaagttcactgttttacagtcagagaaccactgcatgtgtgattgtcaaatgctaatgctgtcatgggtcccttccttctctgcttggttctggagttctccaataaaaccaatttcctgggaatatttgatgtttttccttgtctcttttcaaggtatggctatatatatagagctatagacatatatagatatatatatatatatataaaacatagctattcatatttatatacaggcattaataaagtgcaaatgttattggctattgtaaaatcaatctcatttcctgaggaagtgctaacacagcttatcctatgacaatgtaaaaggcatagaatgctctatgtcacccactccctgctgctgttgtttctgcttatccccacagcttacagggaggggagtgacccccttggttttccaggaagcatcagttcaggggcagcttcctgctgcctctgttctttggtgagaggggcagcctctttggacatggcccagcctgccccagaagagctatttggtagtgtttagggagccgtcttcaggaatcttctcctccgagcagctcctccccgagagcctgtccagatgctccagctcactgaagcgttctgccacacactgggctgtgagacgggcctctgggtcgtggtcccagcactcagtcaacgtctcacacaccatctggatgccctggtggttgagccagaagctgggaatttctggtcgccctcgatctctcaacacgttgtccttcatgctttcgacacaggggtgctcccgcaccttggaaccaaatggaggctcataatcttttacttctcccactgcattacagcgagatgtcatttcccagagcaccagagccatggagtagacatcggtctgcttgaaggactcagcattctccaaattcatcctggattctaggacttctggagccatgtatcttgcagttcccacctgcccactgttagccaggtcatccacagacagagtagggtccagacgcagggaaagcccaaagtcacacaggcagcaggttaggtcgttcttcacgaggatattggagctgttgaggtccctgtgcacgatgggcatcttgggcctcccacatggagtgtgatcactgtggaggtgagcaatcccccgggcgagggagctgcccagcttgcgcaggtcctcccagctgatgacatgccgcgtcaggtactcctgtaggttgcccttggcgtggaaggcggtgatcagccagtattgtttccccaactccgtcttccgctcctcagccgtcaggaactggagtatgttctcatgcttcagattgatgtctgagaagatgtccttctctgtcttccaagaggcatactcctcatagggaaagatcttgactgccactgtctcaaactgctctgaagtgttctgcttcagcttggccttatagacctcagcaaagcgacctttccccaccagggtgtccagctcaatgggcagcagctctgtgttgtggttgatgttgttggcacacgtggagctgatgtcagagcggtcatcttccaggatgatggcacagtgctcgctgaactccatgagcttccgcgtcttgccggtttcccaggttgaactcagcttctgctgccggttaacgcggtagcagtagaagatgatgatgacagatatggcaactcccagtggtggcaggaggctgatgcctgtcacttgaaatatgactagcaacaagtcaggattgctggtgttatattcttctgagaagatgatgttgtcattgcactcatcagagctacaggaacacatgaagaaagtctcaccaggcttttttttttccttcataatgcactttggagaagcagcatcttccagaataaagtcatggtaggggagcttggggtcatggcaaactgtctctagtgttatgttctcgtcattctttctccatacagccacacagacttcctgtggcttctcacagatggaggtgatgctgcagttgctcatgcaggatttctggttgtcacaggtggaaaatctcacatcacaaaatttacacagttgtggaaacttgactgcaccgttgttgtcagtgactatcatgtcgttattaaccgacttctgaacgtgcggtgggatcgtgctggcgatacgcgtccacaggacgatgtgcagcggccacaggcccctgagcagcccccgacccatggcagaccccgctgctcgtcatagaccgagcccccagcgcagcggacggcgcctttttttttttttttttgacatgtgacccaaaggagtggagctccgataaggacccaagcaagtagaaccagatttagctttgtgacttttaaagggtttatactaactcatgtctatccatgcttagacaggaactaaagggccaaggtgagcactagcagtcatgttagcctctgagtctagacatattggtgggtatggaaagtacctaaagtctcaaggccaaaagacaagaccaagaccctccacccatcccagtgaggcttttctctgctccatctcataagtctaaatctagtaaacaatggggcaaggtggaggtggacatttgattattttaaagatgcatatacctgtttacaagaacagtccaaaccttcagtatagacaaggggctccccaaatatagcagccatttaaaaatactgttatgtataaagactgtaatcagtattcacaaaccctggtgaaaccaaaagataataccatatcttcctaagcatcagttttctaacctagcattaggttgtataaatggaaaaacacaataaattacatgacatggaagaaagaactagaagaaatgtttgggaaatttaacagaaatcataaaatatgtagttttctgctgaaaatgttacttaaaatattcaaataatgttaaagtagaatattctcactttttggctggggctgttttctgtaaattccacatttttaatgtgtgatcctctgatgctgttatcaaaacaggctcaatgggatggaaagcaagggctcggatgccatcaaagtgacttctcaatgtaaacttagggttccatgtcttcctcaatgcatctttattgtttgctatctattaaagaaacaaaacaaagatatctacacacttagttaaggataggggaaaaaacttgcatttcaacattaattcttgctgatgtgtcaataaatgatcactttgcaatttttaaaacaatataatttttatatgtaaataaccaaaccacgaagcaaaattagcaataacccaacactagttttctttgaagaaatatgaaaggtgtattacaaaaacaattaacataattcaatataaaaagtgaatcaaattatataaaatagatcttactaggatgataaataataccaagtaattcaacacaaattatagtatacaagtataattttgggttaagagttgaaaaactaagttatctttaaacctgctaacattttaaaatgtcatacttttgagattttaaatactttctaatagctaaattttcttcatcaaactggaggcaaagtttataaactggaaacataaaatgttaaaaatcgaagagataacacaaagaatgcgttccactggtaaaacacatgttctttccctccatggtaactcaatctcaaaaatgaaaaaaaaaaaaaagcactattttttcattccaattacataacagaaaagctaaagaggtagattatatttgattttacactagcaccacagggtat

SEQ ID NO: 5388 - DNA, 341 bp, Homo sapiens
ggcacgagaccgattaccacaagcaaccatggcagggggagatctcaggcattgtaagcacagaatcccagtagtggggacttgggggaggtgaggtcaaggtgaaatgggagtaggggaaggaaaaaatggccatatgagatggtggtatgtgaaagttgagctttctctctctactgaagtgtcccctgcgccctacacagggacacgtgagttgtatggaggctgagtggcctgagtacagtgtgcgtgcattctacacattgaatgatctgctaatgtcatgggatctctctattgtggaaatcgtatttgagtatgcagttgaatgattggagccg

SEQ ID NO: 5389 - DNA, 352 bp, Homo sapiens
cactatcgcggaccgagagctgagatatagcgaagacgagggtggaagacgaagaggagagtagagagaggaggagggagaagcagcgagaaggaagagagtagcgaagcaggtggggaaaagagcgaatgaggagaggaagacggaagagaggtggggggatcgggaggggagacgcgagaggcggagcgaagagatggaagtaagtggcaaggagaggggccacgcaacctccgggagagaggaaaaggagaacacgggatgaggaggctttaaatagtatttcataaaataaaaatgcccagcactcttaggaacctctcattcaaccgcctagttttgttctcgtgcc

SEQ ID NO: 5390 - DNA, 374 bp, Homo sapiens
  SIMILAR (43)..(234): 761254mologous to Homo sapiens XRCC4,accession number AB017445,Smith-Waterman Score=241.
cggacgcgtgggcggacgcgtgggtcgacccacgcgttcgtaagacagctaatgcaaagaaatcttgatacggggcctattatggctggtcatgataatcagcttcaacaaaaggaaaattctacgcctgattcttcactacctgagacgtctaacaaggagcacatctcacctgaaaacatgtctttaaaaactctgagaaacagcaacccataagacctctatgatgagatttaacagtctcaaaaaatactttgatgttcactacactatgttttctatccatttctttccaattaatacggagaatttcaagtcaccacccgctattaccgtatcttacaatttaattacctacacaccgaattgacacc

SEQ ID NO: 5391 - DNA, 323 bp, Homo sapiens
tactctttggttatttacccaaatgagtagacaatatgtccacaaaaaaaccctgcacgtggatatttacattagctttatgcataactgccagaacttggaagcaaccaagatgtcctttagtaggtaaatggataagatgttctgcagaggcattaggaaatagatctctcatatagatgagagctgagttaccaatgatggacaaggaggcaccctatataaccactaagcagtgtattcacccaatcaccaaaggcatcccactgaaagctttagagcacattcctctgtaaaaaaggtatggccatgcaggagataca

SEQ ID NO: 5392 - DNA, 1050 bp, Homo sapiens; identical to SEQ ID NO: 1658
  SIMILAR (514)..(1047): 1001254mologous to Homo sapiens hexokinase IR,accession number AF016365,Smith-Waterman Score=887.

SEQ ID NO: 5393 - DNA, 602 bp, Homo sapiens
  SIMILAR (66)..(266): 551254mologous to Homo sapiens Human myelin oligodendrocyte glycoprotein gene,accession number AAZ29204,Smith-Waterman Score= 161.
tctcgctctgtcagccaggctggagtgcagtggccgattctcggctcactgcaagctccatctcccagttcacgccattctcctgcctcagcttcccgagtagttgggactacaggcgcctaccaccacgcccggctatttttttgtatttttagtagagacggggtttcactgtgttaggatggtctcgatctcctgacctcgtgatccgcctgtctcggcctcccaaagtgctgggattacaggtgtgagccactgcacccggccacaaagtgacaattctaagaacaaaagcaaaaccacaccaggaaggccagggaatcccaggcagagagaacctggatctgcagcaaagtcccctggcttcagggcatggcatgagtgcccgcaaacagccaagccagagtccagcaggtttgcacactcctcccaccccgtcctgcccaccactggccttcacggctcagggagttcctcctaacagtgttccctgccaccggccaccttccacgactgtggatggaatgatgtttctagcagggaatgtcattcctttggttctccattacttggggatcaagtttccatccaggccttacaga

SEQ ID NO: 5394 - DNA, 637 bp, Homo sapiens; identical to SEQ ID NO: 490
  SIMILAR (47)..(412): 991254mologous to Homo sapiens gamma-G globin,accession number X55656,Smith-Waterman Score=637.
  misc_feature (1)...(637): n = a,t,c or g

SEQ ID NO: 5395 - DNA, 481 bp, Homo sapiens
  SIMILAR (209)..(448): 741254mologous to Homo sapiens Human secreted protein, SEQ ID NO: 4718,accession number AAG00637,Smith-Waterman Score=312.
  misc_feature (1)...(481): n = a,t,c or g
aaaaccataaaatgttccccagttttgcagcacgttaaatttcaaaaaattaaattgaaccagagtcccctggcaccgttgaaggaaaaataaatagaaatgtgttagtgccaagtagtaatctttggcattaggggattgatacaattttgacattaaatcagaattgaagtttaaaaaccaggcaatagtttacattaataatttttttttttttttttttttaagatggagtcttgctctgtcgcccaggctggagtgcagtggcgcgatctcggctcactgcaagctccgcctcgcgggttcacgccattctcctgcctcagcctcccgagtagctgggactacaggcgcccgctaccacgcccggctaattttttctatttttagtagagacggggtttcaccatgttagccaggatggtctcaatctcctgacctcgtgatctgcctgccgaattcctcgncacggcatacagat

SEQ ID NO: 5396 - DNA, 1121 bp, Homo sapiens
  SIMILAR (751)..(930): 781254mologous to Homo sapiens Secreted protein encoded by gene 94 clone HPMBQ32,accession number AAW88627,Smith-Waterman Score=254.
gtctttttgtgagtgttttctgactgcaaaagaacagttcatcaaattacttatcttttaaaaaacacaatcacaaaatcatattcatatactgctactgtaagtattaagggaatccccaagcctaagacaggctgtttaaattaaaaaaaaaatgtaaggatgcttgtttaaacaactcagaaagcatttttcccccagaaatattacagtgataagggaaacgatctgaccacctaagcctcagttccacaatctccctctaaattctctggtctagaaaacccatggctctctgggatgcttcttatgcttttcaggagtttccctcacaggtctgcatttctatcatggaatttttcattttttttttttaagctaggaaatgtcttactaacaagttgttttatcacctaaaatctactattatccatttttacaccatagataacacttggttgacttaaattctaaaagaaaaaagtcttgctttaccaatcaaaaacttaaaaccaaaggggtaaaaggatactgaaatgtcctaatagtttgtgtaggaccacaaacattaaaggcaagatgatagttttaaaaatgtaataactcaagtctaaacatgaatgaatttaaatttaatcctttttgtatgaaaccaaatagcagtctaataccactgggactaagtgctataaaagtaagtaataaaacaaatacatgaaacatgattacaatttaaattctttggattatctttttttttttttttttgatatggagtcttgctctgtcgcccaggctggagcgcagtggtgccatctcggctcactacaggctccacctccggagttcacgccattctcctgcctcagcctcccgaggagtagctgggactacaggcacccaccacgcccggctaattttttgtatttttagtagagaggggtttcaccgtgttagccaggatggtctcaatctcctgacctcgtgatctgcccgccttggcctcccaaagtctttggattatcttgtaagaccccacatttaatatagaagtttaaaactctctaaaataatactactaagcatcttagtattatttaatacttttctatctaaaaagt

SEQ ID NO: 5397 - DNA, 425 bp, Homo sapiens
  misc_feature (1)...(425): n = a,t,c or g
tggaaagacaaaagtaatgcatagagatttattttttaacattcaattcataagcagtgtttatacctctttgtacttacttgaaaagtgtatattatgtaaatttagtataaaaacacttggactaattcataccatgtggtaaaatttcacattcaaaagaaatacccttctgttattaaaaatnnnnnnnnnnggannnnnnnnnnnnnnnnnnnnnnnnnnnnnnnnnnnnnnnnnnnnnnnnnnnnnnnnnnnnnnnnnnnnnnnnnnnnnnnnnnnnnnnnnnnnnnnnnnnnnnnnnnnnnnnnnnnnnnnnnnnggtnnnnnnnggnagnnnnnnnnnnnnnnnnttttttnnnnnnnnnncccaaaaattggtttttaaggaggtccagggggggggatttttttacccaagaatt

SEQ ID NO: 5398 - DNA, 677 bp, Homo sapiens
  SIMILAR (277)..(330): 441254mologous to Homo sapiens Human myelin oligodendrocyte glycoprotein gene,accession number AAZ29204,Smith-Waterman Score= 39.
tttatttattttgagactgggtcttggtctgttgccctggctggagtgcaatggcccaatcttagctcactgaagccttaaattcctgggctgaagagatccctccacctgagcctccttaatagccagtcatgtgccaccctgcctagctatttttttttttttttttttttttttttttactttttggagagaagggatctagctatgttgcccaggctgttctcaagtagtcctggcctcaaatgatccctccaccttggcttcccagagcactgggattacagtcatgagccaccctcctggctcctttttttttttatttttaataacagaagggtatttcttttgaatgtgaaattttaccacatggtatgaattagtccaagtgtttttatactaaatttacataatatacacttttcaagtaagtacaaagaggtataaacattgcttatgaattgaatgttaaaaaaataaatctctatgcattacttttgtctttccccataatctcacgtatacacataaaacaaaaaacaaggagacccagttatagttgtggtatctgctgtttctgccttgaaatttccagcttacagctaagcaacaactactgtgcatccagaacttacatctatgttcctagagtacttgaaccccattctcaagtgcac

SEQ ID NO: 5399 - DNA, 2010 bp, Homo sapiens
tttttttttttttttttacaaatctcagaactccaagatgtttttatttatttccaaattccaatagaatgaatatgttttatctaaatatttttatcacacaactaaaacattgaattactttttcagaaatagttaaatacatcaatctagttacaaattctaaatataaaagagtacaaaatataatcgttataaattgtattttaaaaaaagaaatacaaattctatggtcttttgcattttactgccctcaaagcagaattagcaaagctgatgaagaatgaacattttcccttggggcgggtggccccttggtcactcccaacaggccacgttaaccgggcctccgggggtgtgctccccacccaacccacggcaaaacaaagggcgtccctccctcacttggaagtcctgggcctgtgggatgttttccatctgttttttttgctcagtgaccaaaacgttcttgaaattaggacctcaccaaaggttaaaaagcagtaaaacaacatatgctacttaagacattttgaagcggaaagtaaagctatgtgaatgccgtccttccttccttcctttttttacagcttggaaacctctaagaatttgctggggggtggcagaggagggtttgtctagtttgaaggaaggaatgttggtagacagtctccagccacgaaagcccaggaggtgccctcttccacacaacagactaagcactgcacccactttctttgatccagaaagcatccctactgaccctgtaaccttacaccctctctgtcccaaagaacagaggccggacccagagttgcccagcctgggagaggcaccatggagatgaagcttgccctttctgcactcaaccccttgcagcctgaaggagtgtgagacgatgaaaccccacatgtgccggagcccctgcagaggtgttctcacaccctcagcgacctgtgcacagtggccggatcaggggtgggggcctgtcataccgggcgctcctttctctgacgaagtaactgtatgcaactcccaattgctacttcctgaagcacctgcgtgttcagggaaccagtgtctttcttggtttaaaaaataaataagtaaatattgggggacctcttaaaacacttaatacttttcagagcctcaaaggcaaaattcacctggctttgaagccaaatctgtatggtgctgagaatgaaatctgtccgtctaagatgacaataagaccttccagggaaccaggcagaaaggtgggcaggtacagtggccaatttcccagagaagatcctcaatatctgacttttgagagaatttaaatattcattcttcaaattaaggaatacaagtgaacaacctgaaaagatttttagaagctcattagctgtgtgttatttgaacgcaaaaatgaggaagagatatgagcgggaaacaggagagtataggaaggcaggccagggtgcagccaggccccagcaggggcagagcgggaagcagcgagcggaaagcaggggagagacaccgagaagctgcagtgtagcacaaccaaaccctttattgtctaagttacattagacgcaacactgtaaaaaaatcctgttaagaaacaaggaaacagcagatcgggagaggtagtagaaagtctgtaacagtcagaagacaacgtacagaagtgtatcatgcagaaattaccattcggaaaaaaaaaggcaatcaaaacggtggctaaataaataaggaaacacaaatcatattaaatactatgaccaaatcaacaaattaacaaaccaacacaatactgacgatgggtggaaggaagggaccacacatccaggcctgcccacagctggcctcaagggatggcgttcttgggggggctccccagtctgtttaactccctgaaaacctccctcctgcactctgtgcaccctgcgcggccccgcaagctgactgtcctccacgcctgctctcctgcaagccaggagaattccaccacgctagtcc

SEQ ID NO: 5400 - DNA, 979 bp, Homo sapiens
  SIMILAR (5)..(226): 451254mologous to Homo sapiens PRO1722,accession number AF119851,Smith-Waterman Score=150.
gctctctctgacccaggctggagtgcagtggtgtgatcacagctcactgcagccttgacgtctcctgagtaactgggaccacatgcatgcaccatcatgtctggctatttattttttttgagagacaacgtcttactacattgcccagtcctatctcaaacatctgggctcaagcaatccgcccacatcagcctcccaaggtactgcgattacgggcataagccactgggcccggctggatacatctcagtttggacattaaattatcagaactttgtttctcaagactttaaaaattaaaaacattttttcattagaacacctgatctgcagattcacagttcacacacccaggttcctaacgtacctgttttccactgactgaaccaagttagtggtttttaaacttaaccacaccgaacactgtgctggctgcgttttccttgctccacagcacacgaggccagaggtgctgcagacgcagggaagtggcttgtccaagtgcagtcccagaccagacgtgtcacccgggcagctccaggtgtaaacctgagtccacctcagaccacagaaccagggcctcggggtggggtccagcaccctcccgtaaggagccctgtgttttgacacaggctagggcttgggaaccgccggcctaggacagacaccatgaaataagcacagcaacggtcacatgtcacccaccgtcagggatgtgcacggccaggtgattgcattgtcgtgcaagcatcctacagggacttacacagagctcgatggtgcggcctcctccacacccaggctgtagggcatagcctgtggctcccaggctacaaatgcgtgcagagtgctactgcgctgaatgctgtaggccactgcggcacggcgctgcgtgtttgtgcttccaaacctaggcgtggtgcggtccagcttgctggaggattccatcccagtgttctgtggggaattccaccacagt

SEQ ID NO: 5401 - DNA, 348 bp, Homo sapiens
  SIMILAR (174)..(4): 1001254mologous to Homo sapiens Unknown (protein for MGC:4093),accession number BC004444,Smith-Waterman Score=321.
ccaaaagctgtcctgggaccacacctggaaatggagccggggccagccttgaagacctttggtggcgaagtgcaggtcgatggggtgggaccagtaagccatgtcccctatctgcggggtgtccacttgcgtttggccctcccgcacgcctgacaggagcttccatgccgccccttagcgcacttaacggttaggagaggagaaagcggcaaccggggttgtagttcatgggcttgactgcttcttttctccgcgggcgccgaccaggcctggctcgcgcctctcccaggacccgcctggctgcgagatatgtaagccgcgatacttccgcgaccgcgctcgtcttgg

SEQ ID NO: 5402 - DNA, 371 bp, Homo sapiens
  SIMILAR (17)..(295): 951254mologous to Homo sapiens Human secreted protein sequence encoded by gene 33 SEQ ID NO:144,accession number AAB25755,Smith-Waterman Score=474.
cagaagcctggaggatgagctggggtcccccttaagagagatagcctttgccgagtccctgaggggtttgcagttcctgtcaccgcctcttccctccgtgagcgctggcctgggggaaccaaggccccctgatgttgaggacatgtcatccagtgacagtgactcggactgggatggaggcagccgtctttcaccatttctaccccacgaccacctcggcttggctgtcttctccatgctgtgttgtttctggcacgttggcatcgctgccttctgtctagcccagaacgcctcactgtgaacactgaggccggcagccagcaaatctgtgggcagagagtggagaatcttggtggatgaggctgcggcgg

SEQ ID NO: 5403 - DNA, 501 bp, Homo sapiens
  SIMILAR (2)..(160): 831254mologous to Homo sapiens Human secreted protein sequence encoded by gene 33 SEQ ID NO:144,accession number AAB25755,Smith-Waterman Score=225.
tcttccctccgtgagcgctggcctgggggaaccaaggccccctgatgttgaggacatgtcatccagtgacagtgactcggactgggatggaggcagccgtctttcaccatttctaccccacgaccaacctcggcttggctgtcttctccatgctgtgttgtttctggcccgtttggcatcgctgccttctgtctagcccagaagcatccccagtgcctgacctatagtaggtgctacgtatctgcttttggaatacatgcatgaatgaatgaatggacccgccctagttgcccctacagccctcactgtgaaccctgaggccggcagcccagcaaatctgtgggcagagagtggagaatcttggtggatgaggctgcggcggcggcaggagcatctagaaacgggagcgagctggactggaccccttctcccttcctggccaccgctcttcgggcggcagcaacctgagattaaacaccagacacccttgcagccaaaaaa

SEQ ID NO: 5404 - DNA, 1000 bp, Homo sapiens
  SIMILAR (389)..(754): 981254mologous to Homo sapiens Human secreted protein sequence encoded by gene 33 SEQ ID NO:144,accession number AAB25755,Smith-Waterman Score=644.
ccacgcgtccgaggaaaggcacatccttggctggggattacagattttgaggaatacagagaggagggagaggaagggttggagggtgatgcagagagggagaggcggggagatgtcatagacggagacgaggcaacaggaccgtggaggagaaaaatagaaagggagagaaaatagtcggagagacaaaaaccaggagacccatgcgtggacagaaagactaacggagacgaaaagaaagaggcagatggggagacacgtgcgagacgagacacatgtgcatttgttggggagaagaggattggaggtgtcagtgttaaaggaacctctacaacgaaggtgaagccacggaagataaggaaacccctcctggagtttccccaaagccatggacagccctagtcttcgtgagcttcaacagcctctgctggagggcacagaatgtgagacccctgcccagaagcctggcaggcatgagctggggtcccccttaagagagatagcctttgccgagtccctgaggggtttgcagttcctgtcaccgcctcttccctccgtgagcgctggcctgggggaaccaaggccccctgatgttgaggacatgtcatccagtgacagtgactcggactgggatggaggcagccgtctttcaccatttctaccccacgaccacctcggcttggctgtcttctccatgctgtgttgtttctggcccgttggcatcgctgccttctgtctagcccagaaggtcagtctgtgtgtgggacttggaggggactgggcataaaagagaaaaatgccccccaaaaacaaagagcccagcaaatctgtgggcagagagtggagaatcttggtggatgaggctgcggcggcggcaggagcatctagaaacgggagcgagctggactggaacccttccccttcctggccaccgcttttcgggcggcagcaacctgagattaaacaccagacacccttgcagccaaaaaaaaaaaaaaaa

SEQ ID NO: 5405 - DNA, 780 bp, Homo sapiens
  SIMILAR (344)..(9): 851254mologous to Homo sapiens PRO2987,accession number AF116719,Smith-Waterman Score=494.
  misc_feature (1)...(780): n = a,t,c or g
gctcagcccatatatatatatacacactcgctttttggaacgtctgaggttatcaataagctcctagtccagacgccatgggtcatttcacagaggaggacaaggctactatcacaagcctgtggggcaaggtgaatgtggaagatgctggaggagaaaccctgggaaggctcctggttgtctacccatggacccagaggttctttgacagctttggcaacctgtcctctgcctctgccatcatgggcaaccccaaagtcaaggcacatggcaagaaggtgctgacttccttggggagatgccataaaagcacctgggatgatctcaagggcacctttgcccaagctgagtgaacttgcactgtggacaagcttgcatgtgggatcctgagaactttcaagctcctggggaaatgtgctggtgaccgttttgggcaatcccattttcgggcaaagaatttcacccctggaggttggcaggctttcctgggcagaaagatgggtgacttggagttggccagtgcccttgttccttccagataccattgagctcactggcccatgatgcagagcttttcaaggataaggcttttattcttgcaagcaattacaaataataaatctatttctgctaagagatcaccaaannnnnatnntnnnnnnncccccggattttttatttagcgggccgcacctttttccccttttagggggggtaaatttatattgggccttgggccggggttttcaaaagcggggggannnnnnnnnnaaagagccc

SEQ ID NO: 5406 - DNA, 761 bp, Homo sapiens
  SIMILAR (291)..(1): 331254mologous to Mus musculus putative,accession number AK003038,Smith-Waterman Score=150.
gctactgggcacatggcaaaatccatagcctgcaagctggcagcggccaaagctgtcctgggaccacacctggaaatggagccggggccagccttgaagacctttggtggcgaagtgcaggtcgatggggtgggaccagtaagccatgtcccctatctgcggggtgtccacttgcgtttggccctcccgcacgcctgacaggagcttccatgccgcccctgtgtgaatgccccacttgcagaagaggctactttccgagaaaccgctggcccccatgatctgcccgatcacgtgcacctcagccatggcccttagcgcacttaacggttaggagaggagaaagcggcaaccggggttgtagttcatgggcttgactgcttcttttctccgcgggcgccgaccaggcccggctcgcgcctctcccaggacccgcctggctgcgagatatgtaagccgcgatacttccgcgaccgcgctcgtcttggtttccgtggttgttgctggggcaacagcaggctcctcccctagctttgtactcgctctgcgcgctactaattggtgctagccgtctgcggggggcggggtgaagctgtgatggacattttcctcctccgctccattttgggaaaatagcgtctctccagctacggcaaagggttccgccattttgggcgtggctaggaagctgccatgttgagtgtggctgaggaagtttgagtgcagtttctcccagataccttctttaccaaaaaagcaaatcc

SEQ ID NO: 5407 - DNA, 912 bp, Homo sapiens
  SIMILAR (222)..(671): 391254mologous to Homo sapiens Human secreted protein sequence encoded by gene 33 SEQ ID NO:144,accession number AAB25755,Smith-Waterman Score=165.
cacttaacggttaggagaggagaaagcggcaaccggggttgtagttcatgggcttgactgcttcttttctccgcgggcgccgaccaggcctggctcgcgcctctcccaggacccgcctggctgcgagatatgaaacccctcctggagtttccccaaagccatggacagccctagtcttcgtgagcttcaacagcctctgctggagggcacagaatgtgaggacccctgcccagaagcctgggcaggcattgagctggggtccccctttaagagagatagcctttgccgagtccctgaggggttttgcagttcctgttcaccgcctcttccctccgtgagcgctggcctggggggaaccaaggccccctgatgttgaggacatgtcatccaggtgacagtgactcggactgggatggaggcagccgtctttcaccatttctaccccacgaccaccttcggctttggctgtcttcttccatgctgtgttgtttcttggcccgttggcatcgctgccttctgtctagccccagaagacccaacaaggcttgggccaagggggacatccaagggggcaggggccgcctcccgccgtgccttcctgctgggggtcctcgccgtcgggctgggcgtgtgcacgtatgcggctgcccctggtgaccctggccgcctaccattgcctcccgagacccgcccctagttgcccctacagccctcactgtgaaccctgaggccggcagcccagcaaatctgtgggcagagagtggagaatcttggtggatgaggctgcggcggcggcaggagcatctagaaacgggagcgagctggactggaacccttccccttcctggccaccgctcttcgggcggcagcaacctgagattaaacaccagacacccttgcagccaaaaaaaa

SEQ ID NO: 5408 - DNA, 561 bp, Homo sapiens
  SIMILAR (10)..(312): 511254mologous to Homo sapiens PRO1722,accession number AF119851,Smith-Waterman Score=247.
aagacagggtctcactctgttgctgaggctggagtacaatggcaccatcccagctcactgtagcctcaacctcccggcttcaagcaatccccccacctcagattcccaaagtgctgggaccacaggcgcacaccaccatgcccaggtaatttttttgatcttcggtagaggtgggggtcccaccatgttgcccaggctggtctcgaactcctgaactcaagagatcctcccgcctctacctcccaaagtgctaggattacagccatgagccaccgtgcccggccagtttcaacttttttgagtacttccacatcatgtcctgtgctgagcacttttcacaggagtctcatttaattccctagacaagtctatggggaaattactgtctccatcttacagataggaaactggggcttagaggcatcaaagaaatggctcagggtcacgatctcagcccaggtctctcagactccaaagcccatgctcttgacctaaaagcacttaagaaagtatttaaacctgaaagcacttagcctgagtgcttctcgtgccgctcgtgcc

SEQ ID NO: 5409 - DNA, 1584 bp, Homo sapiens
  SIMILAR (44)..(331): 1001254mologous to Homo sapiens Human secreted protein, SEQ ID NO: 6980,accession number AAG02899,Smith-Waterman Score=504.
  misc_feature (1)...(1584): n = a,t,c or g
aagccacactctgtcctacttagtcaaagaattagaggttcgcatggatctgaaagccaaaatgccagatgaccatgcacgaaaaattttgctttcccgtattaataactatactatcccagaagaagaaattgggtctttcttatttcatgctattaataagccaaatgctcctatctggctcatactcaatgaagctggactatactggagagcagtaggaaatagcacttttgctattgcctgtcttcagagggctttgaatttagctccacttcaataccaagatgttcctcttgtcaacttggccaaccttttgattcattacggccttcatcttgatgccactaagctgctacttcaagctttggccatcaatagctctgagcctctggaccttttttgagccggggaaatggcttaccttgctctgaagaatatcagtggggcacttgaggcctttagacaggccttgaaattaaccaccaaatgtccagagtgtgaaaacagcctgaagttgatccgatgtatgcagatctatccttttctgtacaacatcacttcttctgtttgcagtggtaattgtcgtgagaaaaccctggacaacagccatgacaaacagaaatattttgacaactcacagtcactggatgctgctgaagaagagccctctgagagaggaacagacgaggaccctgcattctctgtggagaattcagggagggactcagatgcccttagacttgaaagtacggtggttgacgagagccatggttctgatgagatggagaattcagatgaaaccaaaatgtcagaagaaatactggctttggtggatgaatttcaacaggcatggcctttggaaggctttgggggtgcactagagatgaaagggcggcgttctagacttacaaggaatacgggtgctgaagaaaggtccccaggatggaagtggccagaaactcttgctatggagactgcagaagtgaagatgatgaagcaacagaatggattacattccaggtcaaacgtgtaaagaaacccaaaggagatcataagaaaactcctgggaaaaaaagtagaaacaggtcagatagaaaatggacatcgttaccaagcaaacctagagatcacatggccccaaggtggcatctccatgggccacaagggctactagactggaagaccagggaaagtgccatagacataatgtaactggatttcagccaaggcattttaacagagcctcttattgatatccttgtggaaccagatgggagagatgtggggcttgaagccttcccattgcctacaggataaaattcaaacttcctagtgtggtgtacaagacccttttacagcccgcctctgtgttaccctttcaacaccatttttctggaaccaaccatggttcatgttttttacctcagtggccttttgcacatggttatttccctttgcctgggattgccctgtgccccctctggcctctggccgtgctaaaaatatcacttcatccttaaacttcaaaatcaagtgccatctntttccttgttaactttcagggcagaattagttactctt

SEQ ID NO: 5410 - DNA, 1359 bp, Homo sapiens
  SIMILAR (163)..(44): 671254mologous to Homo sapiens Human secreted protein, SEQ ID NO: 6619,accession number AAG02538,Smith-Waterman Score=147.
aaaatttggaggggaggacttaattcctaaaaaagggtaaggctgggctgggtggcccacacctataatcccagcactttgggaggccaaggcaggaggatcacttgaacccaggaggccttaaccagcctggacaacatagtaagaacccatctctacaaaaaattttacaaattagcccaggtgtgggcttgtggccagacctgccttgaaggaggcaaggaagggtatgtgaacatgagcaacgtccacacaggtggacaaggtgacccatgtggacttttgggttccctctctttaggaagaatttttggttgtacttgggacagttacaggcatgctgctattgccatgatcttcgggaagctgaagtgatgagcagcagtgtgtgattctgaggacacagagggctggggtctaggagctatctcaggtgggctcagtcaagtgccatcctcccttttggtgcctccctaagaagtgctgagaagatgcaacaccaaaagcttttactccaacattgcttagccaagctaagcacatgcattccatatgattcagcaattctgctcctagcatgtatcccagagaattgtcccatgggtccataggggcatataagaatggccattgcagcaaagttctggttggggtagggggagctgaaagtcgtctggtgtccacaactggaggaatggatggataaaatgggatggatacacaagtggacagacagatgggtgaaaggatggtcagtccttacatggaccagtttccttattcttaggctaaggattagcatctccaggcaaaaagaaaacgtttctggattcccttgccactggagttccgtggaagagagaaatggagtccactaatgaggtgtcctttgaaggatatggatggaggacacagggccaaggaagtttgctctgcgggcccagccttggagatgttcagtccttctgcagcagcaccacgcttctggctttgtgggtgtcagtaggcaggagtggcagtcccaccccatgtcccagggcccaagcccagcttcctgggtgcttacaggggatggcaggcaggacagtacgttctgatcccagctccagtgggagcttcctggaggcgacttctccagccttcccatgtactttaagtaccctgattcccttaaatccccttctgccaaaaacagctggagaagtttgtgtttcctgaaactgaccccttcctgatttggaaatgacttgccgaggtgacaaagcaagttattgccacatctcaagtttgagacaggcctcctgactccacctattaacagtaccactgtcccaggccctttctttttttccttttttt

SEQ ID NO: 5411 - DNA, 929 bp, Homo sapiens
  SIMILAR (168)..(365): 1001254mologous to Homo sapiens Human secreted protein, SEQ ID NO: 5958,accession number AAG01877,Smith-Waterman Score=341.
ggcgtaggcggaggagattttcggacctgcgacttccgaacaaccctggcaggagggagcgggcgttcagccggggggaggcctgaagaaacgctccgggggccaatgggtctaacccttggttcttgccggccctggcggctccctcacggagccagcggccgggaatgcagacatcagaacgtgaggggagtgggccggagctgagccccagcgtgatgcccgaggctcccctggagtctccaccttttcctaccaagtccccagcgtttgaccttttcaacttggttctctcctacaagaggctggagatctacctggaacccttgaaggatgcaggtgatggtgttcgatacttgctcaggtacagactttgtggagttgctctggtctgctctgccttctgccgtcctgctctgtagtaactaacactgaccatttaggcagtggctgggctgtcctttctgccctagtgaggagcagatctgggaggtctgtttcggcctctgggtttatctagggcctaaccctgtgtctcaaggcccagtccagggagaggcagaatactgggaatggatcctgccctttcagcaaggttccttcctttgtgactgaataagctccttcctctggactgctggacaaccttgaacatcacgccttctacagcttagagcaggcttaattttttcctttgcccccaatattagcataattaatattaaaaaattagggtataattttgaacaaaaattaaagaaatacaaaaacctgtgaataagcagataccattttcactacttttttttttttgagacagagtcttgctgtattgtccaggctggaatgcagtcgtgtgaacatggctcactgtagcctcagcctcttcagctcaagcgatcctcctacctcagccaccatgcctggct

SEQ ID NO: 5412 - DNA, 467 bp, Homo sapiens
tgagacggggtcttgctgtgttgcccaggctggtcttgaactcatggcctcaagtgatcttcctgcctcatgctcccaaagtgttgggattataggcatgagcactgtgcccagctctagtgtaccattttaattctctcttttttttttaaacatactaacaccaaccggaatctcttgtttcttttgctttattcttttgagttattttctggattgttacctttctcccacctagttcaacccctcagaatcaccaaggctaaagggatattaatgctgggatctttttgtaaagacaaggaaccttttcataggtgtggaataaccgccccctggctatatttgtcataggtctggaaatcaggttgtcacatgttgtgttttctagggatgtggggttcctgttttaacgtaggtacatgtcaggtaaaagggaagccagaaatagccattcaggagagaaa

SEQ ID NO: 5413 - DNA, 668 bp, Homo sapiens
  SIMILAR (243)..(97): 671254mologous to Homo sapiens Human myelin oligodendrocyte glycoprotein gene,accession number AAZ29204,Smith-Waterman Score= 174.
  misc_feature (1)...(668): n = a,t,c or g
acgaagtgttctgtgtgagtgtagaaacagtgtggtttcccagatatggggaaatagattatatttagtagaaatgtatccaattatgaaagttgagaaatgggctgggtgctgtggctcgtgcctgtaatcccagcactttgggaggctgagaggggtggatcgcttgaggtcaggagttcagggccagcctggccagcatgatgaaaccccgtctctactgaaaatgcagaaatgggctggggtgtggtggtggttgcctgtagtcccagcttgttctttataaaaaccagtaacatgaatgaaatgtattgtgagttacagctgggaaacaagaaatagccaaggtctgaaagactgggaatgagaaaggagatacaaccacagatataggagtgattaaaacaaaaataaattaaattatgtgaaattctacagcaacaagtagtaaaatctagnnnnnnnnnngaagatttttttagcaaaattactccattctacccaatgggtaaagtattttcgcctcattctgttgatgttgggtttggccctgtctcttactttggtcaatgatgagtgagaaaggcatggtcagtttccatcagtccccttaccttcctgccacccacagatagcctctatttcagcttgtccctgagtgagaaata

SEQ ID NO: 5414 - DNA, 582 bp, Homo sapiens
  SIMILAR (16)..(327): 551254mologous to Homo sapiens Human myelin oligodendrocyte glycoprotein gene,accession number AAZ29204,Smith-Waterman Score= 227.
cgcggccgcgtcgacttttttttttgagatggagtttcgctcttgttgcccaggctggggtgcaatggcatgatcttggctcaccgcagcctccacctcccgggttcaagtgatttttgtgcctcagcctccccagtagctgagattacaggaatgtgccaccacacccggctaattttgtatttttagtagagacggggttttgccatgttggccaggctggtttctaactcccgacatctggtgatctgtctgcctgggcctcccaaagtgctgggattacaggcgtgagccaccttgcccggcaagcagcctctgatttcaactcaagagacagaagaggatcccaaattccaagcaactcccaagatgcaaatcaaaatatggaaatgttaaacaaattgaaggatttcccaatagttacctgcaacacctaaaggtcactgtttccaaatggtgcaagaactatgcaaacaatatgttggttgctgttaaattcaaggacaggacactattaacagttataacatttttgtatggacctttatgaatctgtgggaaactagagacgcgcctcgtgcc

SEQ ID NO: 5415 - DNA, 601 bp, Homo sapiens
ttgtcttaattacagcaaatctaatccctgcaaaacagtgtttcgactgtaacttccttagcacattttcctcagtaactacagaggcttttgtgtttctgtgtttattagtcacctgcgttacttgcatgaatttccttttcataatctttgttcattttttttctaggcgggttgtctttttcttaccaatcttaggagctccttgtaaaatggggatattatttatgatacaaacatttcttccgagtttgaatatctttcagtttggttccaaatgtattcagcaatatagaattttaaatttttatgcgatgtaatctgtcactcttttcctttggcctatagtttataaatattcattctcaacgatctccagacccactctgtacaatcgcagcacgcttcttcccagaaaggaccggtggaagggagctaggcagcaaacgcctcagtaagaacattctgtgtccttcaaaatggaacagttatggatgacagctttaactacttcccagaaggtacacaaacatgctaaagtcaacagctctccaaattatgctacgtgaaagaagtcagaccaaaaaaaaaaaaaaaaaca

SEQ ID NO: 5416 - DNA, 637 bp, Homo sapiens; identical to SEQ ID NO: 490
  SIMILAR (47)..(412): 991254mologous to Homo sapiens gamma-G globin,accession number X55656,Smith-Waterman Score=637.
  misc_feature (1)...(637): n = a,t,c or g

SEQ ID NO: 5417 - DNA, 569 bp, Homo sapiens
  SIMILAR (7)..(252): 581254mologous to Homo sapiens PRO1902,accession number AF118082,Smith-Waterman Score=221.
ttttaaaagacagagtctcactttgactcccaggccagagtatagtggcacaatcatagctcactataacctcaaactcctttgctcaagcaatcctcccagctcagcctcccaagaagctgggactacaggcacataccatgacacctagctaattttttaattttttgtagagacagggtctccctatgttgctcatgctggtcttgaactcccagtctcaagcaatcctcccacttcggcctcccaaagtggtagaattatagacatgagccaccacatccgaaaaactgcacttttaagtgggaaagaatggacaaggcccccaacacaccttctttagacagactcctctgctgctatatatcagtctctctactgatgacaccagagctctactccaggccagacctctctgctgagcatgagatatataaccaattgcctattagacagtgttagctacatatcccatgatattccaaattcagcatcacagatgcatcttctcaccaccacacaaagaaactgttacttattattaacttagttatgatcaatctcgtgcc

SEQ ID NO: 5418 - DNA, 377 bp, Homo sapiens
  SIMILAR (11)..(154): 811254mologous to Mus musculus putative,accession number AK003830,Smith-Waterman Score=190.
ggcacgaggcgaccccgaaagtacagtggctgaggctttcacaccaaccattccgcactgcagcatggccacccttattggtctgcccatcaaggtcaagcttctgcgctcccttcctcagagtttcaaggtcagttggagctgagccccgggagtgagaccaggcattgagggtctactgctgaggatggggactgggagagcatgaacatggataggacatcaaagcggggcctggaaggatccccattatcagataggaaactgggaagaagctttccaagtcgatgtgacaagaataaagatctgagctggaaagtggagaaaagtattgaagagtgtggcaggaacggcattagggagcggcatatgggttt

SEQ ID NO: 5419 - DNA, 558 bp, Homo sapiens
  SIMILAR (135)..(1): 571254mologous to Homo sapiens Human secreted protein, SEQ ID NO: 6619,accession number AAG02538,Smith-Waterman Score=142.
cggtggctcatacctataagcccagcactttaggaagctgaagctggaagattacttgagaccaggagtttgagaccagcctggtcaacatagcaagaccccttccctaccaaaaaaaaaaaaaaaaaaaagaaaacaaagtgctgggattacaggccaccgcgcctggcctacaaagggataatttaaaataccactatagtgttagggaaagcctcttttaatcctggcacttccccatccatttccttaaaagagatatttccaataaagttgcttttccctttttatgttatcagggtatattttttggccaaccatatgctggtaataattatacatttaaaagaatgagataatcagttttactttaaaatgttactgtgatattctagaaattcaccctttgcaattatttaatcttatggtgatattttttaaatgtcatcttaatgggtaaagggtatgcaattttaaaaagcacttttggtggtttgcgagcaaaaaaaaaaggttcaaataccaccatgttaatttgttcagcagcaaaaaaaaaaa

SEQ ID NO: 5420 - DNA, 1005 bp, Homo sapiens
  SIMILAR (45)..(260): 561254mologous to Homo sapiens ubiquitous TPR-motif protein Y isoform,accession number AF265575,Smith-Waterman Score=187.
aaagacagggtttccctctgtgtaatcacaaaggcacagtcacagctgatttgcagcctttacctcctgggctcaagtgaatttcccacctcagcctcctgagtagctggaactacaggtgtacaccaccacatccagctgatttttaattttttgtagagaggagatctcactatgttgcataggcttgtcttgaactgctgtgctcaagcgatcttcctgctttgatctcccaacgtgttgggattacaggcatgagcaccacacctggccctatttgccttttatgaagtcttttaataaagcaataaaaatattgaaatgtttttagaagcttctgcacatcaataggcatccttgaagactaattgaggacccctcatttttaagtgctgtgttgttcattaggaacggtccattgtaattttaaagttaacaaagattttgccatttctgtaagtagttatttcttctgaggcctaatatttatacattctaccttatagctagaaggtagaatacggtgttcttcagatactaaggatccaatatttccctagaatcctggatttggtcctcagatccccttcatcaatttagttaatgatttttccctacctaagggtacaagaaaaagaatgtagaacacaaaaatctctgcaaatttctgaagtctgcacccactgtaatattaccatttctgctagtttctgcctgatcctggacatctgcagcctcttaactgaatccaagtcagttaattatcagatccaatccaatcatggatccagtccagtttctgttgtgacttccaaacccagttcggatcagaagtttgctcaaactcggttccaaacagaaatctgtcgagcttcagaatctcagcgagaacttaccacgatatcagttgcttccagaaagcaatggacatcgtgagtctgaggggtaccttgcttggtcactccatgctcctgggcatgacatctgttgaaaaccttagacata

SEQ ID NO: 5421 - DNA, 395 bp, Homo sapiens
  SIMILAR (2)..(376): 771254mologous to Oryctolagus cuniculus elongation factor 1 alpha,accession number U09823,Smith-Waterman Score=474.
agctggcttcactgctcatgtgattatcctgaaccatccaggtcaatgaagcgccggctatgcccctgtattggattgccacacggctcacattgcatgcaagcatgctgagctgaacgaacagattgatcgccgctctgctaaaaagctggaacatggccctaacttcttgaactctggcgatgctgccattgatgatatggatactgtcaagcccatgtgtgttgagagcttctcacactattcacctttcggtcgctttgctgatcgtgatatgagacacacagttgcagccagtgtcatcatggcactggacaagaaggctgctgtagctggcaagggctccaactctggccagaaagctcacaaggctaaatgaacattatccatagtac

SEQ ID NO: 5422 - DNA, 801 bp, Homo sapiens
  SIMILAR (676)..(735): 951254mologous to Homo sapiens Elongation factor-1alpha enzyme,accession number AAW11237,Smith-Waterman Score=89.
gcaatgccagtggaaccacgctgcttgaggctctggactgcatcctaccaccaactcgtccaactgacaaggccttgcgcctgcctctccaggatgtctacaaaattggtggtattggtactgttcctgttggccgagtggagactggtgttctcaaacccggtatgtgtggtcactctttgctccagacaacgttacaacggaagtataatctgtttaattgtctccatgaagctttgagtagaagctcttcctggggacaatgtggggctttcaatgtcaagaatgtgtctgtcaaggatgttcgtcgtggcaacgttgctggtgacagcaaaaatgacccaccaacaggaagcagctggcttcactgctcacgggattatcctgaaccatccaggccaaataaacgccggctatgcccctgtattggattgccacacggctcacattgcatgcaagtatgctgagctgaaggaaaagatagatcgcccgttctggtaaaaaggctggaagatggccctaaattcttgaagtctggtgatgctgccattgttgatatggttcctggcaagcccatgtgtgttgagagcttctcagactatccacctttgggtcgctttgctgttcgtgatatgagacagacagttgcggtgggtgtcatcaaagcagtggacaaaaaaggctgctggagctggcaaggtcaccaagtctgcccagaaagctcacaaggctaaatgaatattatccctaatacctgccaccccactcttaatcagtggtggaagaacggtctcagaactg

SEQ ID NO: 5423 - DNA, 1551 bp, Homo sapiens
  SIMILAR (1546)..(1211): 751254mologous to Mus musculus putative,accession number AK013998,Smith-Waterman Score=420.
gcctctcgggaggctgagccagagaaatcccttacacccgggaggcggaggttgcagtgagccgagatcacaccactgcactccagcctaggcgacaaaagcaagagtataaataaataaataaataaagttttatcatcaagtaactaactacgtggacatcccctcctggcataagaaacagaacctatgaagtcaccctatgctgttgcccaatcctgtcccctgaaagaaacctatatcttgagtcttgtatttactattcgtttgcattgtcactaaagatttttacaataagtatatatatatacccaaatcacagtttgacctgtttttttgttttgttttgttttgtttgagacggagtctcgctctgtcgcccaggctggagtgcagtggcgtgatctcggctcactgcaagctctgcctcctgggtccacaccattctcctgcctcagcctcccaggtggctgggactacaggtgcccgccaccatgctcggctaattttttttgtatttttagtagagacagggtttcaccgtgttagccaggatggtctcaatttcctgacctcatgatccgccgtgcccggcccttatttcttaagaatagaaaactgtaggaatttgcatagtagatcacctggtgagacctcagttctatggtgagaaaaattctctataaaagctatatggtccatgatgtcatccaaccccacataagcatataaaatacatgataaggctctccaggaaaaaatattcacaagaaataatgacttctttcatcagcttaaaagtgggaagaacttatttgattaaaaccctgtttaaaatcgattgtcttgttagacttcccctatccataatgaaatcattacagggttctaatgtcaggtggaaaagtgttgactatggagttgtttagcctctgatcctaggataaaccaagcagttaaataatttccaaaagtacaaacagacattcccctcaagttatccgggcttctacaggtacttttcaagtgacccacaagccctatattttaaacagccacagaagtcagaaccaaattcaggtttccaacaaacactgtaaaatgctattcagcaaaagctgcagttccccgtggcagcttgtcaggtggtcagtcagtctcaattactctgggttcctctgcaattgctgtcatgaccgtgagcctctcacgttctacttggctgacagcccaggtctgaggaagtgagagccaacaatcgcttactcagcagcgcattgtgtcgcttcaggtattcaaaggagtctccttgcttttcaacaatttcttctaggcttgaaatagttctgaatccagtctccgaggtaatattgctggggtaagcatagattttttcttcttcaagtatatcaggctctggtttagctttattaaatctccggattttcactgtgtaaatgaggagacatatcatggaacagatgagttccagtgccaagatggccagaatgaggtcaagatacaatctgccaggctctgggaaagagcgct

SEQ ID NO: 5424 - DNA, 1248 bp, Homo sapiens
  SIMILAR (1)..(624): 911254mologous to Mus musculus putative,accession number AK004543,Smith-Waterman Score=986.
atgaaggcggcccgcttcgtgctgcgcagcgctggctcgctcaacggcgccggcctggtgccccgagaggtggagcatttctcgcgctacagcccgtccccgctgtccatgaagcagctactggactttggttcagaaaatgcatgtgaaagaacttcttttgcatttttgcgacaagaattgcctgtgagactcgccaacattctgaaggaaattgatatcctcccgacccaattagtaaatacctcttcagtgcaattggttaaaagctggtatatacagagcctgatggatttggtggaattccatgagaaaagcccagatgaccagaaagcattatcagactttgtagatacactcatcaaagttcgaaatagacaccataatgtagtccctacaatggcacaaggaatcatagagtataaagatgcctgtacagttgacccagtcaccaatcaaaatcttcaatatttcttggatcgattttacatgaaccgtatttctactcggatgctgatgaaccagcacattcttatatttagtgactcacagacaggaaacccaagccacattggaagcattgatcctaactgtgatgtggtagcagtggtccaaggaaaatttccagaccaaccaattcacatcgtgtatgttccttctcacctccatcatatgctctttgaactatttaaggctggtcctactcctaactcagcagttcaggtccagaattcctgtaggtggtatggctccattcagagtccagaatgtgctaagagcacaaatgcaatgcgggcaacagttgaacaccaggaaaatcagccttcccttacaccaatagaggttattgttgtcttgggaaaagaagaccttaccattaagatttcagacagaggaggtggtgttcccctgagaattattgaccgcctctttagttatacatactccactgcaccaacgcctgtgatggataattcccggaatgctcctttggctggttttggttacggcttgccaatttctcgtctgtatgcaaagtactttcaaggagatctgaatctctactctttatcaggatatggaacagatgctatcatctacttaaaggctttgtcttctgagtctatagaaaaacttccagtttttaacaagtcagccttcaaacattatcagatgagctctgaggctgatgactggtgtatcccaagcagggaaccaaagaacctggcaaaagaagtggccatgtga

SEQ ID NO: 5425 - DNA, 581 bp, Homo sapiens
tttccagaccaaccaattcacatcgtgtatgttccttctcacctccatcatatgctctttgaactatttaaggtatgatacttcacaataattgaaattttaccttttaaaaagggtttaaccagttatatttttatctcctttattattcgccacaaaacagaagcctcaatatcttttcccaagaatgcttctagtcctcctaagagaaagaaactatacagtcaatgtttgacaaagtacatgtagctcattgtagcatcaacacatatttgagaatgcatcatataattcatgatgtatcaatgctttacagccaagaggaagttcttattattttttcaggtgcccattaaagaactagtcatttattcattcattaagagaggtcatggggtgaatgtttcagtgaatgaggccttgttacctccacccccacaggctggtcctactcctaactcagcagttcaggtccagaattcctgtaggtggtatggctccattcagagtccagaatgtgctaagagcacagtcagcagttccttcaatcatctactttaaagagcatatgaatcacctgg

SEQ ID NO: 5426 - DNA, 1480 bp, Homo sapiens
  SIMILAR (223)..(1455): 1001254mologous to Homo sapiens pyruvate dehydrogenase kinase isoform 4,accession number U54617,Smith-Waterman Score=2131.
agacttgaacttgaatctcgaaccactgcatctccgactctgcccagactcttcactccgcggcaccctcaaaccccagcccaggccggggcgcacaagccagccagcgcacctgcagtcctcgcccggacgcgccgcgccccctcggaaccaggctctgctccgagcagccttcgcccctcaagccagccacagtccccgccaggccgggtgggcgtcaagatgaaggcggcccgcttcgtgctgcgcagcgctggctcgctcaacggcgccggcctggtgccccgagaggtggagcatttctcgcgctacagcccgtccccgctgtccatgaagcagctactggactttggttcagaaaatgcatgtgaaagaacttcttttgcatttttgcgacaagaattgcctgtgagactcgccaacattctgaaggaaattgatatcctcccgacccaattagtaaatacctcttcagtgcaattggttaaaagctggtatatacagagcctgatggatttggtggaattccatgagaaaagcccagatgaccagaaagcattatcagactttgtagatacactcatcaaagttcgaaatagacaccataatgtagtccctacaatggcacaaggaatcatagagtataaagatgcctgtacagttgacccagtcaccaatcaaaatcttcaatatttcttggatcgattttacatgaaccgtatttctactcggatgctgatgaaccagcacattcttatatttagtgactcacagacaggaaacccaagccacattggaagcattgatcctaactgtgatgtggtagcagtggtccaagatgcctttgagtgttcaaggatgctctgtgatcagtattatttatcatctccagaattaaagcttacacaagtgaatggaaaatttccagaccaaccaattcacatcgtgtatgttccttctcacctccatcatatgctctttgaactatttaagaatgcaatgcgggcaacagttgaacaccaggaaaatcagccttcccttacaccaatagaggttattgttgtcttgggaaaagaagaccttaccattaagatttcagacagaggaggtggtgttcccctgagaattattgaccgcctctttagttatacatactccactgcaccaacgcctgtgatggataattcccggaatgctcctttggctggttttggttacggcttgccaatttctcgtctgtatgccaagtactttcaaggagatctgaatctctactctttatcaggatatggaacagatgctatcatctacttaaaggctttgtcttctgagtctatagaaaaacttccagtttttaacaagtcagccttcaaacattatcagatgagctctgaggctgatgactggtgtatcccaagcagggaaccaaagaacctggcaaaagaagtggccatgtgaagagggacactcaggacacttt

SEQ ID NO: 5427 - DNA, 697 bp, Homo sapiens
  SIMILAR (78)..(188): 671254mologous to Ovis aries beta-C globin,accession number X14728,Smith-Waterman Score=142.
gacactcgctttctggaacgtctgaggttatcaataagctcctagtccagacggccatgggtcatttcacagaggaggacaaggctactatcacaagcctgtggggcaaggtgaatgtggaagatgctggaggagaaaccctgggaaggcttctggttgtctacccatggacccagaggttctttgaccagctttggcaacctgtcctctgcctctgccatcatgggcaaccccaaagtcaaggcacatggcaagaaggtgctgacttccttgggagatgccataaagcacctggatgatctcaagggcacctttgcccagctgacgtgaactgcacttgtgacaagctgcatgtggatcctgagaacttcaagctcctggggaaatgttgctggtgaccgttttgggcaatcccattttcggcaaagaatttcacccctggaggttgcagggcttcctggcaaaagcagaagatggcagaagatggtgactgcagttggccagtgccctgttcctccagattaccactgagctcactggcccatgatggcagagtttttcaaggataaggcttttattcttgcaagcaattacaaataataaatctatttctgctaagagatcacacatgattttcttcagctcttttttttacatctttttaaatatatgagccacaaagggtttatattgagaa

SEQ ID NO: 5428 - DNA, 316 bp, Homo sapiens
  SIMILAR (244)..(315): 661254mologous to Drosophila melanogaster fumble,accession number AF221546,Smith-Waterman Score=100.
  misc_feature (1)...(316): n = a,t,c or g
gtattttagcagtccatnccaaagacaactataaacgagtgactgggacaagttttgggaatatgatttataaggagaagcgagaatctgttagtaaagaagatctggcaagagctactttagttactatcaccaataacattggttctgtggcacgaatgtgtgctgttaatgagaaaataaacagagttgtctttgttggaaactttttacgtgtcaataccctctcaatgaaacttttgggcatatgcactggattactggtcaaaaggtcaactaaaagcattgtttctngaacatgagggttacttggggc

SEQ ID NO: 5429 - DNA, 2631 bp, Homo sapiens
  SIMILAR (913)..(1941): 771254mologous to Mus musculus pantothenate kinase 1 beta,accession number AF200357,Smith-Waterman Score=1414.
atgggctatggtgttactgccttcttcatatgggcattcagcagggtcctgagttcttgtcctgcatccaagaagaatgagcttatgctgacagccatggatatatgcgctctttcccttcggtgtgccactgaagatcctggtgttgccatgggccgccgccccgcctgttgttaccggtattgtaagaacaagccgtacccaaagtctcgcttctgccgaggtgtccctgatgccaagattcgcatttttgacctggggcggaaaaaggcaaaagtggatgagtttccactttgtggccacatggtgtcagatgaatatgagcagctgtcctctgaagccctggaggctgcccgaatttgtgccaataagtacatggtaaaaagttgtggcaaagatggcttccatatccgggtgcggctccactccttccacgtcatccgcatcaacaagatgttgtcctgtgcctttagagcgcatgcgagcaaatgtttccaaaattttgggaatatgatttataaggagaagcgagaatctgttagtaaagaagatctggcaagagctactttagttactatcaccaataacattggttctgtggcacgaatgtgtgctgttaatgagaaaataaacagagttgtctttgttggaaactttttacgtgtcaataccctctcaatgaaacttttggcatatgcactggattactggtcaaaaggtcaactaaaagcattgtttctagaacatgaggtatgtgtggagacagtgaatgatgggcagtttcacagtgtggagctggtgacgctaaaccagaccctgaacctagtagtggacaaaggaactccaaagagcctggggaagctccagaagcagccagcagggggcatcaacagccccctctaccttggagctttcccatggtttggcatggacattgggggaactctagtaaagctctcgtactttgaacctattgatatcacagcagaggaagagcaagaagaagttgagagtttaaaaagtattcggaaatatttgacttctaacgtggcatatggatccaccggcattcgggatgtacaccttgaactgaaagatttaacactttttggccgaagagggaacttgcactttatcaggtttccaacccaggacctgcctacttttatccaaatgggaagagataaaaacttctcaacattgcagacggtgctatgtgctacaggaggtggtgcttacaagtttgaaaaagattttcgcacaattggaaacctccacctgcacaaactggatgaacttgactgccttgtaaagggcttgctgtatatagactctgtcagtttcaatggacaagccgagtgctattattttgctaatgcctcagaacctgagcgatgccaaaagatgccttttaacctggatgatccctatccactgcttgtagtgaacattggctcaggagtcagtattttagcagtccattccaaagacaactataaacgagtgactgggacaagtttattgactggctgtgaaagttttgaagaggctcttgaaatggcatccaaaggtgatagcacacaagctgacaagctggtccgtgatatttatggaggagattatgaaagatttggtttgccaggttgggctgtagcatctagttttgggaatatgatttataaggagaagcgagaatctgttagtaaagaagatctggcaagagctactttagttactatcaccaataacattggttctgtggcacgaatgtgtgctgttaatgagaaaataaacagagttgtctttgttggaaactttttacgtgtcaataccctctcaatgaaacttttggcatatgcactggattactggtcaaaaggtcaactaaaagcattgtttctagaacatgagtttggctacaacattggagtcatcagtgctcctgagacagtcatacaggactttctcagttacactttgaaagagaggtcagaagactctccctctgaggttttgctcatgtccccctggccctcgtctgtggccatcttccccaatggtgatatgattggctcctttctgttgcactctttgtcaaccactttggcagcccaaaatctccttaagctgataagcaacttcagcaaagtctcaggatacaaaatcaatgcacaaaaatcacaagcattcttatacaccaataaaagacaaacagagagccaaatcatgagtgaactcccattcacaattgcttcaaagacaataaaatacctaggaatccaacttacaagggacgtgaaggacctcttcaaggagaactacaaaccactgctcaatgaaataaaagaagatacaaacaaatggaagaacattccatgctcatgggtaggaagaatcaatatcgtgaagatggccatactgcccaaggtaatttatagattcaatgccatccccatcaagctaccaatgactttcttcagagaattggaaaaaactactttaaagttcacgtggaaccaaaaaagagcccacatcaccaagtcaatcctaagccaaaagaacaaagctggaggcatcacgctacctgacttcaaactatactacaaggctacagtaacgaaaacagcatga

SEQ ID NO: 5430 - DNA, 1594 bp, Homo sapiens
  SIMILAR (2)..(514): 861254mologous to Mus musculus pantothenate kinase 1 beta,accession number AF200357,Smith-Waterman Score=765.
tattttagcagtccattccaaagacaactataaacgagtgactgggacaagccttggagggggtacctttctgggtttatgcagtttattgactggctgtgaaagttttgaagaggctcttgaaatggcatccaaaggtgatagcacacaagctgacaagctggtccgtgatatttatggaggagattatgaaagatttggtttgccaggttgggctgtagcatctagttttgggaatatgatttataaggagaagcgagaatctgttagtaaagaagatctggcaagagctactttagttactatcaccaataacattggttctgtggcacgaatgtgtgctgttaatgagtaaataaacagagttgtctttgttggaaactttttacgtgtcaataccctctcaatgaaacttttggcatatgcactggattactggtcaaaaggtcaactaaaagcattgtttctagaacatgagggttactttggagcagttggtgcacttcttgggctgccaaatttcagctaaagcatcaggtctctctctctgctaataaatgtcatccaagaggaactaaaaccagaggcattattactgcattgtttgtcactgggaaccaaaggataaaagagtagcataagctgctgaatgttgccatattaaaggagagaacttggtaacgtgaagtatttctcattgaaatgctttcccttttgtatatagccagtgttaaatccttaaatgcaatacagcctctgattattgagcttcctcttaaaaagatttttttattttatgtagccaacattgcagtactgtatgctcaaacacaaatcttaaagtatcggaactgtttagcttatgaaaataatcgactctgaatatttgttacaagtctgttttatgtgttttgattactagtgagcagaaaataacataccctgtattcaaaattactgaaatggcaatcaaagatgatcatttttatgtgattttagaaatgttaaggcaatactactaattattgtaggtttttttaacgtatcacccaaagcatgtatgtgatctttccccattagtatctttttctcaaatgccataattaactgaaatactattattaaattttcatgaggaattctaaaatgaatcctgggaaatgcacgtttggtgatggttgcactttctgtattttacaggaattagtcaatacatgttgaaatgtttaacattttaagatttggaggcttaattactgggagtctgtctaatgaagtcctgggactattggtaatggaatatgatttgagttcactgtgctctttctgtttgtccccactgtctcttccttttcgtccctcctctcctctgtctcactttttgcctgttgctctccttttccatcgtttccctctctttataccccctcattcgccattctttttattgctctcttttgcatctttttctccttttttttcttttttacttctttccttcttttccattttttatccacggtttatcttatcctattgctattttattcctccattttccttatctctttctccactgttcttcttttcttcc

SEQ ID NO: 5431 - DNA, 410 bp, Homo sapiens
  misc_feature (1)...(410): n = a,t,c or g
aagaaatgggctaaggtatagacagcctatttaatgtttaatagctgaaaacttcccaggtcttgctagagacatagacatttggaagctggaaactcaaggagtcccaaatagattcaatctaaagaggtcttcccagagacaaatgatagtcaaactgtcaaaagtcaaaaacagagaattctaaaaacagcaaaagannnnnnnnnnnnnnnnnnnnnnnnnnnnnnnnnnnnnnnnnnnnnnnnnnnnnnnnnnnnnnnnnnnnnnnnnnnnnnnnnnnnnnnnnnnnnnnnnnnnnnnnnnnnnnnnnnnnnnnnnnnnnnnnnnnnnnnnnnnnnnnnnnnnnnnnnnnnnnnnnnnnnnnnnnnnnnnnnnnnnnnnnnnnnnnnnnnnnnnnnnnnnnnnng

SEQ ID NO: 5432 - DNA, 412 bp, Homo sapiens
  misc_feature (1)...(412): n = a,t,c or g
aagaaatgggcaaaggtatagacagcctatttaatgaaataatagctgaaaacttcccaggtcttgctagagacatagacatttggaagctggaaactcaaggagtcccaaatagattcaatctaaagaggtcttcccagagacaaatgattgtcagactgtcataagtcaaaatctgagatattctatttacagcatcagaatcccaatagtctccttaagccgataatcaactttagcatagtctcgatgtactgtatctcagagcatacttcatatctttcttattcctcttatcacatcttaagccagattgatagcagaacttccttgtattatatgttttatctgttaatattactagatttctttttatcatggattgattagttactatctattttctccgccn

SEQ ID NO: 5433 - DNA, 1417 bp, Homo sapiens
  SIMILAR (232)..(77): 881254mologous to Mus musculus putative,accession number AK005634,Smith-Waterman Score=224.
agggcacagatgtgggcaaggtgaaggcagcccacgctctatcacacaagaaactgtgcctcaagatgactcaagtgacaacccagtggttggagatcctccagcggctttgcctgcacgaccagctgtctgtccaacaccggggcctggtcattgcctacaacctactggcagccgatgctgagctggccaaaaagctggtggagagtgagctgctggagatcctgactgtggtgggcaaacaggagccagatgagaagaaggcagaagtggttcacacagcccgagaatgtctcatcaagtgcatggattatggtttcattaaaccagtgtcttagacagcgaccctcagggatgctgggagtggtcctgtactgtgcagagtcctgggttggttgggttctcctggagagtcaggtcatctagggatcatagcagtgacaatgaagtctcaatataaaggaaagacttgattgttctctgagttgtgagtcttctcctttgtcctgacagagtttggatgtttcactctctctcttgcttccgtgtctccttatatttgtcatgtttcagaaattcccagaataattttcacccatgattagaaataggttggatcattctttctgtacccattcctgaaggccaggataataggttgaagttctttatattttggaaaatggattttgtggtaaggtaggaactaaccgggtgtgtgcatataaaggttaatgctgttgtatttggatgctgatctgtgctgtttacatgacctctctcccacactatttgagtgagtctgttcaggactgtgtgtttcacctgcagtgctctgtcccagtcccatgcccattcccatcacttcactgtgatggaaatagagtttatgttcaacagtggggcatgacctctgcaatttgcttgggaaagtcttccaagcaagatggacatgatgaatacaaataagatctactcaaagtacttcaaacaaaaaataaataattcattggctcatgtatcttggccacccagggaaggtctgacattgttagttagatctagagtttatgttcaacagtggggcatgacctctgcaatttgcttgggaaagtcttccaagcaagatggacatgatgaatacaaataagatctactcaaagtacttcaaacaaaaaataaataattcactggcttgcatggtgaaagcagatagtgccatcctcactgaccagaccaaggagctgctggccagggtattcctggcactgtgtgacaacccaaaggaccgaggcaccattgtggctcaaggtggtggcaaggccctgattcccctggctttggagggcacagatgtgggcaaggtgaaggcagcccacgctctatcaaagatcgctgctggcttcaatccggacac

SEQ ID NO: 5434 - DNA, 1172 bp, Homo sapiens
  SIMILAR (5)..(253): 491254mologous to Mus musculus T2,accession number X67863,Smith-Waterman Score=182.
acacagtgagagaggcaggcagagaaagagagtaagacagaagaccgacacagtgagagagaaaggcagagagagagagagacagacggggagagaaagagagtaagacagaagacagacacagtgagacaggcagagagggagagagagagacaaagacagagacagagacagagagaaagaaagagacagacagacagagaaagagacacagagagaaagacagagacgaacagagagaaacagacagagagaaggccctagcccagtagcaatacagtgccttttctttcattttctctttcttttcttttctttttttctttcttgtatatctgtatgcatggatgtatgtatgtatgtatgtatgtatgtatgtatgtatgtatgtgtgtatttatttatgtaccgtatttatctggagaccgggtctcactctgtcgcccaggcctgtagtgcagtggtgcgatctttgggtcactgcagcctccgcctgccaggttccagccattcttcccccccagcctcccgagtagctggggttacaggtgcctgccccacggcgcctgactccatttcgtattttcaagtaagagacgggggtttcaccacgttggcccgggctggtctcgaactcctgacctcgggatgacagacgtgagccactgcgttcagtgtacagtgccatttcttagaaaatcactccttcacgggaacacacacttagaggtgacgtgtagagattttatttatttagttagtttagttagttagttagtttgttagttagttattatgtgcgcggggaggtggggggacggagtttggctcttgcctgcccaggctacagtgcaaatggccctaggggacctcaaggagtcaaccctacggcagagaggacaccgtcattctgaacgtaagggccacaacgaaaaggttgcaagggcccgccgcttttaaaggctgaaatccccggcggctcaggcctgtcgtaaccagacactaagggaaggcccaggaaggtgcatcatttgagggtcaggaagttcgagaccagcgtggccaacgtggagaaaccccgtctctactaaaaatagaacgatgagccggccgtcaatggtgtgcgcctgtaatcccagctaccgaagaagaatcactggaacccgggaagc

SEQ ID NO: 5435 - DNA, 1356 bp, Homo sapiens
gtagagggaaacagccactgtgacaacccagagacctggggtcagccttaagtaggaagaaattgcagtgtctatcctgctgccatcagcccttcctgctccagctacagttgggccagctgtggccttagtggatggtctgggtggatggctctgtcaatgtcaggcccgagaacagcctgcggaatgacagcctggggtccttgtgccacctggtggacgggaaaggcagggcggctgcagtttcagaggccagagcctggccctcctgtcatctgctgacttcacagaaggcccaggctacaaaccccacagtttatccaaggaaaatctagttaaaataatccaattggacaagaagccccaggaaggggtatttccaacacttggcgtctcaatgaggataaaagggagggactgtaggttgtccagcataaggagccccagagttctttcaccagcagacagattctccatgtgttttcccactgttaaggactctgtccaaagaacctcagcatcagctccctcaagcttaatgatccaggctgcagaagaaaagtgtcactccagtgagtgacccacggcttcagggagcccacagcagcatcagacccatccaggggctacagggcctgcccccctgcaggtagaaacacagtatacccgtttgtcatctggtttggcaggacccaggaccctcagcaatgagtctgagtgttcaaagcccactttagaacctaaagcattttgggttaataaagcaaaattttgcttatgttatttggtggtgtcaccgcagcttataccaagacaccatggctcagacatgggatcaggacacacctttgagatcccactgttagcaagaaaaggctgtccaaggcaggcagtgtggtagttgtctgattttgtttaccacacgcaagggtcccagggaagtcttgcacagactcttagcaagacaagcagggaaaagagagggtccctggtgggtggaaggattgggaaggggattctgggcctggaagcctgctccttcccctctcagcagtctcaggactactgttggattgcaaacaggatcttttgacccagtcttcggactcattctgtaaatggaggagctgaggtcagaggggggctgtgaactactcaagaccacatgcttgcagtcctacagggcttcccgacccacaggccagctacggattttgcacttttgctccaggccacttgtgtgtgtatgtgtgtgtgtaccactgccatctgaacaaactatgcaataccacctgctcccttccaggagcattttaataaaagattttttttaataacagaaaaaaaaaaaaaagg

SEQ ID NO: 5436 - DNA, 1459 bp, Homo sapiens
ttttttttttttttttttttttttttttttttttttttggactacaaaaaagaattgtatttacagatgacatgaactaatcagatacatccaacatcgtctggaaaacttaatggcatgccataacttaatatcacagtcaacgatgcagaagaggcgtcataattgttttgtcgaagagcaaagccagaagcagaagaagtagaatgaagcaatataaaaatgaaacagtgaaagacaaagggaagtaccacaaaaacgtttcaatgatatcactgaaatgacttgagaaaccagttaggcctctggagctttattattattattattattattattattattattattattattattggcaagtcctgtcatgaaaatgccctgaagattcagacctttgcaatttttccaaagctccttcccactggaacaagtcttaatggaaaagcacaagatgtacagagaagactgggatcacctctcccacggcattggaagagctgatgaaaaggagcagttcctctatcccagagcatcttctgggtggtgacttttttttgcctgtgggccatgcctctctgtcctcacaacagctgcagaatgatacaccgcacctccaacaaagctcacataccctgccgagctcccctgcgatggaggcttccagaatgcatatacgagctgggcatctcagatggatttgatttcaatcaacattagtgcctaatgaacatctttgatatgcaaaatgtctatgctactgaataatacagaatcatctttccccacaaaaactttcttctaggaggttaatggaaatagtcgatctgtaaatgttaatatatctattgtaaagatgaagaaattgagggacagtaattaaaggaatcaaatggatcagaagaactggaaccccataacatcttggggaaagttaatattttatggtctttaataaagcagggctattataatcctcatatggaagtacgctgaaagtttatatctaaagaatattaaaatcacattttatcaataaattttcacatgctgaatgatagcaatataatttttaaatgagaattttaaaatatcaaatagaattatggaccaagcggaaatgcttggtttttacatattttaaacaatattacattatacaattaactcactttaagttcataaaaattcaatctacgttatacataatttggtatgcagatttgctagttttaaatgtagtttaaagtttatgtaagcatgcacaattaagtgaataaaactaggtaaccaaaccactgttggtgaaaaagcaagataagtacatgctctcagtcttgtttgttgtggcccattttaactggtgagtacatggctcccactaattagaacaactgctgtctatttttaaattcatttgctcacaagagccagtgaatgtgtatgtggatattat

SEQ ID NO: 5437 - DNA, 397 bp, Homo sapiens
  SIMILAR (3)..(269): 781254mologous to Homo sapiens zinc finger protein 106,accession number AF205632,Smith-Waterman Score=327.
ttcagagggatctaacccggcacattagtttgaagagcaaaactggagtacaccttcctgagccaaacctcaatagtgcccgccgcattcgcaatattagcggtcaccgaaagagtgagacagagaaggagtctgggctgtagccagccttacggcagattctaaatgcatcttggagaaaagtcatctgggaacaggttattcagctggttagctagactacgcgtgagctgcgcagaggctgactcagtgttggcatagatgacgtgggcgtcgaggtcacggtactcgttgtagtttttctgtgctcgagtaccattgttgcgctgctatgtttctcttatgtgtcttgtttatgtccgtgttggtgtttactgtcactctgttcttcgtttcg

SEQ ID NO: 5438 - DNA, 547 bp, Homo sapiens
  SIMILAR (143)..(250): 1001254mologous to Mus musculus putative,accession number AK012042,Smith-Waterman Score=205.
ggcacgagaactctggtttggattgtcaggtagcagtgtctaggtactggagagaagttaaagcggagtttatttttcctttgtacaaaggttaaaaactctcactcaacatcttattttgatatttgggtttttaccataggagtatccaacccttacaaccttcttcgaaggagaaataatcagcaaaaaacaccctttcttaactcgcaagtgggatgcagatgaagatgttgatcggaaacactgggtgagtaaatctgatctgtgctgggtcatctaggggctgctagagaattgaagaaatgctgggagccagagaccttgtcccttattgaggattactggggctttgcaaccaagtaaaaggttgcactgcacacagacctcagttgttccatcttccttatgaggacagtttaaatacgatctgacctgctgcttaaatagcaaatggttgtctgatgatagcaaccccagagttccagccaaaactctgctcagctatcacaatcttatcagggtccccccatccttcccacctggt

SEQ ID NO: 5439 - DNA, 639 bp, Homo sapiens
  SIMILAR (17)..(70): 661254mologous to Homo sapiens Human secreted protein, SEQ ID NO: 6953,accession number AAG02872,Smith-Waterman Score=61.
gaaaaaggccagacgcagtggcgtgatcttggctcactgcagccttgaactcccaggctcaagtggatcctccctcttcagccccgcaagtagctgggactacaggagtgcaccaccacccccatctaatatttttttgttgttattctagggacgagttctcactatgttgcccaggctggcctcgaactcctgggctcaagcaatcctcctgcgttggcctcccaaagtcctgggattacaggtgtaagccactacggctggcctattattgctgtattctaacttattcatctcctatggctagcctccaagctggaagctgaattgacagttgaaaaataatgacatgtatacaaagtatgtttgaaggattgcagatgcaggggcaccatatgctaaaggagtgttggaagctcactgcagaagatgacaaaagcagactgatatgtattatttgctgaaatataagctggaggcacaggtgaagattgccaaacctaatgaacagtttggcaaataagacaggctgtcaggccatggcagttcagcagtgggcgtgctgcctgtgaaccaagtcatttgttccagaggactacacttaaataccacaaataaaatcttccttgtcactgataa

SEQ ID NO: 5440 - DNA, 357 bp, Homo sapiens
cggacgcgtggggaagaaattattacaggtttaaaaactttaaaaaatgggtgcagtcctaaaatcactttgtaatgctagcataatcttgataagaaatgctaacaaatgcaataacagaaggaaaagctaccagccattttcattcatgaatatagatgcaaaagttttaaataaaatataagaaagcattatgaccaggttatatcttcccgggaatataagatacaatatcatcaaatttaacattgattcataataaaaatttgttaaaaaatgatgcagaaagaaaagaaatccttataacattcttagaataaacagttgaaagtgtttcctctatgatcagtaagaggg

SEQ ID NO: 5441 - DNA, 1157 bp, Homo sapiens
  SIMILAR (818)..(1015): 631254mologous to Homo sapiens Human myelin oligodendrocyte glycoprotein gene,accession number AAZ29204,Smith-Waterman Score= 172.
gagaactcccggtagctatgccagaaaagtactttcttcacaggaggtgttgaaataatgccggataaatgcaagtaaggtcaatatctccctcttggtctagatcaggagctggcaaactttttctttaaggagacaagtagtaaatcttttaggctttgcaggctatactgtccctgtcccaactattcaactctgccaagaaagcagtcccagacaataccataaatgaatgggtgtggctatgctctaataacattttgtttatggacactgaaatctgaatttcatagaattttcaggtgtcatgaaatattgttcttcttttgattttctgcccaatcatttgaaaacatataaaccattattagctcacaggttgaataaaaacaggtggcaggccaggttttattcgtgggacatagtttgccaacccttgatctaatggtccttttatagtccatgttgtaaaatgtataatatttttaaaatccccgttacaatatggcctactttatttaaaaaaacaacaaaaacgttccagttaaaaataattcctctttccttccccacaaccaagggccatttttactaaacaataagctatttcctttaattagaaaattgatcaaggatatacaatgagtctctggcctcaatttatgaacccatgagccaaatatgcaagaagactcaaaatttgccacccagccaaagaatctactggcttacaatgttaaaaatttatttggaagtattcctgcacacatctcagcatcggtaatccagagttataaaaaataatgttggagcatttgtattctttttttgaggcggagtctcgctctgtcatccaggctggagtgcagtggcgtgatctctgctcactgcaagctccgcctcctgggttcacgccattctcctgcctcagcctccagagtagctgggactacaggcacctgccaccacatccgactaattttttttgtatttttagtagagacgaggtttcaccgtgttagccaggatggtctcgatctcctgatgtcgtgatctgcctgccttggcctcccaaggtgttgggattacaggcgtgagccactgtgcccagcccagcatttgtattcttaatagaaaaaggatggatacatctaaat

SEQ ID NO: 5442 - DNA, 407 bp, Homo sapiens
  SIMILAR (39)..(170): 771254mologous to Homo sapiens high mobility group protein 14,accession number J02621,Smith-Waterman Score=176.
cccacgcgtccgcccacgcgtccggccacgcgtccggaggagctgagggaaaacaggccgaagtggctaaccaagactctactgaagacttacctgcggaaaacggtgaagcgaagactgacgatagtccagcctctgatgaagcaggcgagaatgatgcctagtctgattaatagccatataccatgtcttatcagtggttcctgtataccttcttggacaatccagaggaacaattttatcaactattgtgtatatgcaagttttttagcagctctagaaacatttttatgaaggagggaatcccacctcatgcgattttgcaagtgtaaatgctttgttttaataggcggaatcatttgctggttggccattctttggcacagccagagaatagagtgagattg

SEQ ID NO: 5443 - DNA, 913 bp, Homo sapiens
  SIMILAR (98)..(379): 561254mologous to Homo sapiens Human myelin oligodendrocyte glycoprotein gene,accession number AAZ29204,Smith-Waterman Score= 203.
taataaacatccgattttatttacaaagcattaaagcttcagcaagaagtacccaaggctaagtctcatcttgtacaaaactacagattttttttttttttttttttgagatggagtcttgctctgtcacccaggctggagtgcagtggcgcaatctcagctcactgcaacctctgcctcctggattcaagcaattctcctgcctcagcctcccgagtagctaggattacaggtgcccgccaccacgcccagctaatttttgtatttttagtagagacggggtttcaccatgttgaccaggctggtctcaaacacctgacctcagatgatccaccagcctcggcctccccaagtgctgggattacaggtgtgagccaccatgcccagcccagaatatttttaaaaacaaaattttggggggtggcagggcagggatgacaaaaaggaagaagagaatatacatatattgtacaaatccaaataattcaaattgaaatggataggaggttttttaaaagttgaaaaaaaaaattccaaaaacataaataattattaggagctactgccagagacaatctgacagggctgaagatgattttctcagtagcccagtttaggaggtggacatagccacaaacatccaaatgcacaggcagaggaaaccaagctacttcacacatggaaagatggcagaaaccctctaagtcccatagtttgcacactgctgcagtgtacagtgcagaggactggaatggatataatgtctgcaaaacaaaaacatgtctagtgagccatctactaatctcaaccactggtctaactcatgacagtctcaaaatgaatatttaagaaaaaagtagtggcatctaaaaatatagacgttttgcaactgactcagggagagctctttctt

SEQ ID NO: 5444 - DNA, 362 bp, Homo sapiens
  SIMILAR (147)..(362): 401254mologous to Homo sapiens unnamed protein product,accession number AK000496,Smith-Waterman Score=120.
  misc_feature (1)...(362): n = a,t,c or g
gaaacctgagtgtggtagagaggggatcctgccatgttgttcctcatcagcctggccagagggcagctttagaccttttcaaatgaatctgggttcttttctttcnnnnnnnnnncnnnnnnnnnnnnnnnnngaaaagggacttttcctttgccccccggtttgaagcccatatgggaaatctaatttattggaaccttccgcttccaggtttaaacaatttttctgccttggccctttaaataactgggattaccggctttttcccccattcccgggaaattttggggtttttaaaaaaaaccgggtttttcccttttggcccagtttggtctaaacccccgattccaggggaatccccg

SEQ ID NO: 5445 - DNA, 395 bp, Homo sapiens
  SIMILAR (5)..(259): 401254mologous to Yersinia pseudotuberculosis putative oxidoreductase,accession number AF335466,Smith-Waterman Score=120.
tggttggaaggacatgttcaatgtgaacgtgctggccctcagcatctgcacacgggaagcctaccagtccatgaaggagcggaatgtggacgatgggcacatcattaacatcaatagcatgtctggccaccgagtgttacccctgtctgtgacccacttctatagtgccaccaagtatgccgtcactgcgctgacagagggactgaggcaagagcttcgggaggcccaaacccacatccgagccacgtgtctcaaacccgaggatgtggccgaggctgttatctacgtcctcagcacccccgcacacatccagattggagacatccagatgaggcccacggagcaggtgacctaatgactgtgggagctcctccttccctccccacccttcatgg

SEQ ID NO: 5446 - DNA, 363 bp, Homo sapiens
  SIMILAR (282)..(181): 971254mologous to Homo sapiens Human secreted protein encoded by gene 79 clone HE9HW52,accession number AAY02728,Smith-Waterman Score=174.
gcgatttttcttttttaatgatcaccatgaaatccactgggccaggcctggtgttctgctgccatagtcagagtcagagtggagggatgaccccaggaggggacaagaagccaagactgggccacagacgttgaggtgcaagaagatggggattttggccacaactcctttcccatgtcaaagggaagacactgagagcagacaaaggccaagtgcccaggggcacatgaacaagttaacaagtaaaacaattagggacaccacctcctttccccagcccatttttcacatttacaactgaagcaatttgacaagatgatataaaaatctcaaacaaattttctagcccctggtcggggtgtg

SEQ ID NO: 5447 - DNA, 1538 bp, Homo sapiens
  SIMILAR (133)..(357): 981254mologous to Homo sapiens Human secreted protein, SEQ ID NO: 6744,accession number AAG02663,Smith-Waterman Score=386.
atggagcggtggcgcgaccggctggcgctggtgacgggggcctcggggggcatcggcgcggccgtggcccgggccctggtccagcagggactgaaggtggtgggctgcgcccgcactgtgggcaacatcgaggagctggctgctgaatgtaagagtgcaggctaccccgggactttgatcccctacagatgtgacctatcaaatgaagaggacatcctctccatgttctcagctatccgttctcagcacagcgctgtagacatctgcatcaacaatgctggcttggcccggcctgacaccctgctctcaggcagcaccagtggttggaaggacatgttcaatgtgaacgtgctggccctcagcatctgcacacgggaagcctaccaagtccatgaaggaagcggaatgtggaccgatgggcacatcaattaacatcaataagcatgtctggccacccgagtgttacccctgtctgtgacccacttctatagtgccaccaagtatgccgtcactgcgctgacagagggactgaggcaagagcttcgggaggcccagacccacatccgagccacgtggcagcttcggagggaggaggccgctgccggatatcaggcagccatcactgtgaagctggggttctgtggcctccatcctctcccctcgacctccccaagacctggcaaagctcagcccctgagaaggccctctctgttggcccagtgcatctctccaggtgtggtggagacacaattcgccttcaaactccacgacaaggaccctgagaaggcagctgccacctatgagcaaatgaagtgtctcaaacccgaggatgtggccgaggctgttatctacgtcctcagcacccccgcacacatccagattggagacatccagatgaggcccacggagcaggtgacctattgactgtgggagctcctccttccctccccaccctttatggcttgcctcctgcctttggattttaggtgttgatttctggatcacgggataccacttcctgtcaacaccccgaccaggggctagaaaatttgtttgagatttttatatcatcttgtcaaaattgcttcagttgtaaatgtgaaaaatgggctggggaaaggaggtggtgtccctaattgttttacttgttaacttgttcgtttgcccctgggcacttggccttttgtctgctctcagtgtcttccctttgacatgggaaaggagttgtggccaaaatccccatcttcttgcacctcaacgtctgtggctcagggctggggtggcagagggaggcccttcaccttatatctgtgttgttatccagggctccagacttcctcctctgcctgcccchtctgcaccctttcccccttatttatttccttttcggctccccaggccaagtcttggcttcttgtcccctcctggggtcatccctccactctgactctgactatggcagcagaacaccagggcctggcccagtggatttcatggtgatcattaaaaaagaaaaatcgcaaccaaaaaaaaaaaaa

SEQ ID NO: 5448 - DNA, 653 bp, Homo sapiens
  SIMILAR (144)..(242): 661254mologous to Homo sapiens PRO1902,accession number AF118082,Smith-Waterman Score=127.
gagacaaggtctggctctattgcctaggctggagtccagtggtgccgtctcagctcaatgcaacctccacctcgcaggctcaagctatccttccacctcagcctccccagtagctgggattacgggtgcacaccaccaattgcccggctaatttttgtagagacagggtttcaccatgttgcctaggctggtctcaaactcctgagcttaagcaatctgcccacctaggcctcccaaagtgctgggattacaggcatgaatcaccaggcccagccagtaatttcaatattcaaatcttcctcatttggctagtagtcatcgctgctactctgcaccacagaattcagtcaagaaaccttcccaaattttatgagttcttcctcttcatgacagttcccagttgagaggatgcaattcttagattatatcaaaacatctgttttgctattttggttctgtttgttatccctacatagaaacgtcccaaaccacaggcaagcccatttctcagagagaaaattttaaagaagttttcaaagactttgcttataaattatagtactaatcatcaaatactcactgagcacctattatgccccaaaccggagattgttgtttctcaaaaaccgctcctctgcatggttcctaacttc

SEQ ID NO: 5449 - DNA, 401 bp, Homo sapiens
  SIMILAR (1)..(393): 991254mologous to Mus musculus putative,accession number AK012042,Smith-Waterman Score=717.
acccttacaaccttcttcgaaggagaaataatcagcaaaaaacaccctttcttaactcgcaagtgggatgcatatgaagatgttgatcggaaacactggggcaagtttctggctttttatcagtatgcaaaatcatttaactcagatgactttgattatgaagagctgaagaatggagactacgtcttcatgaggtggaaggaacagtttctggtcccagatcacacgatcaaagacatcagtggtgcttcttttgccgggttctactacatctgctttcagaagtcagcagcctccatagagggctactactaccataggagttcagaatggtatcagtccctcaatctaacccatgttcctgaacacagtgcacccatctatgaattccggtgacaacg

SEQ ID NO: 5450 - DNA, 508 bp, Homo sapiens
  SIMILAR (7)..(303): 981254mologous to Homo sapiens AMSH,accession number U73522,Smith-Waterman Score=538.
  misc_feature (1)...(508): n = a,t,c or g
caattccagggcctcatcacactgggctggattcatactcaccccacacagacttcgtttctctccagtgtcgacctacacactcactgctcttaccagatgatgttgccagagtcagtagccattgtttgctcccccaagttccaggaaactggattctttaaactaactgaccatggactagaggagatttcttcctgtcgccagaaaggatttcatccacacagcaaggatccacctctgttctgtagctgcagccacgtgactgttgtggacagagcagtgaccatcacagaccttcgatgagcgtttgagtccaacaccttccaagaacaacaaaaccatattcagtgtactgtagcccctttaatttaagctttctagaaagctttggaagtttttgtagatagtaggaaagggggggcatcacctggagaaagagctgattttgtattttcagggtttgaaaagnaataactggaacatattttttagggcagttcagttt

SEQ ID NO: 5451 - DNA, 514 bp, Homo sapiens
  SIMILAR (80)..(268): 701254mologous to Homo sapiens AMSH,accession number U73522,Smith-Waterman Score=210.
ctcagaaagggaatcgcaaataaggagggattaccatatatcctcgctaagagtcctctgactctttttctctcctcagactcaccccacacagaccgcgtttctctccagtgtcgacctacacactcactgctcttaccagatgatgttgccagagtcagtagccattgtttgctcccccaagttccaggagtgagtatagagggcatggttctgggtgtttcaagggggtagtagggaagaaagcctcaggggaaaaggtctctattcttgtggacttgtcctttgtaaaataccatagattataatgtaagttggttattcctaaagggcttccttttaagcccccatatcatgatttatctatcatgcttgttcaaaaagatatccaagtaacaacttagttgcttttctaagaaaagtctacaagaaatttgaagtgtttgacttgaagcgataggaatgtcaagagttctctgttggattagaaagtttcaaaaacataaaatataaa

SEQ ID NO: 5452 - DNA, 276 bp, Homo sapiens
  SIMILAR (226)..(276): 761254mologous to Homo sapiens Human myelin oligodendrocyte glycoprotein gene,accession number AAZ29204,Smith-Waterman Score= 81.
ctcccaaagtgctgggattacacgcatgagccactgtacctggccaaaatctcctaatgttttaagaaagtttacaaatttgtgttgaactgcactctagcctgggtgacagagtgagactctgtctcaaaaaaaaaaaaaaaaaaaaaaaaattggtcaaatgtggtggcacacacctgtaatccaagctactcgggaagctgaggcagaattgcttcaaactgggaggcagaggttgcagtgagccaagattgcaccatagcactccagcctgg

SEQ ID NO: 5453 - DNA, 531 bp, Homo sapiens
  SIMILAR (10)..(213): 601254mologous to Bos taurus pyruvate dehydrogenase phosphatase regulatory subunit precursor; PDPr,accession number AF026954,Smith-Waterman Score=211.
tcacttttcagtttcttcatgatctctccaaccgaccagcaggtccactgttgggcctggcttaagaaacacatgccgaaagacagcaacctgctcctggaggacgtcacctggaagtacacaggtacgggggttcgggctctctatggggatgtagagcatgaatcctggctctcctgtgtgcgtcatgctcatcacccggatcccctttgcatagcccacgctcatctccatctcaggagttttagccaagctgatggtagagagtggaggaaagtccttgacaagcacaaaatattcctctttgccaggtccttgtgttagtcgagggtagcaggcacaatgaggacaaggcaaggtcttctctatggggatgtagagcatgaatcctggctctcctgtgtgcgtcatgctcatcacccggatcccctttgcatagcccacgctcatctccgttgttgtatggttctctaactccatcatttccatttcagactcagcatatgctgagttccacctgttgaagggcat

SEQ ID NO: 5454 - DNA, 810 bp, Homo sapiens
  SIMILAR (34)..(126): 641254mologous to Macaca fascicularis unnamed protein product,accession number AB046088,Smith-Waterman Score=92.
tttttttttttgagacagagtctcgctctgtcacccgggaggcggaggttgcagtgagttgagatcatgccactgcaatctagcctgggtgacagagcaaaactttgtctcaaaacaaaaagaaaagaaaagataattactttatacttagcttgtcttacccatgagtgacgggctgcatgtggcccaggacagttttgaatgcagttcaacacaaatttgtaaactttcttaaaacattaggagattttggccaggtacagtggctcatgcgtgtaatcccaaagcgttgggattgcaggcgtgaaccaccatgcccagccaagatctacactattatgtcaccccagaaagtgaactctcagtcttcccagccagtctctttcttatcataggttagcttgcttattctggaatttcgcgtatacagatgcatgccatgccataggtactcttttgtgtctgctttgttctgctcaacaccatgtttctgaaatcattaccattgttgtatggttctctaacttcatcatttccatttcagactcagcatatgctgagttccacctgttgaagggctatctctgtttaattcaccatcttgaaagaaacatttaaaattgagatgttttcaagaatatatagttaaatcctgaggaatcgacgtagaaatgttatcacaagctgtctgaacttactcaggggaagtcttcgtcttcactcacataagagtctactggaattaatatcaacaatcttagagaaaatcccacactattcatgccattttcatgatctccaccttggtaa

SEQ ID NO: 5455 - DNA, 1376 bp, Homo sapiens
  SIMILAR (359)..(649): 491254mologous to Homo sapiens PRO2550,accession number AF130089,Smith-Waterman Score=191.
  misc_feature (1)...(1376): n = a,t,c or g
gcatgttacctgactggagactagagactatttccattataagccttcagaaacccaaccacgtctttactgtgtctagctttttaaatactgattggttagttttatttttgcccacagtttcttgggcaaaaaggttcttcattttgtctgaaaaagaaattatttgccagaggtatttggagcctctttgaaggggagatagagtgggggtgggttgtggggagggtggagttattggggttttggggttctgtttccatacaacattgtttatttccgattcctcagaagatcctttattatgaataacctcagtgtaatgttaatttcctgtccccatgtcaaaattgtcaccctaagcctttttttttttttttttttttttggagacgggctcactctgtcagccacgctggaagtgcagtgaaatgatcttgactcatggcaggcttgacctcctgggctcaaggaccacctcccaagtagctgagaccacaggtttgccccatcacacctggccgatttttattttttttgtagagatggggttgtccaggctggtctcaaactcctgagctcaagcaatgtgcccgccttggcttcccaaagtgctgggattataggcgtaaaccactgcacgcagcctaccctctgcctttttaagatgatgtatttatttaatttttgccatcattgggtgcttcaccttcctgcgaaggaaattccagagcctgtatttaagctacctagggttttttacactccctttaattgcctttccaaatagtatctcatttgggggtactctagtgtcctatacctcttgggaaacgaaagagggggccccaacctacaactaaggaggggacaaaccttggaactaaggtaaggaccttacacacccagaaagaacactggggccctccttcttcaggggacaatgcagtaggccacttggcttgtgggaatttactgaaggctattttcctgttaacttctagttaactttaggttttgtattttcaggcaggaggtgcggttctgtaatgttgggcctttgacttcacagtactggagagctgttcacacagatgtttagacctttctctctctctctctctctgtgggntgtgtctctctctcttttcttctttctcaacaactctttcacagagggcagtcattttgaaaggttgaaatatttgggcctttaccaaagagctttttttttccttaaggcaaaatcctttcaggaaaggaaacaaagggggaaggggcagattaaggaatgcatatgtccccaatccacttctatagggagtttaaatccatattcacatggaggtaaaatgatggggaggacctctttaagg

SEQ ID NO: 5456 - DNA, 465 bp, Homo sapiens
aacacattcaactttgcagatgacttatacacacacacacacacacacacacacacacacacacacagttttatttattttttaaatgataacattcagcatgttgacaaggataaagagaactatgacccttaaacatgtcaggtagaacgtcaggtagaatggcaaatgcaccaactttctgaaggtaacatgccaataagcatcaagaatcaagaaccttaataattttcagttcccttaaatttacttttaacttatttaaaaataattataatttttggaaattatttcaaggaattaagagagggatatgctttatgtgtatttctttcaaagtaattttttaaataaccagtaattatctggctttttcagagcactaagtgaatccccagcatatatgatgaacgcaattagcaaagctctgagttccccacagatgttggcccgtggtctgtgtat

SEQ ID NO: 5457 - DNA, 2142 bp, Homo sapiens
  SIMILAR (1739)..(1864): 641254mologous to Homo sapiens Human secreted protein, SEQ ID NO: 6812,accession number AAG02731,Smith-Waterman Score=120.
ggtcgacttttttttttttttttttaaattaagagacagggtgtctcaatgttgcccaagctggaagttcagtggctagtggctattcacaagaaccgatcatcgcacactacctcaaactcctgggatcaagcaatcctcctgcctcagctttccaagtcgctgggactataagtgtgtaccacagcatgtcagctctctctctccttcttgacctaaagcctagcataaaattagctaagtagaattggttccaaagatgcctgcatcagtatctcccatcccacataatttctgtttgattttgccattcacccataaaatgggtggggatctacctcccctccttggcaaatttgaggctgggccctttggatcctgtctaaggatctgaagccagatattaaggtacttcattaatttccatggtttggtcctctatgcaacctagcaatcaagccagaagtcaaaaacatactgacatagtttggatgtgtccccacccaaatctcaccttgcattgtaataattcccacatgtcaagggtggggccaggtgcagataactgaatcatggggacggttccccccatactcgttctcatggtactgaataagtctcatgagatctgatggttttataaatgggagctcccctgcacatgctctctcctgccttgccactatgtgagacatgcttttccatctccttgccttccaccatgattgtgaggcctccccagccatgcagaactgtgagtcaattcaaaccctctttcctttataaattacccagtctcaggtatgtctttatttgcagtgtgagaacagactaatacaataagttgatacccagtagagtggggtgctgctgtaaagataccccgaaaatgtggaagcaactttggaaatgggtaacagggagaggctggaacagtttggaaggccccagaagaggataggaaaatgtgggaaagtttggaacttccctcgagacttgttgaatggctttgacccaaaatgttaatagtgatatggacaacaaggtcccaggcggaggtggtctcagagggagatgaggaatttgttgggaaatggagtaaagtcactcttactatgcaaagacactgcaggcactgtgcacctgtattagaaacgggcataagataggcgggaaagagtcaaaataagaatttttttctagagttccctagagatctgtggaactttgaacttgagagagatgattttaaggtatcttgacagaagaaatttcttaagcagcaaagcattcgagaagaagcagagcataaaagttcagaaaatttgtagcctgatgatgcaacaggaaaagaaaaatctattttctcaggagactgggttgtagaaatttgcataagtaatgaggagccaaatgttaatcaccaagacaatggggcaaatgtctccagggcatgttagagaccctcacagcagaccctcccatcacaggccaggaggcttagaaggaaaaatggttttgtgggtccagaaccccctgctgtgtgcagcctaggaacttggggccctgcatcccagctgctcctgccataggtaaaaggggccaaggtacacctcaggccatggcttcagagggtgcaagttccaagcctttcaggttctaggtggtgttaagcctgcagatgcaccgaagtcaagaattaacgttcatgaacctccgcctagatttcagaagatgtatgaaaatgcctggaaatccaggcaaaagtttgctgtgcacgggagcgggggggcctcatggataacctctgctagggcagtgtcaaagggaaatatggggttggagcccccacacagagtccccactggggtactgccaagcagagctgtcacaaaggggccaccatcctccagaccccagaatggtagatccactgacagcttgcactgtgtgcctggaaaagctgcagacactcaatgcagccagaagggggggccgtaccctgcaaagccacaggggcggggctgcccaagacccctgggaacccacttcttgcatcacctagatgtgacacatggagtcaaaggaggtcattttggagctttaaagatttgcctgctgggttttggacttgcatggggc

SEQ ID NO: 5458 - DNA, 382 bp, Homo sapiens
  SIMILAR (3)..(188): 511254mologous to Homo sapiens p40,accession number U93569,Smith-Waterman Score=161.
  misc_feature (1)...(382): n = a,t,c or g
gcctccttaagcagaataaacattagtcaagaattttgtatccaacaaaactaagtttcatgaatgaaagagaaataaagtctttttcagacaagcacatgctgagggaatttgtcactaccagaccagacctacaagaaatgcaaaaaggagttctaaatcttaaaacaaaaggttggcatgcaccagaatagaacctcttgaaagcataaaactcacagggcctataaaacaataatgtaatgaaggaagaaaagtatctaggtaacaatcaacatgatgactgtaacagtacctcacatctcaatattaacattcaatgtaaatggtctaaatactccactcnnnnnnnnnnnnnnntcacaggctgcgcgcaggggtg

SEQ ID NO: 5459 - DNA, 1862 bp, Homo sapiens
  SIMILAR (1382)..(1663): 561254mologous to Plasmodium vivax pva1,accession number X92485,Smith-Waterman Score=241.
attaaataaaatcattttatcatatggctttcaaaagacaatgagtgaaaacttaaggcaatacaataagtcatatttatgagtacgttcaagaattcacaaaaaagggtacaattctggcttctctttaatcattaaatttcagtttttacaaataattcaggttcaggttttgagggggaaacagttcttgtattattacatgctcatttttcttctgtaaatgactctattggctagatttacaaacattgtcacagaaacaaattttttaagccatagatcactgcatttatatttacaaaaaagccataaacatgcatttctcctttattaggacttaaatagatgcttgaatattaaggcagtgatgattctaaaacataatgaaattctaagttaaggctttatgtttcttttgaaacccacactcataggcaactgtgaccaaaccaaactcttacctactaggttgagctcatctgcccgggatatgttatttatccattaccaacacttcttttgtgtcaaatgtatggggataggaattagtagcaaaaccatcaatttactttaatgaatcattggtccccttactaggttttgaggatttagctttcagtaatacaggcatgtgccacagaaaggagcatgtcgtgtgtgtgtgtgtgtgtgtgtgtgtgtgtgtgtgtcaatgtggagaacttacaggctgcactgattccctaacttgactggaacttagcccaacaattaagaatcccaggatctcctaaataacagaaaatcccccaaagccatacttgatcatgctcctacctcaaaacacacaaagcattccttgattattgaagcaataggtcttcacccttgttttctttgaagactggtattattcacttaagaaaaaataccaaaatgcggattaccatattttagatggaatctatcctataattgcttagcttcaaggcacaagtaatatccttgctagatacttttttcttattcaaagaaaagataaagaatggtgaatggaaggaaattcactttaaaataattgtagattgcactcctgccctatcaagcttagtagaagtgcaaagtattgaaacctaatcgggggatgcccttttcccactttttttcttgtttaattttagagtgacaaaactcagatccagcttgtggatgcacttggggaaacagctcccagagccccccaactctcgccctactgtggagacccagaaaggatcttcataggacacaccccaagatgaagtccataggcatgtttccataactccctgttcccaaggtttggataacctacgctcatttagcaggaacatttaactacgtgcttgttgctggcgactttttttttttttttttttgagatagggtcttgccctgttacccaggttgggagtacagtgccaagaccatggctcatggcagccccaatctcctcgagtgatcctctcacctcagccttccaagtagctgggatcacaggcgcatgccactgtgcctggctaattaaaaaaaaaaaaaaaaattccagagacacggtcttcttatgttgcccaagctggtgttgaactcctgggctcaagtgatcgtcctgctttggcctcccaaagtgctgggattacaggggtaagccaccacacctggcccgctgctgcttccctagccgataattttacatcaataaacctcttgtgtgtaaagtgctatacacttgtatgctggtatcaatagtagttcatgtagcgaaagaggttggcaatgattacatgaaaactggcttcaaagctaaaagacagttgtagtttttccctggtgtcctttaa

SEQ ID NO: 5460 - DNA, 365 bp, Homo sapiens
  SIMILAR (122)..(6): 791254mologous to Homo sapiens PRO2987,accession number AF116719,Smith-Waterman Score=167.
  misc_feature (1)...(365): n = a,t,c or g
ggcacgaggtctgaggttatctataagctcctactccagacgccatgggtcatttgacatatgaggactaggctactattacaagcctgtggtgcaaggtgaatgtggatgattctggatgatannnnnnnnnnnnnnnnnnnnnnnnnnnnnnnnnnnnnnnnnnnnnnnnnnnnnnnnnnnnnnnnnnnnnnnnnnnnnnnnnnnnnnnnnnnnnnnnnnnnnnnnnnnnnnnnnnnnnnnnnnnnnnnnnnnnnnnnnnnnnnnnnnnnnnnatcctgtgtgatctgtggttttcttcttcatctgaacgatatgcctgcgtcaaagtgccgtggagtcttaaagctttaattcctttatcg

SEQ ID NO: 5461 - DNA, 424 bp, Homo sapiens
  misc_feature (1)...(424): n = a,t,c or g
cggacgcgtgggatttaaatgtattgctaatttttcaaggaaaagtggaactaactatagaggaattaaaggaattttacccgttaactgttggatttttaaaatccgaggactttcaggtggtgnnnnnnnnnnnnnnnnnngaaagggagtttggttttgccccccacccgggggggctttgacccaatttgggttaattgaaccctccccctcccaggttaaagcatttttcttgcttgggcctcccaagcagttggaataaaaaggccattgcttgccacggggccaagtaaattttggaattttaacaaaactgnnnnnnnnnnnnnnnnnnnnnnnnnnnnnnnnnnnnnnnnnnnnnnnnnnnnnnnnnnnnnnnnnnnnnnnnnnnnnnnnnnnnnnnnnnnnnnnnnnnttgccc

SEQ ID NO: 5462 - DNA, 491 bp, Homo sapiens
  misc_feature (1)...(491): n = a,t,c or g
aggagggattccccaggaccctgctgaccactgagaccntcggacgaccccgcgtncgaaagcagtggacaagaaggctgctggagctggcaaggtcaccaagtctgcccagatagctcagaaggctaaatgaatattatccctaagacctgccaccccactcttaatcagtggtggaagaacggtctcagaactgtttgcttcacttggccatttaagtttagtagtaaaagactggttaatgataacaatgcatcgtaaaaccttcagaaggaaaggagaatgttttgtggaccactttggttttcttttttgcgtgtggcagctttaagttattagtttttaaaatcagtactttttaatggaaacaacttgaccaaaaatttgtcacagaattttgagacccattaaaaaagttaaatgagnnnnnnnnnnnnnnnngggcgcccgttttaaagaatccttgggggggccaaactttacccgggctg

SEQ ID NO: 5463 - DNA, 905 bp, Homo sapiens
  SIMILAR (1)..(333): 1001254mologous to Oryctolagus cuniculus elongation factor 1 alpha,accession number U09823,Smith-Waterman Score=568.
caaataagcgccggctatgcccctgtattggattgccacacggctcacattgcatgcaagtttgctgagctgaaggaaaagattgatcgccgttctggtaaaaagctggaagatggccctaaattcttgaagtctggtgatgctgccattgttgatatggttcctggcaagcccatgtgtgttgagagcttctcagactatccacctttgggtcgctttgctgttcgtgatatgagacagacagttgcggtgggtgtcatcaaagcagtggacaagaaggctgctggagctggcaaggtcaccaagtctgcccagaaagctcagaaggctaaatgaatattatccctaatacctgccaccccactcttaatcagtggtggaagaacggtctcagaactgtttgtttcaattggccatttaagtttagtagtaaaagactggttaatgataacaatgcatcgtaaaaccttcagaaggaaaggagaatgttttgtggaccaactttggttttcttttttgcgtgtggcagtttttaagttattagtttttaaaatcagtactttttaatggaaacaactttgaccaaaaatttggcacaaaatttttggagacccctttaaaaaagttaaatgagaaaaaggatttgggggggggcccacaaaacattctcctttccttttgaaggttttacaatgcattgttatcattaaccagttttttactactaaacttaaagggccaattgaaacaaacagttttgaaaccgtttttccaccactgattaaaaggggggtggcaggtattagggataatattcatttacccttctgagctttttgggcaaacttggggaccttgccagttccagcagcctttttgtccactgctttgatgacacccaccga

SEQ ID NO: 5464 - DNA, 949 bp, Homo sapiens
  SIMILAR (1)..(261): 551254mologous to Homo sapiens Human secreted protein, SEQ ID NO: 7874,accession number AAG03793,Smith-Waterman Score=226.
  misc_feature (1)...(949): n = a,t,c or g
tttgagacaagggctggctctattgcccaggctggagtgcagtggtgccatctcggcttactgcaacctccacctcctgggctcaagcgatcctcctgccctcaaccctgagtaacctgggactacaggcgcacaccaccnagccctggctaatttttgtattttttgtagaaaacgggatgtcatcatgttgccccaggctgtctcaaacttgtgagctcaagtgatttgcccttcttggcctcccaaagtgctgggattacagacaggcatcagccaccgtgcctgggcccaaaattatggactttaaggaaactgttgggagatatttttctgtggtttcatgataatctgggctatactctgggtaggaatacccacgaattttccacatcaagggcagtaataataacagtttttagaagttttaaacattcaacaccggatttctcaggttaatgtctaggtaaaggaccccgcagggtgcctcccattcccttaataacactgtgggcatcccctttttcctcccttactcataatgaatatgagaattaaaccactattgtgtttttcttctaaaatgaagggtagggttgtgccagaagaagagatacaggaggttagtaggctctggaattcaatttccaggtgtggttttcacaaatgaacagtctcttaagttagtatctctctgaatataaaaagaataaataccatacactgatgataatgggataaaattattacctagtttaatcaagctgctttcctgaagaaaatttcagcatgagtttatctttaaaggtatactcacccatcatttataatttctgttttggatgatagttctgaccaccaccttttaatgactgcttgaagccagtttaaaccaactataacatatctgaaatcccattttgttacaaaattcaagtgttttcatcca

SEQ ID NO: 5465 - DNA, 736 bp, Homo sapiens
  misc_feature (1)...(736): n = a,t,c or g
tttttttttttaaagaaacttggattgttttaattggtttaaatgcagggtatatgtaaacactgcaaatactgatatacttttagttcatttttgtacttttttacattttttccattagataattctaagcctaaaatatttttctttttctttttctttttcttttttttttttaaagaaacttggattgttttaattggtttaaatgcagggtatatgtaaacaactccccagaaatgagaggcacttctcggaaatacaataacccatgtcactagactagcaaaacactcagtgcttttgacttgatgaattgaatgagttcatgattcaactttctaatgttgtctacttgaaaaatagcaagattcttatctgcagcatttaatgcacnttagaggttgtattggataggcatatcagatatcataaaattaaaattgtgcttatgttaattctgtaatagacctaactttaaaacacctcatgttattcactaggagctatgatctagtcgtgacaatattggttaaaatagtcaatctgaggcagaaagtaaacaagcaaagtcacttttgcaggctttttaaactgtataacacatgaaattatgactattccccagattatgcaaccagcttcaatttaaaaagctgggaacaaatattatgaggcgttacttctcaatttctttctttttcttttttttttgaaacggagtttcccctcgtgc

SEQ ID NO: 5466 - DNA, 737 bp, Homo sapiens
  SIMILAR (374)..(499): 731254mologous to Homo sapiens Human secreted protein, SEQ ID NO: 7519,accession number AAG03438,Smith-Waterman Score=155.
ttttttttttttgttaacttaatatatacttattttaatattttttatatttttatcaacataaaataggtaaatatagttcacatacaataataaatgctaaaacatttacaaattaaaataaacataaaaccaataaaatggaaattaaccatcattaacataacaaataatgctgttttgctcaaacaaagtagatcacaagtatttggtttaatagcaaaaagctgtagtttcagatcccattctgtaaactgagtagttttactttaataataatgttgagaatgcttgttcacataagtatcttattcaaactggtattgatcaattcaagcctttctttcctctttcaaggtaattagaacataatatttttctttcttttgagactgactctcgctctgttgctcaggctggactgcagtggtgcaatctcagctcattgcaacttttgcctcctgggttcaagagattctcttgcataagcctcgtgagcaggtaaaaagcattctgcggtccgccacagcttcttaactttacgccaatagtacaatactgagcgaggaatgccagtaagactgttgcttagcaacttcagtttacttctttctttggcactcctgctgagaactccattgggtttcaaatcttcttctatttcaccttttctcttttgcaaatcattttgcttctttttgtaagttggcttaggttgtcttttacccacgcgtccg

SEQ ID NO: 5467 - DNA, 539 bp, Homo sapiens
  SIMILAR (13)..(291): 731254mologous to Homo sapiens Human secreted protein, SEQ ID NO: 7870,accession number AAG03789,Smith-Waterman Score=323.
ttttttttttggagacagagccttcttgttctgtcgcccaggttggagtgcaatggcctgatcttggctcactgcaacctcaccttcccaggttcaagtgattctcctgcctcagcctcctgagtagctgggactacaggcatgcgccaccacactcagccaatctttatatttttagtagagacggggtttcaccacattggccaggccggtctcaaactcctgacctcaggcgacccaccctcctcagcctcccaaagcggctggattacagtgtgagccaccgtgcccagccctggccatactttcgtaacaaggaagaagcaaggccgaatcctttcttttcataaagatgaatgcatgataaaccaataactttcatctgttaactgagctgcatataattagagacctatctcaagacatactagaaattaagaaactacaaaatgttattcccctctctgcctctcctatttgtcaaaagcaacaccatgctcatttatgtaggcttggcaccacctgaccggacgcgtggg

SEQ ID NO: 5468 - DNA, 411 bp, Homo sapiens
  SIMILAR (99)..(203): 1001254mologous to Oryctolagus cuniculus translationally controlled tumor protein,accession number AJ225898,Smith-Waterman Score=181.
cagtgttttctttttttaagcttggatattttttactttaaaaattgattttactgaaaattcaatacttcaacctgttaatgaaatgttgttttagaatcaaagggaaacttgaagaacagagaccagaaagagtaaaaccttttatgacaggggctgcagaacaaatcaagcacatccttgctaatttcaaaaactaccaggtaaataccttaagtatctggatcaaaggattgtacaattttaactgcaagagcaaaaattaagttgattaatcttcaattctatactagtattccaggtgtagaaagtggctttcccagctcgcaggtgtttccaaatcttgtcttctgattgaaaatttgcttcccagatgacatttctcagtttttctttttgtgaattgcttaa

SEQ ID NO: 5469 - DNA, 1048 bp, Homo sapiens
  SIMILAR (302)..(676): 441254mologous to Homo sapiens tumor protein (AA 1 - 172),accession number X16064,Smith-Waterman Score=168.
  misc_feature (1)...(1048): n = a,t,c or g
gagaggtttctcgcgctctatgaattcggcacgagcccccctcccccgagcgccgctccggctgcaccgcgctcgctccgagtttcagggctcgtgctaagctagcgccgtcgtcgtctcccttcagtcgccatcatgattatctaccgggacctcatcagccacgatgagatgttctccgacatctacaagatccgggagatcgcggacggggttgtgctgggaggtggacggggaagatggtcagtaggacagaaggtaacattgatgactcgctcattggtggaaatgcctccgcgtgaaggccccgatgggcgaaggtaccgaacagcacagttaatcactggttgtcgatcattgtcatagaacctatcacctagcagtgaaagcaagtttcacacaaagaagcctacaagcaagtacatcaaacgattacatgacaatcaatcaacagggaaacttgaagcaacagagaccagaaagaagtaaaaccttttattgacagggggctgttgaacaaatcaagcacatccttgcctaatttcaaaaaactacccagtcctttatgggtgaaaaacatgaatccagatggcatggttgctctattggactaccgtgaagatgggtggtgaccccatatatgattttctttaaggatggtttaagaaatgggaaaaatgttaacaaatgtgggcaattattttgggatctatcacctgtcatcattaactgggcttctgcttggtcatccacacaacaccagggacttaagaccaaatggggactgatggtcatctttgagctccttcattttattttggactggggatttattttggaagtggaggccattgttttttaagaaaaacatggtcctgtaaggttgtctaaaaataaaatgcattaacccatttggagatgctttagttaatgctatttaactaattgtnccgagtgtcctgagagctgagcctgttgnggcacacnctcattactcacgtgggctctccggntggattaaaagtcaggtcgttgatccaaaggaacc

SEQ ID NO: 5470 - DNA, 794 bp, Homo sapiens
  SIMILAR (16)..(285): 611254mologous to Homo sapiens Human myelin oligodendrocyte glycoprotein gene,accession number AAZ29204,Smith-Waterman Score= 257.
gagacataatctcgctctttctttctttcattctttctttttgttgagatggagtgtcactctgttgccaagtctggaatgcagtggcgcaatattggctcactgcaacctccacctccgggcttcaaccaattctccttcctcagcctcccgaatagctgggattataggtgcctgccacttcacctggctaatttttgtattattagtagagacaaggtttctccatgttggtcagcctggttctctaggagcacttgaccaacgcctgacctcaagtgatccacccgctcggcctctcaaagggctgggattacgggcctgagccactgcatctgcccagattattatttcttaggcatgttcactacgtaattgattcctagatgttgaaaatagatataatgtgattaggctagtgcgtaagggtagcactgaaaagatagaaatagaccttcaagtagagcatgcatgatcttgaataaaataatagttagtaagtatatagcggaatggcagggagacagagtttgcactctgtagcacatttaggagaaattttaaccaaaagtaatttgggcaaagaatatttgatcaactgtgaaattacctaccttttcaaagttctatcttgatacaaaggaagcaaaatttactcaaataatatcttgaaattaagatatacagacaatggcattatggtggcctgtgaatctaataacttcatgaaaatacaaagaaaatgaagagagctttacatgtcttattctgtaaaaaacctatgtattttttta

SEQ ID NO: 5471 - DNA, 1679 bp, Homo sapiens
  SIMILAR (77)..(196): 951254mologous to Homo sapiens pregnancy-specific beta 1- glycoprotein 4 precursor,accession number U18469,Smith-Waterman Score=211.
gctgacagccgtactcaggaagcttctggatcctaggcttatctccacagaggagaacacacaagcagcagagaccatggggcccctctcagcccctccctgcacacacctcatcacttggaagggggtcctgctcacagcatcacttttaaacttctggaatccgcccacaactgcccaagtcacgattaaaagcccagccacccaaagtttctgaggggaaggatgttcttctacttatccacaatttgccccagaatcttgctggctacatttggtacaaagggcaaatgacatacgtctaccattacattacatcatatgtagtagacggtcaaagaattatatatgggcctgcatacagtggaagagaaagagtatattccaatgcatccctgctgatccagaatgtcacgcaggaggatgcaggatcctacaccttacacatcataaagcgacgcgatgggactggaggagtaactggacatttcaccttcaccttacacctggagactcccaagccctccatctccagcagcaacttaaatcccagggaggccatggaggctgtgatcttaacctgtgatcctgcgactccagccgcaagctaccagtggtggatgaatggtcagagcctccctatgactcacaggttgcagctgtccaaaaccaacaggaccctctttatatttggtgtcacaaagtatattgcaggaccctatgaatgtgaaatacggaacccagtgagtgccagccgcagtgacccagtcaccctgaatctcctccatggtccagacctccccagcatttacccttcattcacctattaccgttcaggagaaaacctctacttgtcctgcttcgccgagtctaacccacgggcacaatattcttggacaattaatgggaagtttcagctatcaggacaaaagctctctatcccccaaataactacaaagcatagtgggctctatgcttgctctgttcgtaactcagccactggcaaggaaagctccaaatccatcacagtcaaagtctctgactggatattaccctgaattctactagttcctccaattccattttctcccatggaatcacgaagagcaagacccactctgttccagaagccctataagctggaggtggacaactcgatgtaaatttcatgggaaaacccttgtacctgacatgtgagccactcagaactcaccaaaatgttcgacaccataacaacagctactcaaactgtaaaccaggataagaagttgatgacttcacactgtggacagtttttccaaagatgtcagaacaagactccccatcatgataaggctcccacccctcttaactgtccttgctcatgcctgcctctttcacttggcaggataatgcagtcattagaatttcacatgtagtagcttctgagggtaacaacagagtgtcagatatgtcatctcaacctcaaacttttacgtaacatctcaggggaaatgtggctctctccatcttgcatacagggctcccaatagaaatgaacacagagatattgcctgtgtgtttgcagagaagatggtttctataaagagtaggaaagctgaaattatagtagagtctcctttaaatgcacattgtgtggatggctctcaccatttcctaagagatacagtgtaaaacgt

SEQ ID NO: 5472 - DNA, 379 bp, Homo sapiens
ggcacgagcttatgtgtgtctccacactggaacccccaagacaagagactggaggcagagttgatttccaagcccagagtgctgggcagcctttgggttttatgtctgcttgcttggagctcagtgatttaattctaggccttctttgaggattggactgttctgcataacctgctctctctgggattgcttctggtgctgctggatccatgcatccttatatagtgtgattaggtctctactttcctttggtaccttggtttgtttttccctgttttgtgttgccttcttatctttctcgttctgagtagttttgttcttttttctgctctttatctcttctggttttttttcttttgttttcttggtctttctcttt

SEQ ID NO: 5473 - DNA, 454 bp, Homo sapiens
  SIMILAR (19)..(120): 731254mologous to Homo sapiens Human secreted protein, SEQ ID NO: 7795,accession number AAG03714,Smith-Waterman Score=156.
tttttattaagatacatggtcttcctatgttgcccaggctggtctagaactcctggcctcaagcaatcctcctgccttggcctcccaaagtgctgggactgcaggcgtgagccactgtgccactaataaaatggcatgaaaatatacacacgcaaaacctgacagaactatagggagcaactgacaagtcctctactatggaattcaacacagcttcgtcaattattgatagctataaaagataaagtagttaagatacttgattttaattttacatctaacaattagggaatgcatagtcttccacagcacaaatggaaaaactgactaatactaggccataaagcaaatcttaactattttcttccagaccaccatctatgactgcaattcattaaagtcagtaacaacaaaaaaattataaatctctaatatttagaaattaaaaacatac

SEQ ID NO: 5474 - DNA, 5964 bp, Homo sapiens
  SIMILAR (5321)..(2778): 1001254mologous to Homo sapiens AH-receptor,accession number L19872,Smith-Waterman Score=4508.
tttttttttttttttttattattcatatttgttattttattatatattattgtatacaactttgataatgaggatattataaatcatactttaagcaaaaatctatgcatgatatatgtaagcagtaacattttgaagaaaaaagccatgaaagcatttacctaaaatttagtaacatccgaaaaacactagtttgtgcatagtaatgttgaaagcttcataatacactaggaatactgggtaaggtcttcagggtattgtaaggaaaaacctgggtacagggaaaaggcttaaaattaggacacatccatatccttaggatggtggcaccatcatctagaaataaatcccacaatggtaggcagtgcactaagtatcctttggtttgggcacttaacaatacagacaaaccgtgtattttagagtttaacgtgattttaataatccccttaggatacatattagttattttatatagataaaaattatccaatattgccttttccaaacttttaatttttataactgtataactgattgtcatcatattcatgattaaaaagcctattttcccactaaacaadtttatccagtaacatgtgggaagagagtaacaaaaaatggtttaatgtaaagacttataataaaagggtttaaatgtaaaaatagaggtattaatctaggacctctgggcttaaatccttaggatacctcatgctgggaaacaaattatggaaatgttttcaggacaaattttttccaacacttaaaattggattctacagggttttaaaggttttggactggaaaatacacagaactcagagatattttgtccgaagccattttttaattccttaaccttccctaaaaaagggaaaggaaataaaaattgtattttttttttttttttggagacggagtctcggtctattggccaggctgggagtgcagtggggggcgatgcttgggctctgcaacctccggttccccaggttcaggctattctcctgcctcagcctcccgagtagctaggactacaggctcacgccaccatgcccgcaatcccagcaactcgggaggctgaggcaagagaatcacttgaacccaggaggtagaggttgcagtgagccaagattgtgccactgcactccagtttgggcggcagagtaagactctctctcaaaaaaaaaaaaaaaaaaagaataaaagatggtgtcattttttctttttgaaagtccatgttaggacagtaaagttggtagggtgattaatttgcctattggtaatgaagatcagtatatcattaaaaaaacctaaagtttgaaggtaaacgaactatgtggttgtctttttattaataccaactttaagcagttggattcattacttgatttcttagaaagacacattgataaagtatgtaaagccccaacaaattaagtgcatatataaggtatggactttttaaaatgaaaaactgcaaatatcttacaaataattttgttcattatatctatacaatgcaccattcaattcactcattacaatactttgcaccaaaccttgctatctgcaatcttaacactcctcaaatatgagaaaaacacatagtttccactgttctaagaagcgaaatttataaagtcaacacaatatattatcaaggattataggtctaaaacagtttttaaagacaatttatacacattgaaatgggtgctttgcttaattaaaaagctagaaataaagcttcttgcaatttaataaacaaggttgcagttaacagcagatttttcacattgcaacattcaactatcatcatggagatatcaataaaggtaaagagtggtatatttatttcttctgaaaacactgttgaggaatttaagtgctattgtcttaatatttttataataattaagaaataatttggaaagacattttacttttaaattttttcaacataaggcacatagcaacatttatagtctagaaacaactaaattatgtaataaataattattttttcgatcattatttgcccttttacctgaagaaagtaggtaagcagtggagttaaaatatgcctgaattaatgaaaattggttggatttaggaaacacaaataatatttgtgtgcagaaagatattaatttaaaaaagaaaaagaatactttatataaaatatacatcctagagtgttataggtagaaaaaaatgtgaggcacttagatgaaacagtgaaggaggaaagcactgagattatctttttataaaaagcaccaaaccatttattttaacatctgagataaaagcagaggttaacatgataggaaaaactagtttagttctctaactttgtatttggggaactaataagaatccagtagctcaaaactcaaagtattttatttttactgtgacagaaataattcaaatagagaatattttctaatttaaaagaatcttagtttccctgataaagttttgtatattttgtggtgcccagaataatgtgaaatgtagacggtacctcaccactccgtggcagcaccctttctatcttgactgtagtatatgtaattttgataccatttttaaactcccttttctaaaagcaaaaattaaaatttggtttggaataattgtgaatagcatgcatcaatgcctccatgtgaacttgctgacgtccaacagtgacagttttatttttccataatccttcacaaactaatttaatccaaaaaccagggtcaaaattgggcttggaattacaggaatccactggatgtcaaatcaggaaaaggtctggcttctgacggatgatgaagtggctgaagatgtgtggtagtctgagtgttatttatgttatttaattcagctggatatgtttcatttaaaactccattctgaaacttgtttaaaaatgcctgttggcctggcagtactggattgtactgcatctgacccacgtgggtgtgctgaggttctggctggcactgatacatcgacacggccccagcataacatgtctgaggagttattatggctgactgtggatttaatccatgcttttggttttcaggaagttgtaaacaagtgacaaaatcttctaaactagaagtagtggggtatggggatggttcaaaactccccatagggtagtccagctctgtacatttggaatgttgtggtaatacaggctgattacaggaaataaagttctgtgtataaggcatagaatccatttcagatttgtaggggaactcttgactgatcccatgtaagtctgtaaagacattatattgttgtgggtcttgctgtggacaattgaaaggcacgaattggttagagttccaattttcaaacatgccattaacttgcatgtgcttcatcttctgacacagctgttgctgtggctccactactacttgcttttggtgatgttgctgttgctgttctagatgtaggtgttcctgtaccatacagcttgagttcagagccaaggactgttgctgttgataatctgaaggtatgaagggagacttacttaaagaatcttggacatacgtcaggatttcatccgttaagtcaatgtctctgaagtcaacctcaccagaaaaatcatttctgaaaaatttttcattctgcatgtgtctgatgtcttcaaaatcaatgcctaggtttttcattatgctgtacaagtcactgtttttactatcttgaaagagccctgggtgacctccagcaaatgagttcacatcctgaggctggtcaatttgctcatgtttcaggatagtatcatttcccatcggtgcagtattatcttgccaatttctgcattcattcatagattcgttgaaaaagttgttttcaaaaggtgcagtacttgaagtacttgaagcaggatagagataaatagactcatcttgttgcatcatggcagccaggagggaactaggattgagagagtccttgcttagagtggatgtggtagcagagtcttttccactagtgccatttttagtccttagtggtaagggatccattatggcaggaaaagggttggttgcctcatacaacacagcttctccagtggtaaacataaaaggcaacttcgtatttcgttttcgtaaatgctctgttccttcctcatctgttagtggtctctgagttacaatgatataatctggtcttccatttttataaagcaggcgtgcattagactggacccaagtccatcggttgttttttgtaagaagccggaaaactatcatgccactttctccagtcttaatcattcggatatgggactcggcacaataaagcatatcagctgcatgaataaactgataacctgagcctctcgtgcacagctctgcttcagtatatcctaaaacaattcttcctttggcatcacaaccaataggtgtgaagtctagtttgtgtttggttctaaagataaaatttttggtccggatttcaagtatggatggtggctgaagtggagtagctatcgcaaacaaagccaactgaggtggaagtattgatccatctttccctttctttttctgtccatgaagatactttaacttcccttggaaattcattgccagaaaaccagatgaattatccagcagacaccttagacgacatatgaagcacctctccattaaaggagagttttctggaggaatctggtctgggttataacagactactgtctgggggagaccagtggcttcttcaattccttgtccagactctgtacactgagaaggatttaatgcccagtgtagctgacgctgaaattcagctcggtcttcggtatggataagttcatatacactctgatgtatgacatcagactgctgaaaccctagataatcttgtatagtagaagaagcataaaagaccaaagcatctgtagtgacaactaatacaaagccattcagagcctgtaataagaattctccttcttgtaagttcaggccttctctgaaatttgctgctctacagttatcctggcctccgtttctttcagtaggggaggattttaatgcaacatcaaagaagctcttggctctcaggtaactgacgctgagcctaagaactgaaagtttgtccaacttattaataacatcttgtgggaaaggcagcaggctagccaaacggtccaactctgtattaagtcggtctctatgccgcttggaaggatttgacttgattccttcagctgggattggctttactgttttctgcaccggcttccgccgcttgcgactggcgtaggtgatgttggcgctgctgctgttcatggtgcccagccgacggcggcggctactccccgggcactggcggccgggtccccggaacccggtgtaggctgggaccactgcggcggccggcgccgggttccgcgaagccgcgcccgctccacctgcgtcctctcgggacagtggcgtgggcgccgcgcctcaacgcctcggctcacgcaggcttccgcagcccgcgccagtacaggtgagctgcctgggcctggcgcagtgagggtgggcgaggggcggagacccgcgagcaaggcggcgcaggtgccgtctacaccggcggaggcggcgcggcaatgcccgcaggtgaggcggcccgggcggaggaggagcctgggccgtctatttagaatcctggcctgggtcgctcacggtggcgccgcgccccgtgaccgtcgccgcggccccttgggtgagggaggtgccgccgcgctgctcccgggacttcccaaatccagggtgcttcccgcctgcggagctcgggcgcgggccaccagtcccggctgctcccagcttccgttcggctacacggctgcccctgttctgagctggcggtccggggcacgctctcggaacagagcgtcgacgggactccccagccactgcctcccgccgccgcgcgcaccggctgaat

SEQ ID NO: 5475 - DNA, 1031 bp, Homo sapiens
  SIMILAR (3)..(317): 591254mologous to Homo sapiens Human myelin oligodendrocyte glycoprotein gene,accession number AAZ29204,Smith-Waterman Score= 257.
tgggagtttcgctcttgttgcgcaggctggggtgcagtggtgggatctcggctcacagcaacctccacctcccgggcccaagcaattctcctgcctcagcctcctgagtagctgggattacaggcgtgcgctaccatggctggctaattttgtatttttagtagagacagggcttcaccatgttggtcaagctggtctctaactcctgacctcaagtgatccacctgccttggcctcccaaagtgctgggattacaggtgtattgggcctggcctcaacgtattttattgaagttatctaaaagtatcttatgttttatgagaaggcctatgaatgcagttttgttttttgatataacagtaaatagtatttttaaaaaaatgtttctaatagctttttgctggcatttagaaatactattgattacatatatagaacttgtactttactcccctgctgaactcactattctagttgccttttcctagattctatggggctttttacatagatgatcatatactctgcaaataaagacagtattatttcttgccaatctgtaaaccttttatttttcttgcctgaatgtactggctaggcgctctagtacaataatgaatagaagcggtgagaatggacatccttgttttatgcctgctcttagggagttctgtaatccaatactatcttaatcttagtaaagaccacgcagagcacagcactaaattttgggagactaggcaactgattctgttatctttgccaaaacatgttgtttgattccttttttccccagaggtcaaatcctatttaaagtgttttcagagaacttaattggggtaacaatgcagcccaatacctgtcaacagcatgaatactctttgctataatataatgctcattgttaatcttgctttttcaggaaatgagactagtgtctgatctacagtttgccatgttctagctactttacattaatacaacaattacaaaaataactaagggtttattatggcatattcccaatgaca

SEQ ID NO: 5476 - DNA, 690 bp, Homo sapiens
  SIMILAR (1)..(414): 981254mologous to Homo sapiens p23,accession number L24804,Smith-Waterman Score=751.
  misc_feature (1)...(690): n = a,t,c or g
cgaagggactatgtcttcattgaattttgtgttgaagacggtaaggatgttaatgtaaattttgaaaaatccaaacttacattcagttgtctcggaggaagtgataattttaagcatttaaatgaaattgatctttttcactgtattgatccaaatgattccaagcataaaagaacggacagatcaattttatgttgtttacgaaaaggagaatctggccagtcatggccaaggttaacaaaagaaagggcaaagcttaattggcttagtgtcgacttcaataattggaaagactgggaagatgattcagatgaagacatgtctaattttgatcgtttctctgagatgatgaacaacatgggtggtgatgaggatgtagatttaccagaagtagatggagcagatgatgtaagtctaaaaattcttttttctggttactttcatactattaaatagtaagaaacaacatatttacaaatggttttatatagattcacaattacttcttattttctnnnnnnnnnngagaagggaaaagcaatttttaaaatgtgcccatttttgacgaatgggggtatctattagggaactggttgtaccgtagaccattcctaaatggattagatttccaaagaatcattggatagagacattatatattaataccgtactcaattataacagtcagtg

SEQ ID NO: 5477 - DNA, 665 bp, Homo sapiens
aactacaaatgaatcccattcttttccttaaccaccagaggtaaccactactcaagtagaatttttaatgtttgtcaaacctgttgcatgaatagctttgcttttctttagggaaaatttagttttaatttccatatgggtttttaggattttgtataattacctataatcttccttttccagaagggaaagatgcttatatttgcattttgcattttttgatatctgtggcagacttaaggtttattctgaagcatacagcattaataattagggcctaacttaacatcatttttaaaactaatttttacacttcaaatagatgatgaacaacatgggtggtgatgaggatgtagatttaccagaagtagatggagcagatgatgtaagtctaaaaattcttttttctgtttactttcatactattaaatagtaagaaacaacatatttacaaatggttttatatagattcacaattacttcttattttctaaaaaaaaagaaaagggaaaagcaatttttaaaatgtgcccatttttgacgaatgtgggggtatctattatggaactggctgtaccgaagaccattcctatatggattacatttccatagaatcattgtatagagacattatatattaataccgtactcaattataacagtca

SEQ ID NO: 5478 - DNA, 508 bp, Homo sapiens
  SIMILAR (284)..(319): 1001254mologous to Homo sapiens thyroid receptor interactor,accession number L40357,Smith-Waterman Score=60.
ggcacgagaaagtaactaaacaggagcccacaagacggtctgccagattgtcagcgaaacctgctccaccaaaacctgaacccaaaccaagaaaaacatctgctaagaaagaacctggagcaaagattagcagaggtgctaaagggaagaaggaggaaaagcaggaagctggaaaggaaggtactgcaccatctgaaaatggtgaaactaaagctgaagagatccacatctctcgctcaactgttaatgtctcaacctccagaggcaccccacccagcacactgcacagaaaactgaatctgtagataacgagggagaatgaattgtcatgaaaaattggggttgattttatggatctcttgggaccaccttttaaaagctatttttaccaagtattttgtaaatgctaattttttaggactctactagttggcatacgaaaatatataaggatggacattttatcgtctcatagtcatgctttttggaaattacatcatcctcaagt

SEQ ID NO: 5479 - DNA, 965 bp, Homo sapiens
  misc_feature (1)...(965): n = a,t,c or g
acccgtcccgaattcccgggtcgaaccaccccttcccaaaagggctaagggaaaaaagaagaaaagccggaaacttgaaaggaaaggactggaccatctgaaaaaggggaaactaaagcttaaaaaggacttttccattaaaaaccttcccactggaatggaacaatggcttttaaaagaaaatttcttcattccttcaaccggtgatagcacgttcttaatgtctctttttattgcctgtaaatggttaattggccaggatccccacatcctcctcgcctcaacctgttaaatgtcctcaaccctcccagaggcaccccccaccccagcacactgtcagtaagggggcagattgaaacagtgagagttaggggtacagtagaaaantcctgcatgtttgcagtgactagaatcagatagtagggtggtggtttttttttttaatcattatgaagagtgggagcttgcaggtaaaggctcctgtggtgttttgaaaagcagaaagcaataaatgaaacaaagtgtttgtgtaatatattcctgccttgtcttcttcactcagagttgaaaataggttttgcagtaaagctggaaaaaaaaaaagaaaacaaatgttccaaaactgtgtgtgttggtgggtggcaatttcctttgcttatagtagtttcagtagtaactatatgtttttttttcctttctttttcacaggcacagaaactgaaatctgtagataacaaggaagaattgaattgtcatgaaaaattggggttgattttatgtatctcttgggacaacttttaaaagctatttttaccaagtattttgtaaatgctaattttttagagctctactagttggcatacgaaaatatataaggatggacattttatcgtctcatagtcatgctttttggaaatttacatcatcctcaagtaaaataaatatcagttaaatattggaaaaaa

SEQ ID NO: 5480 - DNA, 1531 bp, Homo sapiens
  SIMILAR (38)..(391): 411254mologous to Homo sapiens thyroid receptor interactor,accession number L40357,Smith-Waterman Score=215.
gtgcagctgcagcgcagaggcagcatccagcggcggcgcagcagttccagtccgttgctttactttttgcttcaccgacatagtcattatgccgaagggaaagtctccagagaatacagagggcaaagatggatcccaaagtaactaaacaggagcccacaagacggtctgccagattgtcagcgaaacctgctccaccaaaacctgaacccaaaccaagaaaaacatctgctaaagaaagaacctggagcaaagattagcagaggtgctaaagggaagaaggaggaaaagcaggaagctggaaaggaaggtactgccaccatctggaacatggtgaaactaaagcctgaagaggccacagaaaactgaatctgtagataacgagggagaatgaattgtccatgaaaaattgggggttgattttatgtatctcttgggacaactttttaaaagctatttttacccaagtattttgttaaatgctaatttttttaggacgtctactagttggcatacggaaaatatataagggatggacattttatccgtctcatagtcatgctttttgggaaatttacatcatcctcacagaaaataaaaatttcgttaaatattggaagctgtgtgtaagattggattcagcattccatgcacttgcttttaaaatttagtccctgtgcatactgtgggtgtttttactgtgcatatttgaatttttcatgcagtttttctagagcaataatcagtggtgcttttgtacctaggttttatgtgattttaatgaaacatggatagttgtggccacctgctgactatttgtggtttaaaataaaaggtttacttgtctgcagaaaaattcaaatatgcacagtaaaaacaccacagtatgcacaggactaaattttaaagcaagtgcatggaatgctgaatcaatcttacacacagcttccaatatttaactgatatttattttacttgaggatgatgtaaatttccaaaaagcatgactatgagacgataaaatgtccatccttatatattttcgtatgccaactagtagagtcctaaaaaattagcatttacaaaatacttggtacaaatagcttttaaaagttgtcccaagagatacataaaatcaaccccaatttttcatgacaattcattctccctcgttatctacagattcagttttctgtgccttcctttccagcttcctgcttttcctccttcttccctttagcacctctgctaatctttgctccaggttctttcctttagcagatgtttttcttggtttgggttcagcttttggtgaagcaggtttcgctgacaatctggcagaccgtcttgtgggctcctgtttagttactttggatccatctttgccctgtgtattctttggagactttctcttcggcataatgactacgtcggtgaagcaaaaagtaaagcaacgaactggaactgctggcgccgccgctggatgctgcctctgccgctgcagctgctcacgcgcagggcgagttcctcc

SEQ ID NO: 5481 - DNA, 1282 bp, Homo sapiens
ctgctgggaactcctccattcagggacatggtggatggacactacgtcactccattctgtccttcctttccctcctcccattctcccgagggcctcagtgcatgggcgctgtccaacctctggtgctgaagcagccaagagacgcaagcctgcgtggctgcctcttaggatatgacagcacagccactggcctctactgaatcctatgcaacctcagaagacacccaggagtgatgccatcatgtggtgcaagagttctgagggaccacaatcctgaagacattgaatggctgtgttcctgctcattgctggaggtactgtcagggtccctgtcctcaacccctggtctgacacttgcagatcaggcaggacattctggaggaatcatgcccttggaaggatccctgaggagtgactgttgctaaattaaaaaacagtggcaaagagcaatacagagagttgcctaaattcacccccctggtcccaggtttgaagcaagcagtctgtacctgcagtccttgtctgtaaccatggcaccctggcttctcacacatctcatcgtggaagttccaccatgtgtcaggcatggcactgagcaccttcttttaagaatatacatcgtaattatgtagattattaattctacttcaaaaagccacacaggcttcatgtgataaaatgaaacaattgctcaactgatctcctggggatctctactaagatgttggcagcccggccagctggtctggcctgggacgtgccttcatggtctggttatgcttcatgacctgcactgtgggtcagtgccattttgcagactttgatcacagtgaacacgttccacgggaacttgggccatgagaaacatccttcctaaccacgtgactgcagaaacatccttatcgcgtcctcctgggcaaaggcccaacagcctgactgcagggacatccttgccatatcctgctgggcagcaagctctaccacccagatccctccctcccagtcccatgattaccccagcctgtgagtggcagttggtgctggcactaagctggtttcctcctccccagggttttgctggcaataaagatgtttctgcagtcacgtggttaggaaggatgtttctcatggcccaagttcccatggaacgtttcactgtgatcagagtctgcaaaatggctggaggtttacgaaatggtacaggttagactaacagtaacatctcccaggtaagtggttttacaaagtaaacttcccttgagcatctacactgtaccagaca

SEQ ID NO: 5482 - DNA, 372 bp, Homo sapiens
  SIMILAR (28)..(285): 801254mologous to Homo sapiens unnamed protein product,accession number AK024780,Smith-Waterman Score=370.
gacatgctggactgggtgcccatccacttcatcacccagtcattcaacaggaaggattcctgccagctcccaggggctttggttatagaagtgaagtggactaaatacggatccctgctgaatccacaggccaaaatagtcaatgccaactcaggaaatgaaaggacgattcttatttccactgcggttacttttgtggatgtgtctgcacctgcagaggcaggcttcagagctccaccagccatcaatgccaggctgccctttaacttcttcttcccgtttgtttgacaatgctcagatgcatcagttccttaatatacacgtgaaatttgaaaactgtacattcggtgagattaaattttatatacaact

SEQ ID NO: 5483 - DNA, 371 bp, Homo sapiens
  SIMILAR (88)..(369): 801254mologous to Homo sapiens Neuron-associated protein,accession number AAB01391,Smith-Waterman Score=435.
cgccagggtccccagggtgggagagcggctccgcggccaccgatgcccggaccccctctgtcttctgctagacatgctcttcctctcggctcttgggaaagctggtgctgctgctgcctgattcccgccgacagaccttgggaccggggccaacactggcagctggagatggcggacacgagatccgtgcacgagactatgatgcaggcgagccgcaaggagatccagagtttgccgaaaaatggatcattcccatccaccaatgagatgaggctcagatattatagctcctataaccaggcatctgaatgaccctgaaaactttcaaggcctggattatgggatcctattggaagagctaaatgggatgc

SEQ ID NO: 5484 - DNA, 1751 bp, Homo sapiens
  SIMILAR (751)..(695): 1001254mologous to Homo sapiens Amino acid sequence of the AX8_1 clone,accession number AAW59646,Smith-Waterman Score=95.
  misc_feature (1)...(1751): n = a,t,c or g
agcggccgcccttttttgttttttttccagggaaaagagagagtttattttataccagtagttgttttattttatacagtagttgtacagtaattgaggaaaaatgttgtcaggtggcagaaaacaatggagccacctagaagctggctgatgcagctggggcacacagaggaggggcctgggtacccccttttgggggaaactgagacgaagctatttagaacagcttgaaaataagagacttttctagaatggggtggcagctaaagtagcttctttttctttctttcagaatgctcagatgcatcagttccttaatatacacgtgaaatttgaaaactgtacattcggtgagattaaattttatatacaactagcaaattgtcccagctttgttgcctcattttcaattaaaggcctaaagtgttccaacatgagaaaatgtgaatacatttgatacagtgtggggtgggagtggatgggcagctcttgggtgggtactgggaccttcccacaagggctgtgtccacccaggaatccatgctgggcaggagggagggcagagggtatcaaaccaaacctctcaccaaggcgggcccgggaggggcaggctgtttcctctcgtgacaggcacagggcccatggaggacagtgtcttctttttgagcgggagctggtccgggtctagttcactttcaccaagaagtccatgctgtcgcaatagtttgttaagtctttcaatttcttgttcctattgcaaaagcagacaaacacttctcagagcagctgaactcaaggtgatgaatcttggcggccaattgtacattcatctgtattaaccttaagagttgccgttcaaaacgtatcttaactgagatgataatcccattgatgatccgggccacccgccacagccggagcagaatcagcaggcccagagcctcaaactggtgctcctggaacaggaggacaatgtcgaggatgaatgagaccaccaccacgacggcatccaggatctcaaacttgtggtgaaagaactccaggcggaagacaaataatttaaagatgatctccatcataaaaaagaccaagatggtgatgctcatgtagtggaataccatggcagcatagttattcttgtcgggctggatgatcttcaggtccaggatgagctcagcaagcaccaggagggcatccagaaccaccaagcagatgatgatgacctgaaacctgtgggagctgaacagtttcctcaacatgcccctgaagtcaaggggggccctgggtgcggggccaggggcaggggcaacgtcaggggctgcagctctgccttcctcgcctgagactggtgtgggtggtggctgctcctcctcctcctcctccttttcattctcccatttcttgtagttgatgttccaggcatggtagtcgtctcccacgaccgtgaagtgccttaagaacttgctcatcctctcagcgggagccaccttggccctgcgggtgactgccttttcgtcccaggtggccatgtccctgttgcctctggatctggttgtgagttctggctgtgctctcctttggctgtgtgacccaaggcaaggggcttggcctttctgcgtcttggtttcttcacctccctcaccccgggtgccttccgccccgcagggtgggcctgtcctgggcctcccgccggacgcgtgggtcgncgcggtntctagngncgatcttacgcaggnatcttatnactctct

SEQ ID NO: 5485 - DNA, 624 bp, Homo sapiens
  SIMILAR (598)..(119): 441254mologous to Homo sapiens unnamed protein product,accession number AK024780,Smith-Waterman Score=246.
gcgtcgacctttttttttttttttttttgctagttgtatataaaatttaatctcaccgaatgtacagttatcaaatttcacgtgtatattaaggaactgatgcatctgagcattgtcaaacaaacgggaagaagaagttaaagggcagcctggcattgatggctggtggagctctgaagcctgcctctgcaggtggagaacacatccacaaaagtaaccgcagtgggaaataagaaatcgccttttcatttcctgagttgggcctcagggaaagggagggatgaaattaggatttggcagttacatttgactatttttggcctgtggattcagcagggttccgtattttagtccacttcacttctataaccaaagcccctggggagctgggcaggaatcctttcctgtttgaatgactgggtgatgaagtggatgggcacccagtccagcatgtcctggggcctgggaatttccaaaaggggccacgtaatctgggaagccctggccccacagcaggctcttcaccttctgtggctacgagctgacacgggagagctccagtcagtcttagtttacagccagattgcatagtgtaaccaaataatactggggtccggaccccct

SEQ ID NO: 5486 - DNA, 425 bp, Homo sapiens
tccagattttttttttattcagtacagatgcaaagtagtagctcagaggctctgggtaatagcattcctgagattgatgacatccattacctcactagtccaacttctccagactaacgcagacttttctcttcccttggcctttcctctcctcgccattgggccaattccttcgatttctcatttcccttgaagttagggccattcacagtttcatggtcaaagccagttccaggttcaatagtctgtgatttatccaggctctgaggtatgcaccgcttctagagaagacagtgtcagaccgaggccccctggaggacctttggaacctctgatagtctgtcataccagagcatgattttctctaatgttcagacctggcttcactgaggaatagttcaggggatcagggcctagagacaaga

SEQ ID NO: 5487 - DNA, 580 bp, Homo sapiens
  SIMILAR (196)..(450): 941254mologous to Homo sapiens orphan nuclear hormone receptor,accession number Z30425,Smith-Waterman Score=398.
aacactttcatggtactgcaagtcatcaagtttactaaggacctgcccgtcttccgttccctgcccattgaagaccagatctcccttctcaagggagcagctgtggaaatctgtcacatcgtactcaataccactttctgtctccaaacacaaaacttcctctgcgggcctcttcgctacacaattgaagatggagcccgtgctccctatcttacagaccgacctggagttacccagagagatgagattgatcagctgcaagaggagatggcactgactctgcaaagctacatcaagggccagcagcgaaggccccgggatcggtttctgtatgcgaagttgctaggcctgctggctgagctccggagcattaatgaggcctacgggtaccaaatccagcacatccagggcctgtctgccatgatgccgctgctccaggagatctgcagctgaggccatgctcacttccttccccagctcacctggaacaccctggatacactggagtgggaaaatgctgggaccaaagattgggccgggttcaaaggaagcccagtggttgcaatgaaagactaaagca

SEQ ID NO: 5488 - DNA, 1588 bp, Homo sapiens
  SIMILAR (273)..(1331): 971254mologous to Homo sapiens orphan nuclear hormone receptor,accession number Z30425,Smith-Waterman Score=1776.
gtgagcttgctccttaagttacaggaactctccttataatagacacttcattttcctagtccatccctcatgaaaaatgactgaccactgctgggcagcaggagggatgataatcctaactccaatcactggcaactcctgagatcagaggaaaaccagcaacagcgtgggagtttggggagaggcattccataccagattctgtggcctgcaggtgacatgctgcctaagagaagcaggagtctgtgacagccaccccaacacgtgacgtcatggccagtagggaagatgagctgaggaactgtgtggtatgtggggaccaagccacaggctaccactttaatgcgctgacttgtgagggctgcaagggtttcttcaggagaacagtcagcaaaagcattggtcccacctgcccctttgctggaagctgtgaagtcagcaagactcagaggcgccactgcccagcctgcaggttgcagaagtgcttagatgctggcatgaggaaagacatgatactgtcggcagaagccctggcattgcggcgagcaaagcaggcccagcggcgggcacagcaaacacctgtgcaactgagtaaggagcaagaagagctgatccggacactcctgggggcccacacccgccacatgggcaccatgtttgaacagtttgtgcagtttaggcctccagctcatctgttcatccatcaccagcccttgcccaccctggcccctgtgctgcctctggtcacacacttcgcagacatcaacactttcatggtactgcaagtcatcaagtttactaaggacctgcccgtcttccgttccctgcccattgaagaccagatctcccttctcaagggagcagctgtggaaatctgtcacatcgtactcaataccactttctgtctccaaacacaaaacttcctctgcgggcctcttcgctacacaattgaagatggagcacgtgtggggtcccaggtagagctgttggagttgctctttcacttccatgatacactacgaaaactgcagctccaagagcctgagtatgtgctcttggctgccatggccctcttctctcctgctccctatcttacagaccgacctggagttacccagagagatgagattgatcagctgcaagaggagatggcactgactctgcaaagctacatcaagggccagcagcgaaggccccgggatcggtttctgtatgcgaagttgctaggcctgctggctgagctccggagcattaatgaggcctacgggtaccaaatccagcacatccagggcctgtctgccatgatgccgctgctccaagagatctgcagctgaggccgatgctcacttccttccccagctcacctggaacaccctggatacactggagtgggaaaatgctgggaccaaagattgggccgggttcaaagggagcccagtggttgcaatgaaagactaaagcaataactgcctcttcatgcggtcatggggatagtgggggtgaccataggaacaaagttgttctctggaagcacagaagatgggaaggaggaaacctcagggctaagaggtaaagaagctccttctgg

SEQ ID NO: 5489 - DNA, 1192 bp, Homo sapiens
  SIMILAR (720)..(848): 931254mologous to Homo sapiens orphan nuclear hormone receptor,accession number Z30425,Smith-Waterman Score=190.
  misc_feature (1)...(1192): n = a,t,c or g
ctgtttcatctcactttttccagattttttttttattcagtacagatgcaaagtagtagctcagaggctctgggtaatagcattcctgagattgatgacatccattacctcactagtccaacttctccagactaacgcagacttttctcttcccttggcctttcctctcctcgccattgggccaattccttcgatttctcatttcccttgaagttagggccattcacagtttcatggtcaaagccagttccaggttcaatagtctggggattaatccaggctctgaggtatgcaccgcttctgttttgctcgttcctccaagagctaagttttggccagaaaaggggatgctttaatacccattagaacacattcacctttctaagaacctgctctagaaaggcccaggcccctcagattcccacatgggttggagttctggcccaagtctggagctttcttcacactcggctctccagagctcctgggttcagaaaaaactgagcatggtgagagaagacagtgtcagacgcgaggccccctggaggatcctttggaacctctggatagtctggtcataccagagcatggattttctctaatgtttcagacctgggtttcactggaggaattagttcaggggatcagggcctagagacaagactcccaactgccttatttccctcctgttttcctggcaaccccactacttcctccaaaggtttctgtatgcgaagttgctaggcctgctggctgagctccggagcattaatgaggcgtacgggtactatatccagcacatccagggcctgtctgcgatgatgctgctgctctaagagatctgcagctgaggctatgctacttcgttcaccagcttacatgaataccgtgatacactgagtgcgacactgctggaccaagatgngctgggtctatggagccagtggttgcatgatagctaacgacaaagaagtattaaagcttgtattagggcgaactatccttaggaggtattacgttgcttccgcgtttcactcgaaggaactgttcgcctaatcgttgggaacccctgttgtggcgttgtgaggtgctatcaaagagcgccctacgcgttgtggcgtataccagcttctttgaaggnataactgcattcccaatggtccacgtgggttatcaactccggcgcattcct

SEQ ID NO: 5490 - DNA, 693 bp, Homo sapiens
  SIMILAR (151)..(690): 771254mologous to Homo sapiens p40,accession number U93569,Smith-Waterman Score=694.
atgtgcccctctgagatgaagcttccagaggaacgatcaggcagcaacatttgctgttctgcaatatttgctgttctgcagcccctgctggtgatacccaggcaaacatggtctggagtggacctccagcaaactccaacagacctgcagctgagggtcctgtttgttagaaggaaaactaacaaacagaaaggacatccacaccaaaaccccatctgtatgtcacaatcatcaaagaccaaagcaaggcaggccagcattcaaattcaggaaatacagagaatgccacaaagatactcctcgagcagagcaactccaagacacataattgtcagattcaccaaagttcgaatgaaggaaaaaatgttaagggcagccagagagaaaggtcgggttacccacaaagggaagcccatcagactaacagtggatctctcggcagaaactctacaagccagaagagagtgggggccaatattcaacattcttaaagaaaagaattttcaacccagaatttcatatccagccaaactaagcttcataagtgaaggagaaataaaatcctttacaaacaagcaaatgctgagagattttgtcaccaccaggcctgccttacaagagctcctgaaggaagcactaaacatggaaaggaacaaccagtaccagccacttcaaaaacatgcaaaattgtaa

SEQ ID NO: 5491 - DNA, 1029 bp, Homo sapiens
  SIMILAR (917)..(702): 701254mologous to Homo sapiens Human secreted protein HLYES38, SEQ ID NO:220,accession number AAY86305,Smith-Waterman Score=234.
atggcttcagagggtgcaagccccaagccttggcagcctcaacatggtgttgactctgcagttgcacagaagtcaaaaattgaggtttgggaacctccacctggatttcagaggatgtacgaaaacacctggatgtccaggcagaagtttgctgcaagggtggggccctcgtggacaacctctgccagggcagtacagaagggaaatgtggggtcagagcccccacacagagtccccagtggggcactgcctggtggagctatcagaagagggccaccatcctccagatcccagaatggtaggtccaccaacagcttgcattgtgtgcctggaaaagccaccgacactcaataccagcttgtggaagcagctgggaagggggctgtgccctgcaaagctacaggagtggacccacccaaggctgtgagagcccacttcttgcatcagcatgccctagatgtgagacatggagtcagaggagatcattttggaactttaaggttttatgactgccctattggatttcagacttgcatgaggtctgaagcctccacccagtggacagctttgaagagagtagtggttctcccagcacgcagcttgagatctgagaatggacagactgcctcctcaggtgggtccctgacccctgagtatcctatctgggaggcacctcccagtaggggcagactgacacctcacatggccgggtacccctctgagacgaaacctccagaggaacaatcagacagcaacatttgctgttcagcaatattcgctgttctgcagcctctgctgctgataaccaggcaaacagggtctggagtggacctccagcaaactccaacacacctgcagctgagggtcctgactgttagaagagaagtccttaaaagacctgatggagctgaaaaccacggcacaaggatacgtgatgaatgcacaagcttcagtagccgatttgatcaactggaagaaagggtatcagtgatggaagatcaaatgaatgaaatgaagcgagaagtttag

SEQ ID NO: 5492 - DNA, 2292 bp, Homo sapiens
  SIMILAR (1756)..(2289): 731254mologous to Homo sapiens p40,accession number U93570,Smith-Waterman Score=668.
atgagctccaaaattaaatctgtaataaatagcctactaaccaaaaaaagccctgaacctgatggattcacagctgaattctaccagatggacgaagaagagctggtaccattcctactgaaactattccaaaaaattgtaaaggaggaactcctccccaactcattctatgaggccagcatcatcctgataccaaaacctggcagagacaaaacaaaaaaagaaaacttcaggtcaatatgtttgatgaacattgatgtaataatcctcaacaaggagattagggtctgtgagatccatgaagacagcagcaccagaggctcccggcatttctactatgatggggagctcttcctctcccaaaacctggagactcaggaatggacagtgccccagtcctccagagctcagaccttagctatgaatatcagaaatttctgggatgaagatgccacacaggccaagacactttcaccctgtgatggcagaccgtctgcagaaactacagtaacatctcgaatcctaggagggcatcaggagaacagaatatctctctggcctggtgtcaggttggggcattttctgagccaggatgcccatcggtctgtgggtgtcctgcccaatgggaatgggacctaccagacctgggtggccactaagattccccaagaagaggagcagagggctacctgctatgtgggacacagcaggaatcacagcacttaccctggtgtcctctgggaaagccctgatgcttcagagtctatggcaaccgttccgtatgttgcggctgctgctgtttttgttatcattattattattctctgtgtcctttggtgcaagaagaaaatatcagctgcagaggacccaggtgaggagtgggcagcaaggagggccgtggcacctgctctgtcctcatccccatccctctgtctctcaggctcaccagcgtgcatcagcgtgggatgggaaggttcatcccctgccctgcagcaagagggccccgtccaggaggcacccacagcaggggcagtgcagggagaagaagaagattccctgtgggctgtgagggcagtggcctgggtggaagccctgctaggaacagggcaggaaggtcttgcagcctcagcaagcagcagccctggggtggaggtgcatttccagggagcacatgagcctacgaagcccagatcaacacctggttgggacaggagaccaccagggcaccatacagctggaatttcagtctctggtgccagctcctgggtctgctggctccactggattcaactccctacccaggccagcatcatcctgataccaaaacttggcagagatataacaaaaaaagaaaacttcgggccatgcatgatgaacatcaatgcaacaatcctcaataaaattctggcaaaccgaatccagcagcacatcaaaaagcttattcatcacaatcaagttggcttcatccccaggatgcaagctttgaagagggtagtggttcttccggcatggagtttgagatctgagaatgaacagactgcctcctcaagtgggtccctgacccctgagaagcctaactgggaggcatctccctgtaggggcagactgacacctcacacggccaggtacccctctgagacaaaacttccacaggaacgatcaggcagcaacatttgctgttcagcaatattcactgttctgcagcctctgctgctgatacccaggcaaacagggtctggagtggacctccagcaaactccaacagacctgcagctgaggacggagaatgactttgatgagctgagagaagaaggcttcagacgatcaaacttctccaagctaaaggaggaagttcaaacccattgcaaagaagttaaaaaccttgaaacaagattagacgaatggctaactagaataaccaatgcagagaagtccttaaaggacctgatggagctgaaaaccatggcaggagaactacgtgatgcgtgcacaagattcagtagccgattcaatcaactggaagaaagggtaacagagattgaagatcaaatgaatgaaatgaagcaagaagagaagtttagagaaaaaagaataaaaagaaatgaacaaagcctccaagaaatatgggactatgtgaaaagaccaaatctacgttggcttggtgtacctgaaagtgacagggagaatggaaccaagttggaaaacactctgcaggatattatccaggagaacttccccaacctagcaaggcagaccaacattcaaattcaggaaatgcagagaatgccataa

SEQ ID NO: 5493 - DNA, 1097 bp, Homo sapiens
  SIMILAR (3)..(419): 1001254mologous to Homo sapiens Hb2E,accession number AF235097,Smith-Waterman Score=747.
ttgccttccagctgccctttgctgagggcgcgggcgatggggcgcgcctcgacttcgtggtgcgctatgagacccctgagggcactttctgggccaacaaccacggccgcaactacacagtcctgctccggatcgcacccgctcccacacccactgatgccgaagggctgccccagcagcagcagctgccgcagctggagccacagcccgagtgccagggtcccgtggaggctgaggccaggcagctgaagagctgcatgaagccggtgaggcgcaggcctgccgaggaggaactgaagacgaagaacatggatgataacacctttgccatggcagagcatcctgatgtccaggagtcagtgggtccactggtagcccccacccctctccgtccatggccccagatgacacttcaggtctgctggagtttgttggagttccactccagaccctgtttgcctgggtatcaccagcagaggctgcagaacagagaatattgctgaacagcaaatgttgctgcctgatcggtcctctggaagcttcgtctcagaggggtacccggccgtgcctattacttaagaaatttacatttcataaggctattgctgacatagatagtgagtcctgtgatggagctgggcaaagtaaatttaaaaccatctggaaaggattcaccattctagatgccattaagaacatttgtgattcacgggaggaggtcagaatattaacattaacaggagttgggaagaagttcattctaattctcatgaatgagtttgaggggttcaatacttcagtggagggagtcactgcacatgtggtagaaatagcaagagaattagaattacaagggcattctgaagatgtgactgaattgctgcaatctcatgataaaacttggatgaatgaggagttgcttcttctggacaagcaaccaaagtggtttcttgagatggaatctactcttggtgaagatgctgtgaacactgttgaaatgacaacaaagaattcagaagattacataaatttagttgataaagcagtggcaggttttgagaagattagctccagttttgaaagaagttctactgtgg

SEQ ID NO: 5494 - DNA, 585 bp, Homo sapiens
  SIMILAR (581)..(312): 631254mologous to Homo sapiens Human secreted protein, SEQ ID NO: 7870,accession number AAG03789,Smith-Waterman Score=256.
aaagataggccattgtcagggaactgcagacttaggccgtggaggcagctggtgaagcaccagaaagcggtactgcacgttagctgagacaccaagccctaggcacatgctctattattctcttgtactacttcactgataaaacacaaaattaaagatagaattagactttcaagacagcaacagcagaaaattaaaccccaagtatgggaccctccttagcacagtgccgtatgcaactgcactggtcacacaacttgaagctggctctgcctttagattacaagaaatttgggcagggtgtggcagttcatgcctgtaatcccagcactttgggaggacaaagccagaggatagcttgaggccaggaatttgagaccagactggtcaacctagagagactctgtttctacaaaatctaaaaaaaaaattagctgggcatggtggtgcatgcctgcagtctcagctacttgggaggctgaggtgggaggatcgcttgatctcaggagtttgaggctgcagtgacacgtgattgtaccactgcactccagcctgggtgacagagcaagatcctgtctcagaaaa

SEQ ID NO: 5495 - DNA, 978 bp, Homo sapiens
  SIMILAR (439)..(975): 891254mologous to Homo sapiens p40,accession number U93569,Smith-Waterman Score=807.
gtggataaccccagggaaagtctttaggcaccgcgcgtaagcccatatataagtgctgtgtcctgccgcttcctcgctaatcgagggttcgccctgtcgttcacctgcggcgagcaccaatggtctgccaaggacacaccacccccccggtctgcggttctctggctggtcctggcgactgcgtgcattattccgttccggccgggtacccctctgagatgaagcttccagaggaacaatcaggcagcagcaacatttgctgttcagcaatattcgctgttctgcagcctccgctgctgataacccaggcaaacagggtctggagtggacctccggcaaactccaacagacctgcagctgagggtcctgactgttagaaggaaaaataacaaacagaaaaggacatctacaccaaaaccccatctgtacgtcaccatcatcaaagaccaaagggaaagaccaaatctacgtctgattggcatacctgaaagtgacagggagaatggaaccaaggtggaatacactcttcaggatattatccaggagaacttccccaacctagcaaggcaggccaacattcaaattcatgaaatacagagaatgccacaaagatactcctcgagaagagcaactcccagacacataattgtcagattcaccaaagttgaaatgaagcaaaaaatgttaagggcagccagagagaaaggtcgggttacccacaaagagaagcccgtcagactaacagctgatctctcggcagaaactctacaagccagaagagagtgggggccaatattcaacattcttcaagaaaagaattttcaacccagaatttcatatccagccaaactaagcttcacaagtgaaggagaaataaaatcatttacagacaagcaaatgtggagagattttgtcaccaccaggcctgccctaaaagagctcttgaaggaagcactaaacatggaaaggaacaactga

SEQ ID NO: 5496 - DNA, 2357 bp, Homo sapiens
  SIMILAR (551)..(1006): 571254mologous to Neisseria meningitidis Z2491 putative transcriptional accessory protein,accession number AL162752,Smith- Waterman Score=421.
gattggtgggtagaggcgcttttatttattctctactcatgcagcattaatccctatttcatcaggtacctacagtgctgtaattctagacgtgaccttgggtcttgatttacttcagctccgtcttctttataaatgtgccatgaaagaggtacatgaaagatagccaacatcaaagcgccttttaaagtaaattggttgataggaattccctggtatttaacactgtctgtcaaatgtttcagctggtttgcatccttttacaagctattgcttgctgcatgaaaagaaatttaaagcagctgttttaagtcttggggagggtggttgtgatggtgctgatggtgctgatggtggtgatggcagcggcatggcaaaatcaggacccttagctgcaggtctgttggagtttgctggaggtccactccagaccctgtttgcctgggtatcagcagcagaggctgcagaacagccaatattgctgaacagcaaatgttgctgcctgattgttcctctggaagcttcgtcttggaggggtacccggccgtgtgaggttatcgtcagtgaagcaggagcatcaatctacagtgtcagccctgaagctaacaaagagatgccagggctggaccctaatttgagaagtgcagtttccatagcaaggcgtgtacaagatccattagctgagctagtgaaaattgagccaaagcacattggagttggaatgtatcagcatgacgtatcccagactttactcaaggcaacactggacagtgttgtagaagaatgtgtcagctttgtgggagtggatattaacatctgttcagaagttttgttaaggcatattgcaggactcaatgccaacagggccaaaaatattattgaatggcgagagaaaaatggaccctttatcaaccgagaacagctgaagaaagtgaaagggctgggcccaaaatccttccaacagtgttgctgggctttcatcaggaatcaaccaggattatatccgaacgttttgcagtcagcaaacttgaaacttcaggccaaattccaaggagttgctgtgacatcttcagcagacgttgaggtcacaaatgagaagcagggcaaaaagaagagcaaaactgcagtgaatgttttactgaagccaaatcctttggaccaaacttgtattcatccagaatcatatgacatagcaatgaggtttttgtcatccattggagggacactgtatgaggttggaaagcctgaaatgcaacaaaaaataaattcattccttgaaaaggaaggaatggagaaaattgcagaaagattgcaaacaacagtacacaccttacaggttcatcatagatgggtcttcagccagcctgaaggctttgactttcgaacagatttttgataaacctggattttcaaggaggaaggcatagtatgcctggaagatctgcagattgggacagttcttacaggcaaagttgagaatgccactctctttggaatttttgtggatataggagtggggaaatctgggctgattcccatacgaaatgtaacagaagcaaaactttcaaaaacaaagaagagaagaagccttggactgggccccggagaaagagtggaagtccaagtactcaacattgacatcccccgatctaggattactctggacctcattcagggtgttatgagtatcccacgaaggccagacgctgattttattttctcatttccacagattgacaaggataagtcagttgtttgtaaactctaaggtagcagatgagaaataattcacttaatatcagaaatattttccaaacactttcctttattttttcttctgaataaatagaaaaccaacagtttgatttccttttccccttaaaggaaacaactaatacacattcttatatggctttatgtagtaatagttttctgactaaaattttgttttttattttttgtaaatttacctttaaaccccttttgcaaatttgtataacagattgccttaacttcctacttgcccaacatcctgcccttgctggacttgtatggggattgtcctccttgatttgaattgtacccgtctttgttgacacagtaggggctgggcagtgtttaatccttcccattttatagattttttttttaatcaggccttttggacttcattcataattttgcaataatctcttttcccttgtcatgcaagccaaaaatataccagtaaaacagattctgacgtgtttgtagttatcaaatgaatggctcgaaacacttctcaaaagggatatacggtattgaccccaacaataaatgtttgtggctagtgaaaaaaaaaaaaaaacctcgtgccg

SEQ ID NO: 5497 - DNA, 427 bp, Homo sapiens
  SIMILAR (2)..(343): 511254mologous to Homo sapiens Similar to zinc finger protein 136 (clone pHZ-20),accession number BC006279,Smith-Waterman Score= 287.
agccttcagattttcaagttctgttcgaattcatgaaaggtctcacactggagagaaaccttatgaatgcaaacaatgtggaaaagccttcatttcttccagtcactttcgactgcatgaaaggactcatatgggagagaaagtctaagaatataagcaacattctgaagccttcggttgttccagctccttctgaatacacaaaagagtttatactggacagaagctgtgtgaatacaaacattgttctaaagcccttgattgatccagtttcttttgagcacgaaagaattcccactggtgagaaacaagtatgaatgggaacggttgtggtttaatacttcagtttgaccgaagccatttcaagagaggacttcagcctcagttgattctatttggggtggggataaacaaaatttgcggaagg

SEQ ID NO: 5498 - DNA, 499 bp, Homo sapiens
  SIMILAR (499)..(341): 671254mologous to Homo sapiens Human secreted protein sequence encoded by gene 112 SEQ ID NO:282,accession number AAB56188,Smith-Waterman Score=187.
ctttgcagttttagtcaaatattgccatctttctagtggaagactttgacatgtaagttctagattatactttcatttataaataactgtgtagcttaatgagatggcccctgttagtatcttaggccatctattgaaggtttactaaattcttccaaggcacgtgagtctgctcctcagcaaagcagtgacaaacctgcttttccctggtttccccaactatgtaaaaccttattaaagaattcctgaacaatataaagttccctcagcaagacggaacttcccaagctcttgtctcaggagagaatgtggattatagaaagattgtgggtgtgagtggagtgggaagttatttaggtagtaagattttcaggctcggtgcagtggctcacacctgtaatcccagcaccctgggtggccgaggtgggcagatcacaaggtcaggagatggagaccatcctggccaacagggagaaactccatctctactaaaaataca

SEQ ID NO: 5499 - DNA, 618 bp, Homo sapiens
ccatgtactctctgttcatgggagctgctgcccccacctccagtctgaccgcttccatttatttaagaaaaatccgacacagtggtgggtagaacccgagagaaaaatggctgtgggatggggtaggggcgacactggctcccttctgcatttgcccaccctgaagtccctcacagcattccctggtgccctctactcccctcccgggttccgtcttgtgggggataggtggctgcctgccctgtgctgcagagggaagtcgcagtcagcagggtgacgggtggctaaggcgtagtagtgttgaccttgctgtgggggacggggaaggcaaggaggtccccaggcctctggctctggggtgtgatttggctagagatggatccaggactctttcccctttaggtccctgcccaaagcccttggggcagaggtgggagtcctgagaactcaggaaggtgcctggcttggcaccagacctctctgtagagtcagctcccaggtcctgggaggcacccgaatgccagcagatgctacaactgtccccctaacccccagatatttcgtccacagcaagatccttggcagggcaggcagctgccacctccccaccctgcagga

SEQ ID NO: 5500 - DNA, 376 bp, Homo sapiens
  SIMILAR (140)..(241): 471254mologous to Homo sapiens PRO2738,accession number AF116712,Smith-Waterman Score=63.
gcttactacagccttgaactcttgggctcaagtgatcctcccacctcagtcttcttagtagctgggactacaggtgcatgccaccacacctagctaattaaaatttttgtttgtttgttttttagagatggggtcttgctgtcctgcccaggctgctcttgaactcttggccttcagcaatcctcccaccttggcctctcaaagttctagaattacaggtgtgagccaccacatccagccaggaccaccatttctaaaggcattttgggaaaatcaccatttatttaattatccacctgaacaggagactaaagaaattatagtttttgagaaaatgcgtttctgagtgatcctcctctgtggtcatcgtcgacgc

SEQ ID NO: 5501 - DNA, 1941 bp, Homo sapiens
  SIMILAR (183)..(425): 751254mologous to Homo sapiens Human secreted protein, SEQ ID NO: 4718,accession number AAG00637,Smith-Waterman Score=340.
  misc_feature (1)...(1941): n = a,t,c or g
cagagggtctcttctgggactattggtttaaaggaagatgctgtggacagtggattataaagaccaaatgaaggtagaagtaattttattcaagaaaataaagaaanctgataccataagaaagttatagtatcagtatatattttatcatctgagaataaatgtaaatggataaatgagtcctttttttttttttttttttgagatggagtcttgccctttcgcccaggctggagtgcagtggtgcgatctcggctcactgcaagctctgcctcccgggttcacaccattctcctgcctcagcctcctgagtagctgggactacaggcgcccgccaccacacctggctaattttttgtatttttagtagacatgggttttcaccgtgttagccaggatggtctcgatctcctgacctcatgatccgcccgccttggcctcccaaagtgctgggattacaggcgtaagccaccatgcccagcctataatgtttttaaagatgatgggtaacataaaaatactatgtggtaataacttagaatactaggtctggaggaggagaacaggcctagcccatgtgaaagaataagcagtagctaatctatgtggtcttgaggtatagtataaacctggaaagttctctgaacctcttcagatactgagggttgcccaattaaaacaacaacaacaacaacaacaacaaaactttatcagatgtactgaatgacttcattctctgataaatttcaaagcttccagaacagaggatcaactattgtaactattgcccatttctggtccaggaaatacctttctgataaagagtgctcataaaacgcttgtgttgttttcattcattctatctagaagtgggcaaataccaaaacctttatcccagattaaggtcggataataagtgaacctgatgacctactttagaatgacaattcaaacagctatccctgaaaccagacaactacacgagttatgccttgaagcagatctttcaaagtgcaacgaaacattactcctgtttttcacttgaggagactaaattatggtcatatcttttccatgatactgattttttatttaacataaaccaaatactgactgaatcaaagactaaaaccccacaaaatttcatcctttaaaacaaaaagcaataaaatcccacccctaaatcaggcctcaaagttcaaagaaatgtttaaaaatcccccatatgggatctgacatgaatgtctattattgtcccccccaagtcttctcaaaaatcactttaaaatcttgctttgagaccctaagttttcttggaaataaaatacatttatagattgttttaaacctactgaattttactatttctgcttgctttcttcccatttaataaaatcaaaataaaaaattttgaccaaataaatatttattgaaaggtcctgccaccaaaaaagcttcaggtttttaaaaacatataatcaaacaacaatgttcttctgattaaaaaaaaaaaaagtacttatttaaatctgaggatccttatatgttcaatagaggattgtggtgatcctttgtattttaaaaatattatttgtggggcctactttacgtatctcctgtataaaaaccagctttcactccacatgaatagagaagatgctgaatacgcaggaatctgattatccctcacgtgattattaccggcccctctggggcaatctgcttgctcactcattctgccaccattctcttcattcaagtgtttaacagcacatttatcaaaggcagctctccgatgcaatgtttaacgagtgtcttctcaggagtgtatccgtgtcatttattcttctcatccaggtaagcacgaacttcacagtactactaaaaatcttcttcaaattatattgataatggacttatttctgaccgtttttggatttg

SEQ ID NO: 5502 - DNA, 692 bp, Homo sapiens
  SIMILAR (692)..(543): 881254mologous to Homo sapiens Secreted protein encoded by gene 94 clone HPMBQ32,accession number AAW88627,Smith-Waterman Score=250.
atcgatcgccttaggtaccgtttgagaatccctgggtcgacccacgcgtgcgcccacgcgtccggtttttttcaactggtacctttagatgctgcgcccactgaatttcatgactattacaatcgggatcttcccaggcaagcttgtgtcgttataatgaggagagtcaaaaacatgcagccttaagcctcagcaaagagcataatccaactcagtatgaagagcggatgaggatacagaaggctggaggaaacgtcaggtaaccaagggactgagaggagctcatgggaaggagggctgttagctgtagaagggtcccgagaccttcaaggagtagaacttcccctgttacgtagtcttcagtgtgacgaggctctgtctgagatctaacactggtgacataggtggatgacagttgtagatttcacatgtgtccacgtggaaggaaacttgcctccctacatttgcaaaaggacaaattcatatttaccattcacagtgttttctctgtgcctaggaagtttcttaaatactgtcacttttcgtggtggcgggcgcctgtagtcccagctactcgggaggctgaggcaggagaatggcgtgaacctgggaggcggagcttgcagtgagccaagatcgcaccactgcactccagcctgggcaacagagcgagactccatctcaaaaaaaaa

SEQ ID NO: 5503 - DNA, 544 bp, Homo sapiens
  SIMILAR (375)..(310): 811254mologous to Homo sapiens PRO2822,accession number AF119900,Smith-Waterman Score=86.
ttttgctcctggcagcctgaggcacagctgcctgtattgtcctcatctgttctgactgaaggatggaggtgctgaataaattaggcctcaggcctctaccaccagagagctggagaatgggttccacgtcattcaaggacctgaattttttatgttcagggagcattgggaatcttcttctttccagggaggaattagcctgcaaggttaggacttgaagagggaaggtatttaataactgggcgaggatgggtgtggtggctcacacctgtaatcccagcattttgggaggctgaggtggccagatcccaaggtcagaagatcgagaccatcctggctaacatggtgaaaccccatctctactaaaaatacaaaaaaaaattagccgggggtggtggcgggtacctgtagtcctagctacttgggaggctgaggcaggagaatggcgtgaacctgggaggtggagcttgcagtgagccaagatcgtgccactgcactccagcctgggcgacagagcaagactccgtctcaaaaaataaaaaaa

SEQ ID NO: 5504 - DNA, 1163 bp, Homo sapiens
  SIMILAR (951)..(757): 981254mologous to Homo sapiens Human protein comprising secretory signal amino acid sequence 1,accession number AAW37864,Smith-Waterman Score=362.
ccccgatttttcatgtttgccagtaagctcctgtgaggggttgagacggcggaagcttaagagtgcagtgttcctcccttccttgcctctagaggcatgctgacttccttccttgtcacagagcccttgcaaagccaaggcaaagccagagctcagaacctagagacttccttttgacaaagcagcgcctcagaagctcttctaggctttagttggggaagctttttgttgttgttgttgtgacggagtctcactttgtcacccaggctggagtgaagtggcacaatctcagctcactgcagcctccacctcctgggttcaaacaattttcctgccttagcctcccgagtagctgggattacaggcgtgggccaccacgcggctaatttttgtattttttttttttttttttttttttttgagacggagtctcgctctgtcgcccaggctggagtgcagtggcgcgatctcggctcactgcaagctccgcctcccgggttcacgccattctcctgcctcagcctcccgagtagctgggactacaggcgcccgctaccacgcccggctaattttttgtatttttagtagagatggggtttcatcatgttggccaggctggtctcgaactcctgacctcaagtgatccacccaccttggcctcccaaagtgctgggattacaggcgtgagccaccacgtccagcctggggaaggtttttgtaactgctgctcgtcgtggtcagaatctgggcccttcaaggagcgggtggggtaggatagtgaggggaagcctcccaagctaggacaagagcaagcagaaacaggcaaatttgtgtaagttcaggttcaaggactctccatcctagctcatctccaaagagttgatgtactcccgaacccatttcttctctgggttggcacacacttggcggttctttcgggtgacaaagacgactgctgggttggagcacttgccactggtgtagaaatactccttgatgtgggcacggggcagtgggcgggcaatgtaggcaaagcagcagggtgtggtgtccgaggaatatggggaggcagatgccaggagcgcagagggcagtagcaatgaggatgacagcgaggcgtgccgcggagaccttcatggtacctgtggagaggctgtcggagg

SEQ ID NO: 5505 - DNA, 402 bp, Homo sapiens
  misc_feature (1)...(402): n = a,t,c or g
tttcgtggcgcggtcagggctggccttggcttcagctgcggttttggggtcccggactctgggatcggcggcgctatgagttctttcgaggggcagatggccgagtatccaactatctccatagaccgcttcgatagggagaacctgagggcccgcgcctacttcctgtcccactgccacaaagatcacatgaaaggattaagaccccctaccttgaaaagaaggttggagtgnnnnnnnnnnnnnnnnnnnnnnnnnnnnnnnnnnnnnnnnnnnnnnnnnnnnnnnnnnnnnnnnnnnnnnnnnnnnnnnnncagccagcttgaaggtttatctatactgttcacctgtgactaaggagttgttgttaacgagcccgaaatacagattttggaagaaacg

SEQ ID NO: 5506 - DNA, 526 bp, Homo sapiens
  SIMILAR (524)..(285): 761254mologous to Homo sapiens Human secreted protein, SEQ ID NO: 4718,accession number AAG00637,Smith-Waterman Score=325.
ctcattggtaaaatgtgggtgctggattggatcttaaagatcccttccagctctgaaatgctgattgtacagtatattcttcccagattgactcactgtgcaatctttacaatactttttatcttttcacttttgacataggtaatgttgttgagcagttgagcaatgttcagtccagttgtgaagctggagaagagaaatgggttttaaaaattaagtgaggggaggccgggtgcggtggctcacgcatgtaatcccagcactttgggaggccaaggcaggtggatcacgaggtcaggagatccagaccatcctggctaacatggtgaaacctcgtctctactaaaaatacaaaaaattagccagctgtggtggcgggcgcctgtagtcccagctactcaggaggctgaggcaggagaatggcgtgaacctgtgaggcagagcttacagtgagccgagatcgtgccactgcactccagcctgggcgacagagcaagactctgtctcaaaaaaaaaaaaaaaaaaa

SEQ ID NO: 5507 - DNA, 615 bp, Homo sapiens
  SIMILAR (451)..(236): 801254mologous to Homo sapiens Secreted protein encoded by gene 94 clone HPMBQ32,accession number AAW88627,Smith-Waterman Score=305.
acttgatatgattgttgggaaggcatggaatatgtttgcttcaaaagcctacattcatcagtacacaaaatttggaatcgaagaagaggactttttagacagtttcacgtcattagagcaggttgttgccagttactgtaatctctgatcttgaacaatgggaaaagtataccttaaggcatttctggactaaaatattttcaatactattttctctgtaaagttttcaaagttctccatcctggctaacacggtgaaacaccgtctctaccagaaaatacaaaaaattagccaggcgcagtggcgggtgcctgtagtcccagctactcgggaggctgaggcaggagaatgacgtgaacccaggaggcggagcttgcagtgagccgagatcgcgccactgcactccagcctgggcgacagagcgagactccgtctcaaaaaaaaaaaaaaaaaaaaaatgttttcaaagttccattctgttaaagtaaccacgtagaatgctgagtctattctgcatactatgcccacagaaaaggaagaaaactttttaaaatggagaatcgcatgttttcaatgaaaacattcacttggtatttcatttgtaagaaaaaaaaa

SEQ ID NO: 5508 - DNA, 5435 bp, Homo sapiens
  SIMILAR (4414)..(3653): 401254mologous to Homo sapiens zinc finger protein,accession number AF246126,Smith-Waterman Score=542.
gagatggagtctcgctctgttgcccaggctggagcgcagtggcgcaatctcggctcactgcaagctccgcctcctgggttcaatgttgtgaatattcttaatgcatttcattatttatatacaatatgatactgatgaggagtcattatattctgagtagttttcctgaagaccacaagtctcaagtcaaggaaagtatccttaatctaggggaaaaaaaggaagtttctaaattgttccacaatacacttcactaagaattgtactgtatgacaatgctaatttttaaaaataatatatatatatatttttgtttctgttaaggatggtggtatttgcttaatactggttttcctgtatagcagatattttcttatggctatatttacttgaatgaaaaatcaaagatgactacctgaatattccagtgtataattacagtacaacctcatgaaatggttgattctgtggtctcaagtctagaatccagaattgctgcccaatactgtaaatttattcagaacaaaataaggcagttggacgtggtggctcacgcctgtaatcccagcactttgggaggccgaggcaggcaggtcacctgaagtcaggagatcaagaccatcctggctaacacggtgaaaccccgtctctactaaaaatacaaaaacagaattagccgggcgtgctggcgcatgcctgtaattccagctactcgggaggctgaggcaggagaatcacttgaacccggggggcgggggttgcagtgagccaagatcacgccactgcactccagcccaggcaacagaacaagactctgcctcaaaaaaaaaaaaaaaaaaaaaaaaaaacagaacaaaatataaccaattaactaagcacagtttacatcttttaaaaaaatcattttaatactacaggcttgaccatgaaataatgacatgtctatataaaagtgtaggttgacaaacttgtcatggaatgccaaggagactgtggagggagagggagacaaccactaaagatataacagtcatatgcaaggaattaactttccttattggcttgggtacctgggtgctcaaagaatgtgtacaaatattaaaaataccattctttaaaacttacatccaaaaccaggaagtatgtcttgatatacttttctgcctcattccaaaattttcctatgctcattatataagacaggcaaaatcagaaggagaaaatttagaaacactaaaccaaaaagccaatagagaacgtgatgtttgaaaaatatggacttaatctcaattgaaagagttcattttttcttaccacagagctcattagttagaaaagtgctcgaagcatatctgcacatttaatattaaaaataaaaaaataaataaaagccagcgttctgattcaggcaaagattttaagaaaccgaagaaagaaaaatgaagaaatttcaagattaaaaaatggactgggcatggtagcatgcacctgtagtcccagctacttggttagctgaggcagggttgcttgaacccaagagttggaggctgtagtgtgctataactgcacctgtgaatagccactgcactctagcctgggcaacatagcaagaccttgtctcttaaaaaaaaaattggagagggggtgggaggtaagtgatttagcctgggaactcagttctctcagataaagaaatacaaaattttaagctatactgagtctggataaatatgatctgttaagtgtaatcaatacactagcccttctgttcagcctttcctataataagctcctggttgattatggtcttttgaagttccccaaacttgaaaaagtaatctgcctaaaggtactagaggtgctgctctctttatcgcctaagaatgctggtattacataatttgcagaggacagggcagtaaaacttaggagttttccctcactatatttaaactgtgttaaaatagctcaaggttgtgaacatatccacattttacatataatagatatttcaaaattcataaccaatttgtcttctcatctgaatttctcagccactatcagcaatgtcatgtttgtgattttaagtttactattttagcttcttataacaattctagaaaaataaagcaacctcaaaatgagcgatttcaatttgtcatcccataaaagttaaacatcaacacaattcctaagggaagtgagaaacagacgtgactgagatgaaatgatctccactacttcctcctcctgtcagcaaacagccttattcaaattttcaaaacatgcaagctttaggtgacttccctggaaaaggccccatcccctgcaaatcatttcatgtaatgcactaacgaagccaagcagaacatggaggacaggagcacattagggagcctctcttgagtgttaagcagagatgtcaaaactaccaagtatttacgccaaatcctgaaagcaaaacctcatttttgcagtaacctggtctggagaccctctcagatacatctagtctctgaagcaccttttgagttgtacggatgtaagaatagctttgaattatagaagttatatgcatctttaagaatcacattttgatgattataaaaatttttttctattttacaacataggttcagctacactgaaaaaattacactgcttattgaaatacatttcattttagaaacagactaccaaagaagtctatacaaaaactctaaaataatttctgtagtaaaataaagagtgcgttaggagagctacacaaagaagaaaatttctgtctttctctataatgcttgatatactgtgaaacatggccagctcaactctgtagctggcaccaaaagctgaaaagaattccttaccatacacagtgatacaattaatgctctggattaatctcacagccttcccgattagtacaaaggaaaccaggcctatcccctctttgaggagaagtctgggatataaaagcaagcatacctcatcagctgatatgaaattataaaattccacaagtctgagtatttgaaacttataaaagtcatcagaaaatgcaagcaaattgggctttagttcagtggttcccctggtttagatgacagtccctctgtgagctcaaggtagtcttcttgttcattcccttggatctgttgattcagtgacactggcgaagctcttggtagaggcggaggagagtctgagaactaaggaaatgctcaccgactccctctgtgcacgctcacacatggggacgtgtctcctggagaacacactaaggagacggatgttaatgatgctgtgctgaactgttcttctctgccaggtgccgcagaaagttgtcctcactctggcctctatgatttaaaggctcactcttaaagagagctggaggtggcgggaggtgagggactggagggatgggaaggtggtgtgggtggtgagggtgtgggtggatgtgcaggtgtgagaaggggtgggggatgggccgagggggaagagtgcttacaggattcatattgattggaggggttggggttgtggctgtgttcaccacagaaggaactggggtggctggggaagttgtaagtgggatctggacagcaggtggcacattcacggggctggtcacccgaaagcacttctccttgtgggccttaagcatgttcgagaagcggaaccgctggccacacacatcacatggatagggcttctcgcctgtgtgagttctgcggtgtctcttcatgttggggcggctggtgaagcttttgccacagatttcacagataaagggtttctctccagtgtgtgttttcatgtgttcgtcgaagtactgcttcatgttgaaatccttgccacaccactggcacatgaactgtttgtgcccaatatgaatgctcatgtgggagcgtagctggtacttgtactgaaacctttcgtcacagttctcgcatctaaagggcttctctccagaatgctgcaaggagtgcaccttgagtgacatactgcgtttgaatgattttccacaggtttcgcatgtaaatggcatgtcttttgtgtgtgcaaccatgtgtttccgcacatgagccatggtatagaatttcttctcacaaatttcacaggaaaatttcttttctgcatatccatggacgatcttgatatgttcatgaagggaccagagtttcttgaacgatttgttacaggaaacacactgaatgtttttttcacagtctgtttgctggtgaagggacagctcactttccaggacaaacttcttgccacatttatcacaaatctgcatgcgcctatgagtaacgttcatgtgcttctccaggtaccagcgagtgttaaataccctggggcacttctcacaggtcagagtctctttctcttcacacttagctttctggactggtgctttgggctcctttgtggcccgcttcttacgcttaggtggctctacactcttcctacgacctcttgtagttctgggagtaggggaagtggtagctgcggcaacagaggcagctctcctggttctcctttgtgtaacgctgactttctctactatcttctcctttttcttctgcttttcattctctccatagtcattgctgtcatctgtggcctcttcctcactctcttcctcttcctcctcactgcttgtcttaagaacaggagtctctttggactgagaagagacacccttttcccctttagatacatttaatgtttgattattaaggtttacctccactatgatctgctcccttttgtaagagacttcttcctcttcctcctctgtgtcatcagaattctcccggtcttccttaacagcatgcacgtcagacactgctcttgtctccctgaaatatggctgttcttctgtttcatggagatgcggtttgctcatcttggtgtccactaacacagaataaggacttcctgattcccttttgtacactttggtggacaggtcaagttcttggttggcaccatgataaaaggaagatggcacttgaccacgacggctatcttcttgtgccattcctgctacatgcacagcacagttttcaaccagctcctgacaagaactggctgtgtggctcattggtaagtggcccaatttattaaacagttcagactataaagaaatagctttaaaacaaggtaattattaagactcaaatcttttctcatccacaaagaatcactcaaatgaaaaaaagatattcctggaaactgtgtgcaattcttccagtgttgcagcaccaaagcatgagtcaaaaaggtttggtattatggcaagagcagagcactagtgatttttcttctgaagagagctgcaagggacttgggagcatcttatcttttctgtctcctgccacattgtgagcgctccgccgcccagataaccgccggctccccgc

SEQ ID NO: 5509 - DNA, 6550 bp, Homo sapiens
  SIMILAR (4623)..(5570): 581254mologous to Homo sapiens Human secreted protein clone dd119_4 protein sequence SEQ ID NO:108,accession number AAY53051,Smith-Waterman Score=845.
ctaatattttctccccgtggggtgaggcagttgaattattcatcatttctgtttatggacctttggtattcagcaaagcagaggcaaaaacttagaaagagcgctatgtccagagatcagtattctgaaagggcacttgtcaagtggaatttcttatttgctgcctgaatcttcagaggagacaactgaattaattaataaaacaaaataccagaattttgggaggccaaggcaggcagatcacgaggtcaggagatcgagaccatcctggctaacacagtgaggccccatctctactaaaaatacaaaaaattagccaggtgtggtggcgggcacctgtagtcccagttactcgggaggctgaggcaggagaatggcatgaacctgggaggcggagcttgcagtgagccgagatcacaccactgcaccccagcctgggcgacagagcgagactccatctcaaaaaaattaaaaaaaaaatacattgagagacagagataccaccaacatatgaaacacccatggagcactaagattcagtatgtatgtatggatggatgacacagatcagtagagaaacagataatacaaacattgtgtatgtttgtattcacacacacatattgaggccagctatgggggaggggtgagagagagagtggctcaaaaagaactagaacaagggatacacaaaaagatagaataaaaactcagtgtcataaatatgtcagtggcagaaccggagagagtaatcaagagaaaaagcatgtagcagaaaaagaaactgtacatcaaaaatgaaagcacccaagccaggagatccaggcggtagtgacttattgactacttacctccctggagaagcagcaagaccactactcctgcaatagatgggtggaaagagaaatctgttgagccaaacctggttctgctgtcccagataatggcagtgaaaatgtgggtgtgctcacatacaagatagagccacacttcatctgggctccccagccacagctgctgtggtttctttttttttttttttttttggagacggagtctcaactctgtcaccccaggctggagtgcaatggtgcgccatctcggctcacatgcaacgtccgcctcccgggttcacgccattctcctgccctcagcctcccaaggtagctgggactacaggcacatgcccaccatacccggctaattttttttttttttttttttttttttttttttttagtagagacggggtttcaccgtgttagccaggatggtctcgatctgatggtctcgatctcctgacctcgtgatccacccgcctcggcctcccaaagtgctgggattacaggcgtgagccaccgcgcctgccccagaatggtttttaaagccacagttgagaggccacccattgcccggcgcctggacagtgatcatcttgttcatcttgttcagtcctttcttgtgtgattggaattattcatcccctttgaaagatgagaaggttgagatgcaaagagtctacctttccaagttctcactgctggaaagagctagaagcacagttcaaagttctggcttctggactctgcagtccaggtctcccttctcccacttgcctaccctcaatgccacactgtttttgaagtggcccataacttgaaggaaaagtttaaagacagttcaatttaatcatcagaatgcattcttttttttttcggagacggagtttcactcttgctgcccaggctggagtgcaatggtgcaatgatctcggctcactgcaacctctgcctcctgggttcaagtgattctccagcctcagcctcccgagtagctgggattatgggcgcccaccaccacgcccggctaattttttgtattttttttttttagtagagatggggtttcgccaggttggccaggctggtcttgtgaactcctggcctcaggtgatctgcccacctcatcctccaaaagtgctgggattacaggcatgagccaccacacccggccccccttcaattttaaagccatcactatgcaccctatgtctatgccaggcactaaaataagatgaagcaccttcttggagtttacatgctggtaattatgccagacagtaataaaataggtaagaacggctgtgggggaagtcagctgggttctagttacagtcgcatttcaggaaatgatttaacatgctgactttaacaacctaagcctcttctccatgtgtgcacacagggtagatctctgaacacaggtgaccctagaagtgctgtaacttctaggggaatggctgtgttgagtcaaggcaggatgacagttcagcctcctcccaggctagtgcaaagggctcttcactcggattaaaaccttctctcccagaccgaattgccaactcccaacacccctcctacagaaaatttggagtcctcgcttattccctggcagcccctacctaatagggtggtgaattaattatcaaacatgcgacagtttagcgaaaatggcaacactttggaataaatgactgtaatgtacatcctggcgcccattttgcaggtcagttgctctccctggaaggaagagtgttctcggatttcaccttaaaggaggaaggctgccagaactgaactagcacttctgaatatcctgaggcgaggtccggtgacttccttgggaagctctgccgcgcccccatcccaccctaccccaccctaccccaccacagcaggcgctggagtcctgggaccaccaggatctgaggcccaaatccttcctcactaaggggaggagaggggtgctccggcagggcaggatgggaaggcgtgcttgggcgggattgtgacatgagtgccctggtgacatggagcagttctgtggcataaataaaggtgtcataaagacagggcgggactcatgcttacaaggggcacgagcgtctcggagctgccagaatgacttccgctcagtgcccggcactagcgtgtgtcatgtccccgctgcgtttctggggcccatggcccctccttatgtggcaactattgtggctactagtcaaggaggctcagcctctggagtgggtcaaggacccgctccagctgacctctaaccccctggggccgcctgagccctggtcttcccactcctcccatttcccacgggaatctccccatgcgcctactctcccagcagacccgtgggactttgatcacctggggccctctgcttcctcagagatgccagccccaccccaggaatcgactgaaaatttggttccattcctggacacctgggattcagctggagagctgcccctggagccagagcagttcttggcttcacagcaggatttaaaggacaagctgagtccacaggaaaggctccctgtttcgcccaagaagctgaagaaagatccagctcagcgttggagccttgctgagattattggaattatacgccaattatccacacctcagagtcagaaacagactttgcagaatgaatattccagtacagatacaccgtatcccggtagcctgcctccagaactccgggtgaagtcagatgagcctccagggccctctgagcaagttggaccttctcaattccatctagagcccgaaactcaaaatccagagacccttgaagacatccagtcctcttcactccagcaagaagccccagcacagcttccacagctccttgaggaagaaccttcttcaatgcagcaggaggccccagctctgcctccagagtcctctatggagagtctaactctaccgaatcatgaggtgtcagttcaacctccaggtgaggatcaagcttattatcacttgcccaacattacagttaaacctgcagatgtggaggttaccataacttcagaggctaccaatgagacagaatcttcccaagctcagcaggagaccccaattcagtttccagaggaggtggaaccttctgcaacccaacaggaggccccaattgagcctccagttcctcctatggagcatgaactttccatcagtgagcagcagcagccagttcagccttctgagacttctagggaggtcgaatcttctccgacccagcaggagaccccaggtcagcctccagaacatcatgaagtcacagtttcacctccaggtcaccatcaaactcatcatttagattcacccagtgtctctgtgaagcctccagacgtgcagctcaccatagcagcagagcctagtgcagaggtgggaacttctctagtccagcaggaggctacaactcggctctcagggtcaggtaatgatatagaacctcccgccatccagcacgggggcccacctctgctttcagagtcatcagaagaagctggacctttagcagttcaacaggagacttcatttcaatctccggaacctattaataatgagaacccctctccaacccagcaggaggctgcagctgagcatccacagaccgctgaggagggtgagtcttccctaacccatcaggaggccccagctcagactccagagttccctaatgtagttgtagctcaacctccagagcattcacacctgactcaagccacagttcaacctttggatctggggtttaccatcactccagaatccatgacagaggttgaactttctccaaccatgaaggagaccccaactcagcctcctaagaaagttgtaccccaacttcgagtatatcaaggggtaacaaatccaacaccaggtcaggatcaagctcagcatccagtgtcacccagcgttacagttcaacttttggacctgggacttaccatcactccagaacccactacggaggttggacattctacagccccgaagaggactatagtttctccaaagcatcctgaggtgacacttccacatccagaccaggttcagactcagcattcacacctgactcgagccacagttcaacctttggacctggggtttaccatcactccaaaatccatgacagaggttgaaccttctacagccctgatgactacagctcctcctccaggacaccctgaggtgacacttccaccttcagacaagggtcaggctcagcattcacacctgactcaagccaccgttcaacctctggacctggagcttaccataactacaaaacctactacagaggttaaaccgtctccaaccacggaggagacctcaactcagcctccagacctgggacttgccatcattccagaacccactacagagactggacattctacagccctggagaagactacagctcctcgtccagaccgggttcagactctgcatcgaagcctgactgaagtcacaggtccacctactgaactagaacctgctcaggattcactggtgcagtctgaaagttacacccaaaataaggctttaactgcaccagaggaacacaaggcctccacaagcaccaacatatgtgagctctgtacctgcggagatgagatgttgtcatgtattgatctcaacccagagcagaggctccgccaagtgcctgtgccagagcccaacacccacaatggcaccttcaccatcttgtaagaatcacttttcctcaattgtcctctgtgtcctgcctgacatggcagccttttcctggaggccttcctgggccttctttatctccccaagccatatggacaactgactttctgctttcacctttgcttgtcaactctcccttctcctcattctcttttaatgttaggccccttctccagtcttttccttttactctggtcttttactcgtttttgtatccatttttatttagccccatcacatcattgcttaaccgctgctctcctcccattttcgcttcaccctctttacagcagcctgtccctctcccgatctcagtgatgatgctctaagtggttaagagttgattccggagccaggctgcctgggtttgaacccagatctatttattagcttggtgacccagagcaagttattctgcctgtgactcaatttcctcacctttaaactggggatcatgctagttagcatttcataggattgttgtgaaatttaggtgagtgaatatatgaaacacttcatcagtgcttagcatatgtaggagagttggctgttcacatgattattcagtcctttagttttgtccagaactcatttttgtccctagctttctatatgtagaactagttttatgtcaaacccagggccaagtatgctactgtctccagaacacgaaaatgataggagggaagaggctgggtgtggtggctcacgcctgtaatcccagcactttgggaggccgaggcgggcggatcatgaggtcaggagatcaagaccatcctggctaacatggtgaaaccccatctctactaaaaatacagaaaaaaattagccaggcatggtggtgggtgcctggagtcccagctactcgggaggctgaggcaggagaatggcatgaacctgggaggcagagcttgcagtgagccgagattgcaccactgcactccagcctgggcgacagagcaagactccatctc

SEQ ID NO: 5510 - DNA, 790 bp, Homo sapiens
gggctagtgtaacagcatgcaggttgaattgccaaggatgctcgccatgccagcctttctgttttcctcaccttgctgctcccctgccctaagtccccaaccctcaacttgaaaccccattcccttaagccaggactcagagaatccctttgccctctggttaacctgggactccatcccccaaacccactaatcacatcccactgactgaccctctgtgatcaaagaccctctcttttggtgagggttggctcttagctcattgctggggatgggaaggagaagcagtggcttttgtgggcattgcttctaaccctacttctcaagcttccctccaaagaaactgattggccctggaaccttcacatccactcttgttatgactccacagtgtccagactaatttgtgcatgaactgacataaaaccatcctacggtatccagggaacagaaagcatgatgcatgatggcaggacaggaacgcaggctgggacatttagagagacataaatgacaaagaaaacccagaacccatttctcagggcactttccagaactctctcatattcgtgggctggcatcaaccctgctgcttgaggaaagcacacggaaaggaacaaacatctggtggaaagctcaggtggcagcggactctgactccactgaggaactgcctcagaagctgcgatcacaactttggctgaagcccctgcctcactctagggcacctgacctggcctcttgcctaaaccacaaggctaagggctatagacaatgagttccttaggag

SEQ ID NO: 5511 - DNA, 526 bp, Homo sapiens
  SIMILAR (3)..(296): 551254mologous to Homo sapiens Human myelin oligodendrocyte glycoprotein gene,accession number AAZ29204,Smith-Waterman Score= 209.
tttttttgagacagagtctcgctctctcacccaggctggaatgcagtggcccaatctcggctcactgcaacctccacgtcccgggttcaagcaattctcctgtctcagcctcccaagtcgctgggaccacaggcacatgccatcaggactggctaatttttgtatttttagtagagatggggtttcaccatattgatcaggctggtcttgaactcctgacctcaggtgatccacccgccttggcctcccaaagtgctgggattacaggcgtgacacttacacctggcctttttctctctttttttaaattgagatgggtggggtctcactatgttgcctaggctggtctcgaactcctgagctcaagcgatcctcccgccttggcctcacaaattgctgggattacaggtgtgaacccaccacgcttatcctggggcttttaattcttactgaaaatcatagtctaaatttcccaaagggattcagaatcctttggggtacattcaagtcttctaggccatctctg

SEQ ID NO: 5512 - DNA, 571 bp, Homo sapiens
  SIMILAR (96)..(251): 631254mologous to Homo sapiens Human myelin oligodendrocyte glycoprotein gene,accession number AAZ29204,Smith-Waterman Score= 145.
gacatggagactcgctgtcgcccaggctggagtgcagtggcgcaatctcagctcactgcagcctctgcctcctgggttcaagtgatcctcctgcctcagcctcccaagtagctgggaatacaggctcttgccaccacgcccggctaatttttatatttttagtagagacagggtttcgccatgttggccaggctggtctcaaactcctgaccttaggtgatcagcttcccaaactgctgggattacaggcgtgagccaccatgcctggccagaatcccactgtatttttttcatttcctctctgtggattataaaagttctctttaaaaataaagtaacttttaaagttcgtgaaaacgtatgagattaaatgatgtaagagttcgttcatttctaataaaaaggtattttttgtacttaggaaaatgggtatatggatacacaaacaactttattgaccatttttattttgcctgggataagttccaagttttcaatgttgcactgcatcatcttacagaacagattccactttgaacacgaaatgtacaacgaattccaccgcactgac

SEQ ID NO: 5513 - DNA, 336 bp, Homo sapiens
tgaactattacatcatattgcaggagttaagggtctcatactgtcacccaggctggaatgcaatgaagtaatcacggctcactacaactttaccttcccagcctcaggcgattctcctacctaaacctcccaagcagctgggaccagaggagtaacaaggaaggctagcagtgcagcccaggtccagagctgatgaatggtgcagtgctgctgttgtcatagcaaccaagaggaaaaaagcagcaccatataaggatctgtgacatggattctgggaacaatttatattaaaaagctgtaagctcctcatgccttaaagctgtaaaaaaaaaaaaa

SEQ ID NO: 5514 - DNA, 435 bp, Homo sapiens
gctttaaatgattttattaaaaattgtaccaattgatggggggaaagatatacacacatacacacatatgcatgtgaagaacataaacacataaagccaaaggtcctgtacagttttttaaaaaatggggcccctttcttcttcctctctcccagaggcagagtgcccagaccccagggcagctaccctggggatgaacaaaatgctacattctcactgggtctcctcgatagcccctgtggatccagggatggggtagaaggctgccagtggcccagactttgaaacaggccaggcagaggccaggctgagtcctccaccctcattgcaggagtccagcgtctggcctggggacttccctcaccagatctgttgaccaacttctagaaacccctgctttggggttgtgaattagaagggctgttttgaccctga

SEQ ID NO: 5515 - DNA, 1517 bp, Homo sapiens
ctggcagagtagctgtcaggaaggagaaaggttctttctggctggttgtttttaattggcttagtgatctaaactggccccttcctcctctgcctggtgagttggcctaaacattcctcaagtctagcctcaggagacctgcgccggcgccccgacctccaccccctcagactccatcccccacccccaggagcctggctgtctctagcgaggggtggaggctgctattaagcatgacgctagagtctgacctggatcctgacctgtaaccagctgaagacggtggaggctttgtggcttgctgagggtgggggttgggagagggactggaaaccttcctcctcgggaaagaaatgcctgggaggaagggaagcctgatattcagggtcaaaacagcccttctaattcacaaccccaaagtcaggggtttctagaagttggtcaacagatctggtgagggaagtccccaggccagacgctggactcctgcaatgagggtggaggactcagcctggcctctgcctggcctgtttcaaagtctgggccactggcagccttctcttgctcaatccgaggtggaaaaagatcacctcccagtgacctccctcagcccccaggggagtaggtctgtgtcccgaagctatgtggcaggcttgtttgaaggacccagaggggcccagctgacctgtctcactgctcctggcagcccagccccatcggcaggtggcccctgcctggggggttattcgggacggttcagccagggcctcccaggaaagagtgctgtggagccacggtgacttgtccttggacagcaaggagcatgcttaccccagttgagcacttctttttgagggacttgatggggaggtggggtaggcagaagggacgtggcagaagcgggaagactttggtcaccatggctctgcaggccttctgcaaatcagtgctggcctgggctggaaacagcttctgtgtgtgaaggtgaggactctttggaagcaggccatcctggccagacaccctagcaggaaggggctcacctgtcacccttaggccagcctgagggcttggtggggacttttggagtcttggaggggaatagcggaaaaaaagctgagctccataggtgccccagccagcctccccagcttaaaggtgctcaagagccccaactgccccctctctctgtgcaggtggccagtgcccctccctgctctgggagcattgctagccttctaccccatccctggatccacaggggctatcgaggagacccagtgagaatgtagcattttgttcaatccccagggtagctgccctgagatctggagcagctctgcctctgggagagaggaagaagaaaggggccccattttttaaaaaactgtacagagcctttggctttatgtgtttatgttcttcacatgcatatgtgtgtatgtgtgtatatctttccccccatcaattggtacaatttttaataaaatcatttaaagcaaaaaaaaaaaaaaaaa

SEQ ID NO: 5516 - DNA, 686 bp, Homo sapiens
  SIMILAR (103)..(633): 331254mologous to Arabidopsis thaliana F17L21.20,accession number AC004557,Smith-Waterman Score=208.
gccagggctggccttggcttcagctgcggatttggggtcccggactctgggatcggcggcgctatgagttctttcgaggggcagatggccgagtatccaactatctccatagaccgcttcgatagggagaacctgagggcccgcgcctacttcctgtcccactgccacaaagatcacatgaaaggattaagagcccctaccttgaaaagaaggctggagtgcagcttgaaggtttatctatactgatcacctgtgactaaggaggtgttgttaacgagcccgaaatacagattttggaagaaacgaattatatctattgaaatcgagactcctacccagatatctttagtggatgaagcatcaggagagaaggaagagattgttgtgactctcttaccagctggtcactgtccgggatcagttatgtttttatttcagggcaataatggaactgtcctgtacacaggagacttcagattggcgcaaggagaagctgctagaatggagcttctgcactccgggggcagagtcaaagacatccaaagtgtatatttggatactacgttctgtgatccaagattttaccaaattccaagtcgggaggagtgtttaagtggagtcttagagctggtcccgaagctggatcactcggagcccgtaccatgttgtgtggctgaactgcaaag

SEQ ID NO: 5517 - DNA, 406 bp, Homo sapiens
aatatacacacacatacactaaattgatcctatgttttctttatagggacacatggaaggagaggtgtggggtttagctacacacccttatctgcccatctgtgctactgtaagcgatgataaaaccttaagaatatgggatctctcacctagtcattgtatgttggctgtccggaagctgaaaaagggtaagaggctctcacacttgaacgtagattaagctctcacagttttctaacctttacaaatataagaaagcaaaactaggcacattttaaaaaggctttaaatatgttgaaatatttattcaatgtctacttgctcatggtgccacatagagaaacgtaattgtactcagtcttggctttatgggacctcctatcatcatgcctaaagtgagcaaatt

SEQ ID NO: 5518 - DNA, 5748 bp, Homo sapiens
  SIMILAR (22)..(1608): 311254mologous to Homo sapiens cytoplasmic protein,accession number AF177377,Smith-Waterman Score=619.
atgcccctcaagctgcaaaactgccttgcattgcatcctgaacgagtgttggtagcaacaggacaagttgggaaagagccttatatttgtatttgggattcatacactgtgcagaccatatcagttttaaaggatgttcatacacatggtatagcttgcttggcgtttgacttagatggacagtgcagtgtgaaagcagtcatagacaatgcacgaaggaatgagtgtggctatattccagtaaaactttatttacaaaaacatagtttctctttgatttgtttgcctttttattccttcctggacttcttggacataaatcagcgcttggtttcagttggacttgattcaaagaatgcagtttgtgtttgggactggaaaaggggaaaaatgttgtctatggctcctggtcatacagatagattctggagtttatgtggaaatgctctgaccccaaaacgaggtgtctttggtaagacgggtgaccttcagacaatactgtgcctagcctgtgcaagggatgaattaacatattctggtgcactcaatggggatatatatgtttggaaaggaatcaatcttatacgaacaatacaaggagcccatgctgcaggaatttttagcatgaatgcttgtgaagaaggctttgctactggtggcagagatggttgtattcgtctttgggatttaacttttaaaccaattactgtgattgatctcagggaaacagaccagggatacaaaggtttgtctgtaaggagtgtgtgttggcgaggtgaccacattctagttggaacacaggacagtgaaatttttgaaattgtggtgcaagaaagaaataaaccttttctaattatgcaagggcattgtgaaggtgaactttgggcacttgctgtccatcctactaaacctttggctgtgactggaagtgatgatcgttcggtcaggatatggagcctagtagatcatgcattaatagcaaggtgtaatatggaagaaccaattcgttgtgcagctgtcaatgcagatggaatccatcttgcccttggaatgaaggatggctcattcactgtacttagagtaagagatatgacggaagttgtacatattaaagataggaaggaggcaattcatgagttaaaatattcaccagatggaacttaccttgctgttggatgcaatgacagctcggttgatatttatggagttgctcagcgttataaaaaagttggcgagtgtttgggatcccttagtttcatcactcatctggactggtcttcagacagtagatatttgcagacaaatgatggaaatgggaaaagacttttttatagaatgccaggaggaaaggaagtgacaagtacagaagaaataaaaggtgttcattgggcttcatggacatgtgtttcaggccttgaagtaaatggaatttggcccaagtattcagatatcaacgatataaattcagtagatggaaattatattggccaagttttagttacagctgatgactatggaattataaaattattccgatatccatgtttaagaaaagaaagtctggctgactctcatagtgatgaatcagattcagatctgtctgatgttccagaactggattctgaaattgaacaagagacacagctcacctaccgtcgacagtgttctgcaggctgtacaagcagggcaccagcatctgctcagcttctggtgaagcctcaagaagcttttactcatggcagaaggcaaagggggagcagttacagaggttatgactgtcgaagtaatctgttttatactcaaattggtgaaattgtgtaccatgtggcagcagtgggtgtcatttataatcgacagcaaaacacacagcgtttttatctgggtcatgatgatgatattctctgcctaactattcatcctttgaaagactacgtggcaacaggccaggttggtagagatccctcaattcatatatgggatacagagaccattaaaccattgtccatattaaagggccaccaccagtatggtgttagtgccgttgatttctcagcggatgggaaacgtttggcatcagttggcatagatgatagccatactgttgtgctctgggactggaagaaaggagagaaactttcaatagcaagaggaagtaaagataagatttttgttgtaaagatgaacccctatgtgcctgataaactaattacagctggaattaaacacatgaaattttggcgtaaagcagggggaggattgattggaagaaaaggctacataggcacactggggaaaaatgacacaatgatgtgtgcagtgtatggatggactgaagagatggctttttctggaacatccacaggagatgtgtgtatctggagagacatctttcttgtaaaaacagtgaaagcgcatgatgggccagtgttcagtatgcatgcattggaaaaagggtttgtaactggaggaaaagatggtatagtagctctttgggatgactcttttgaaagatgtctcaagacctatgctataaaaagagctgcattggccccaggatctaaaggtcttctcttggaagataatccatctatacgtgccatatcattaggacatggtcatattttagttggcacaaagaatggtgaaatactagaagtggataaaagtggcccaataacacttctggttcagggacacatggaaggagaggtgtggggtttagctacacacccttatctgcccatctgtgctactgtaagcgatgataaaaccttaagaatatgggatctctcacctagtcattgtatgttggctgtccggaagctgaaaaaggtgcaaaagggaaatgtggggttggagcccccatacagagtccctactggggcaccgcctagtggagttatgagaagagggcaaccatccttcagaccccagaatggtagaacaactgacagcttgcaccatgtgcctggaaaagccacaggcactgaatgccagcctgtgaaagcagccaggaagggggctatactctgcaaaaccacaggggcagagctgcccaagaccatgggaacccacctcttgcatcagtgtggcctggatctgaggtttgctggaggtccactccagaccttctttgcctgggtccctcccacacctcgaggtatcaccagtggaggctgcaaaacagtaaagagggtcactgaactgataccagtggaaacgcccctgtataaggtgtctagcaacccctgttggggtggtctcacccagtcaggaggtacaggatccaggacccacttaatgaagcactctgactaccccttggcagagggggtgcattacactgggggaaatcccacttgtcctgactgcccagattcctcagagctgggagctcagtcatctgaggcagcagacagccaaagtgatgacagccgtcccttcccccaggaacttggtagtcttcggcagtctgtagctaagtggccactgagaatctgtgcagctctatgcttgggactcaaggaactggtggcatgggctcacggaggggatctcctgatccaccagttgcacagatccatggaaaaagtgtggtttcccgggcaggatagcacaatcactcactgcctctcttggctgggagtaggagctccccttgtcctgtgcagctcccagaaagcagcaaccctagtactaagggagagtgaacaagttaaaggtgattcagacctgtttggaaatggtgtggctgccaccagaacattcagtgagcttgtggcgaaaaagcttgccagagggtgcagccctcagtggaacagtgagagtagtcacttggtgaaggagaagcttgccagaggcagcaggccagagctgaatggtgggaggtgttgctgtttttctcctgatggtaaagctttagccgtaggtctcaacgatggaagcttcttaatggcaaatgcggatactctagaggatcttgtgtcttttcatcacagaaaagatatgatttcagatattcgattttcacctggaatttggccagtaattggagaagttacagatgtaactgcttcttgcctcaccagtgacaaaatggttctagctaccggggacgatttgggatttgtgaagttatttagatatcctactaaagggaaatttggaaagtttaagaggtatgtggcccatagtacacatgtcacaaatgttcgctggacttatgatgacagcatgttggttaccctaggcggtacagatatgtctttaatggtgtggacaaatgagatggaaggctatcgagaaaaaaggccttgtgatagtgaagaatccgacattgattctgaagaagatgggggctatgacagtgatgttacaagggagaatgaaatcagttacaccatcagagccttatcaacaaatattcgcccaatgttaggaatcaagcctcatttacaacaaaaagaaccctcaattgatgaaaggcctccagtgagcagggccccaccacagccagagaaactccagacaaacaatgtaggcaagaaaaagagacctatagaggaccttgtgttggagctcatttttggttatcgaggcagagactgtaggaataatgttcactatttaaatgatggtgatgatataatttatcacactgcatctgttggaattctgcacaatgttgctacaggttctcagagtttttatcaggaacataatgatgatattctgtgcctcacagtaaaccagcaccccaaatttatcaacatagtggcaactggccaagtagctacagctccttctattcacatctgggatgcaatgaacaagcagactttatctatcctaagatgctaccattcaaagggagtatgttcagtcagcttcagtgctactggcaaactattgctgtctgtgggactagacccagaacatactattaccatttggagatggcaggaaggtgccaaaattgccagcagagctggtcacaatcaacgtatttttgtggcagaattccgaccagattcagatacccagtttgtctcagtgggagtaaaacatgtgaagttctggaccctggcaggaagagctcttcttagcaaaaaagggctactgagcacactggaagatgcccggatgcagaccatgctcgctattgcatttggtgcaaataacttgacgtttacaggtaccatcagtggtgatgtctgtgtgtggaaagatcacatattgtgtagaatcgtggcgagagctcacaacgggcctgtgtttgccatgtacaccaccctgcgagatggacttatcgtgactgggggaaaggaaaggccgtcaaaagaaggaggagcggttaaactgtgggatcaggaactgaggcggtgccgtgccttcaggcttgagacaggacaagccacagattgtgttcgttctgtgtgcagaggcaaaggcaagatccttgttgggacaaggaatgctgaaataatcgaagttggagagaaaaatgcagcttgtaatattttagttaacggtcatgtggatgggccaatctggggactagcaacacatccttccagggattttttcctttctgctgcagaagatgggacagtgagactttgggatattgctgataaaaagatgttaaacaaagtgaatttgggacatgctgctcgtactgtgtgttacagccctgaaggggacatggtggctattggaatgaaaaatggagaatttatcattttacta

SEQ ID NO: 5519 - DNA, 1084 bp, Homo sapiens
gcctccagaactgtaagaaaatgaatttctgttctttgtaaattacccagtctgaggtattttgttacagcagcacaaaaaaactaaaacacagagtgaccttttctataggatttgaacaaatggttctgaccatctgactgctcatcaacttctgaggttcctctgttctaatgattctactgaatcacagaatcattagaatgagtctatgaatagcctatgattgtattatccatcccattatcaagctcctaattaggtatggactatattcatctaaccacagaaatcgtcattacagacaaatgttcatttctctaacttttctagaataaatctcagcttttataatgatacccagatatcctaaattttaccatatgataaattccatttagaaactattttccccccataaagcaacattcttctgtataatactaatctttccttactttccacttaattttagtaatgttcagcacagaacctgatacacagtaaaggcactcaagtgactgctgaatctgagtaacagtaaactcaatcctcaaagatttaaaaatcatagtgtcagacaaaaatttaactttttatgacgatttcagtttttgaaatacacaactcttacaagcacaaacacagtatttacatttcaagttctttgtacaaaagatgtatgccattttggaagaatattgttgagatcatgatctaaaatacctgtcagagttactcatgggaatctgctcttcacaaatccattgtattatggacataaaatatgggctaggacgccaagggtttaaccatacataaaaatactaattctcgggctggggtgcactgggcttatggcctggtaatctcaggcactttggggagggcagagggcagggtgggatccacctgaggggtcaggggggtttcaggatagggcctggaccaattatgggtggggaacccccgttcttcttacttaaaatttaccaaaatttaggcaggggtgtgggtgggccttggcacccgttaggtcccagctactcaggaaggctgaggacagaactgcttggaacccggg

SEQ ID NO: 5520 - DNA, 435 bp, Homo sapiens
attccaaactaccttattcaaataattaagagaagcatttagcagggcatttcagagagcaagaagcgcccttaaaagaaggaggtggggggtttccttaaaatatgaagaaatgctaaagctgggttataaaatatggtgctgcatctaaatatttacattcaattatcatttaaccgaaaatacacaatacaatctaattctgcaaatttcaaaagatttattaaaaatgcaatagtgtatgaattatattcctttcttgtgtctctgtgagggcagattcgacttcatttatgttttactttttcaatttccttatgctaaaatacatgtaattctaaaggatatctcttaggtgttataaaaaccaaggaaggtcaccaccaagtcaaagttagagtcaaagatacttcaaagattccatgaaatgatctg

SEQ ID NO: 5521 - DNA, 623 bp, Homo sapiens
  misc_feature (1)...(623): n = a,t,c or g
tggctgcatgaagtcaaacagggtaacaccagtgaagctcaagtcaagagctgtggatattttgtctaaccaacaagaagtctcaagaaatcaggcagtgcagctgcctgctctcagctatcgtatccagccaaaagatgcatgatgatggagtggtgggggaaggccacttcagtatcctatttaaaagtaaacttcctgaataatggatatatgtggagatacagacatagatatatagatacagctgtaattatttagcctcaagtgactttctccattgcttcacgctatgccactattttgcttctttaatttttttaaccttgcttagtattctatagcttgcccaaccagttttacgtccaaggaaaattagccaatgcataaaatatacaaactatgaaaggcaaggatcaggaaaccagagacttttgccaccaaatctcagattattagaaactaggtgtcagggtttatcaagaaggccaggaaggccttttgggttaagccttacattcatgaagaacctcgagggtagatttttgagagcattccaaatggatggtctctggtcaaatgaatgaatgcacaaatgaataaatctgccctcactgaantac

SEQ ID NO: 5522 - DNA, 1834 bp, Homo sapiens
cagtcatttacatattgttttgagtctttctaaaacttatctgtatttttatactgtctcatatataggatcacaaattaagtttactatctgtatgtagagtgatcttttctttctttattccaaactaccttattcaaataattaagagaagcatttagcagggcatttcagagagcaagaagcgcccttaaaagaaggaggtggggggtttccttaaaatatgaagaaatgctaaagctgggttataaaatatggtgctgcatctaaatatttacattcaattatcatttaaccgaaaatacacaatacaatctaattctgcaaatttcaaaagatttattaaaaatgaaatagtgtatgaattatattcctttcttgtgtctctgtgagggcagattcgacttcatttggaatgatctcaaaaatctacccttgaggttcttcatgaatgtaaggcttaaaccaaatggtatgaattatattccttttccttttgtatctctgtgagggcagatttattcatttgaccattccattccatttgaccagagaccattccatttggaatgctctccaaaaatctacctccaagttcttccatgaatgtaaggccggctagtagctctaggtcaagtgtcattctccccatcaaagccatgttctggctttatatgtaagtttttcatagagtgagttctgacccacataatctcaatgcgcttgtgaagaatgggggaggccaaaaaagtcaaacctgttcacctcatcatatattcatgatcttgcatataactttttcacatctgattcattcagggtaaaagaaagtaaaagtaacccacccaagtctgaagttggtgttggtggcttggcatctaccacaaggcttttgaaatactacactaataagtacaatacatttatttttaaaaatctatttatttatcaaaacagtattgggacaagtaaattctccatattatcatcaaataataaaattgctactttctgtactcaattctttagaatcctagaaattgbcaaatgcattcaatttaacaatattgtaaataacaatacaaaagaaagaactctgcatatttatggggaacattgttgatgggtacagttctactggaaactcatacacatttcactatttaatttacatatgggtcttgttgaaaaaaaaccagtatgttttactttttcaatttccttatggctaaaatacatgtaattctaaagggatatctcttgggtgttataaaaaccagggagggtccaccaccaagtcaaagttagagtcaaagatacttcaaagattccatgaaatgatctgaaaacaaatttaaccaaaaaatgtgtactgtattggggcacatccatggccacccaaactgtattctatctctgactgtggcatcaaagaaaggtatatggaattataattgaccttcatgatattgctccaaagtggattgactaacactttcccctcttgacccaacatcccaagttttccttaataatgcaaacatcagtcatttacatattgttttgagtctttctaaaacttatctgtatttttatactgtctcatatataggatcacaaattaagtttactatctgtatgtagagtgatcttttctttctttattccaaactaccttattcaaataattaagagaagcatttagcagggcatttcagagagcaagaagcgcccttaaaagaaggaggtggggggtttccttaaaatatgaagaaatgctaaagctgggttataaaatatggtgctgcatctaaatatttacattcaattatca

SEQ ID NO: 5523 - DNA, 573 bp, Homo sapiens
tggtaacttttttcatttcacgtgtcaggcacaatggcccacacctgtaatcccagcactttgacaggctgagggaggatcacttgaggcctggagttcaagaccagcctaggcaacacagtgagatcccatcgctataggaaaaaaaaaatagcctaggcatcctgggccacatacctgtaagcccctagttaccttgggaggctgaggccaagaggatagcttgaagcccccaggagttggagtcaaacaagtgaccctacgaattaatgcccattgaaactcctagcctggggtaaaaccctgtctccaaaaaattttccctttgtttcattctaacaatacagtgggggaaaggaagcctactgttacccatgaatacttaaaaactgattttgaaattaaaaataactacttccactttgaaacacattatttaatcccatgaacctcagtttccatatctgtaaatgggatgatatttacctatatagattgttcattaattcaaaaacatttgaacctggtcctacttggtagggacttatctcataactaaaaagtcatacaagg

SEQ ID NO: 5524 - DNA, 538 bp, Homo sapiens
  SIMILAR (438)..(235): 611254mologous to Homo sapiens Human secreted protein, SEQ ID NO: 8153,accession number AAG04072,Smith-Waterman Score=192.
  misc_feature (1)...(538): n = a,t,c or g
cccagttttggagagtttttttnttttttaaagaatttgttcattttatgcaaaatctaaaaacaactttaatgaggcatacttaatatataaaactgcacatatgtaataaaagtgtacaatttgattagacatatgtatacacctatcactgcaataaagatcatttcaactagatttaaaatttattggtattcactaatattctcttaaatatgtatacatatttttgagacacggtctctcactccaattgcccaggctggagtgtggtgccatgaccacagctcactgcagcctctacctcctgggctcaggtaatcctcctaccttagcctctccagtagctgggactacaggcacacaccaccatgctcagctaatttgtgtgtgtgtgtgtgtagagacaggagggtttcaccatgttatccaggctggctcttaaatattttaaatgtctgcataatctgaagtaacttacctgttttcctttctgatattggctattcctctctcctgccctttctccttccttccc

SEQ ID NO: 5525 - DNA, 1345 bp, Homo sapiens
  SIMILAR (532)..(645): 251254mologous to Homo sapiens PRO2852,accession number AF130079,Smith-Waterman Score=42.
ttttttgagatggagtctcactctgtaacccaggctggagtgcagtggcctgatcttggctcactgcagcctctgcctcccgggttcaagtgattcttctgcctcagcttcccgagtagctgggattataggcacacaccaccacatccagcttatttttgtatttttagtagaaacggggtttcaccatgttggccgggctggcctcgaactcctgaccccaggtgatccacctaccttggcctcccaaagtgctgggattacaggcgtgagccaccgcgcctggccaagatagaacttttataattttattccagttgaactaaactaaggaaccacccattagcccagttcttaggagaggtacttcaaacttgaaagaatatgtatttcggtaacttatatgtgggctaaccatcaaatacataggtcatctaaggctaaaactttctgtatttatacagttaaaacttattaaacccaaaaatttttaatgggggtaatttttaaatatattttagggaatttacagtttgtatctgtttcttagtaggtgtggcctttaaaatatgtgcttattcattgttaaattccagaataatagagtaatacttaatactgtacattcccacttacgtatattttattaaaatttataagcaagaaattatacataagtggtcatgatcttagggagacaaagaatttctcttagaaaagagaagtaatggtaatgtaaataaaaatactgtttatattcacatgattttaaggaaaactgtaaaaggcaaagattttgtaggtaatgacacaaatgtaacaaataggatgttttcttaaaattgggcagtcagtataattatgtttctgcctatggtggttggggggaggttgtatcagtctgattcttagtttttttttttcatctgttaagtagaacgtactattacttaccttaaagagtggctttgagaattttgtaaggaacaacatgtttttttggttctggaatataggaggtgctcaataaaagttgactctgactggcaaataatattgttttgtaaatgcatgatgattatttttgaccatatttgacttaagtttcattaggctaatgttaattggtactatatgaaagtgagtcaactaattataaaagattagaaatgtcttaggtgacgatgggggaaaaacttaaaatttttgcataaattatggagagatgatagagttattacagtgttattaagtattcctatgttgcattttgcaaatacttaatttaatacagatgaaaataatcttgagtcacaataaagtaatgatatgttaagtttcaaaa

SEQ ID NO: 5526 - DNA, 1020 bp, Homo sapiens
  SIMILAR (9)..(290): 871254mologous to Homo sapiens nucleosomal binding protein 1,accession number AF250329,Smith-Waterman Score=417.
acaaagatgaaaaaggggaagaagatggaaaagaggataaaaatggaaatgagaaaggagaagatgcaaaagagaatgatgatggaaaagagaagggagataaaaaagaggggaaagatgtaaaagtcaaagaagatgaaaaagagagagaagatggaaaagaagatgaaggtggaaatgaggaagaagctggaaaagagaaagaagatttaaaagaagaggaagaaggaaaagaggaagatgagatcaaagaagatgatggaaaaaaagaggagccacagagtattgtttaaaactgccctatgtagtttcataatttggtaacatgtaccttcatgttgtaaagttaatagagataaatatttttatcaaaaattttataaacacagcctttctttagcattgatttaatttcagaacatcttcatattggattattagccataaagtttctaacatgaaacatttatctataaattttgtgattatagtagtggaatacatagaaaaaaatatgctttcaactttgtgagtgaatttcgtgttgtgtaagttatatgtcaaaatctttgaattttaattttactcttttatacatgtgataatttcataaagggagggatcccaaaaaaagagtttcatccaacattcttgttctgcaggttgcttttataaagaaggtgaactattttcatgtaatgttaagagttaaacttatctttcccaaatataactttattattagcttgggaaaaaagaaattgtattcccatttttaaaataaatacaaatgtttatttcagaagggcagttttgattatatgtgaatacacaaattttactggatttatcttaataaaaagactctgacgatgattgtgttttgttatatcttcaaaaatatagctagcgaaatattgtgcttaatttttttctattgggctattcatgaaaatatttaatattcactgacataaaattaatataaagtaaaaatcaccattttaattataataaaaa

SEQ ID NO: 5527 - DNA, 381 bp, Homo sapiens
  SIMILAR (85)..(243): 671254mologous to Homo sapiens NADH:ubiquinone oxidoreductase PGIV subunit,accession number AF044953,Smith-Waterman Score=168.
gcactcggcggtcgaaaggggagttcaaggagacgggggcgacgcggctgagggcttctcgtcggggtcggggctgcagccgtcatgccggggatagtggagctgcccactctagaggagctgaaagtagatgaggtgaacattagttctgctgcgcttaaagatgcctgccatgactatggagatgaatgggacaagccaaacgtggacattatgctatagtgattggaacagttacatccgagcatgggacaaggagctttgtaaccttttggcattggtgctgtcctggtctttagggataggagaccatacgtgtgatcaactgtctctcaattagcgacttcatgtgtataatgtggcatgaatcactatcctacc

SEQ ID NO: 5528 - DNA, 2012 bp, Homo sapiens
  SIMILAR (10)..(198): 711254mologous to Drosophila melanogaster CG12054 gene product,accession number AE003777,Smith-Waterman Score=259.
  misc_feature (1)...(2012): n = a,t,c or g
atggatggagggacagagaagccttttgcctgcccagttctgtgatgtacaaagagatacaagaatgtgaatggcataaagtatcacgctaagaatggtcacagaacacagattcgtgtccgcaaaccattcaagtgtcgctgtgggaagagttacaagacagctcagggcctgcggcaccacacaatcaatttccatcccccggtgtcggctgagattatcaggaagatgcagcaataacatgcttgttattacttgtgccaagaaatcctcaccagcagttgctgattttgaaaacagccaccttttttcaggggaagcattcagcaaccctttaaagaaaaagaattaaatgcatgctttaaattttttctgtaattttggaatgatgtatctttgtagagttaatgattttgtacatttgcacatgtaatcatcatacccattttcattactttgatataaggtgctaaacaaaaaaagctataggttcttcagcacatttcccccaaaacaaaataaaattgagggcatgttgcatattgttgaattgtattgcggtggtatcaacctggggggaggaggggctggcactgagatttttttttcaagattgtaatgtgattgaagttttcaacacatcaactcacatatgttcaaaaccaaaataataccttcattatcaaactggttaccatgccttacataatggagttagtatttgtgagtagaaagactttaggtaatggaaatataaataagaaagaatgtttaacataatatgctaaaaatattttcatatttaaataacatacgtaaaggtgtgctttctgtgttttatattatcttgcaaatccttttgccctttaaaaagctgaaaatcttgccatctgacttactagtcattttagtgttataaatggcattttgtacaaaatagtctattcagttcgttcattcatttaacacacattgattgagtgcctgctgggtacaagggattcaatttatgcctattgatatctgcggaccaagatacccatttagtgaaatacttttttccctgaaatctgttagaaaagactttgaaatacttcagtgcaaagtgtgtgtgtgtgaagtttagttatatcttcatcttcagatgaagttttaaagcactttgtagttctctattgccaacaatttaatgtttatgtgttgccaattcttgcaaccactgccctaccaaacctgtgggttgcaaatcagaactaaaattctaagcacgtttcaaagatgaacacttttgttaaggacccctattgcctcttcttcatggctncatttttttaactttttttaaaaggtacttttctcatcacattgtagagaggtctgcattcatcattggaaatgtctgtttagctttataaaacaaacactttgctgaaataggaaaatgagccttattgacaattaagtgcttcttgcagcaggtggtcaaagaaaagcatgactaatacgacctattagagtaatctacatctggggccattccttaagtttttcctcaccgacagtaccatcatgccttgagtgttcttttctcccaagtgctattccttaaacacgagagtttaccagttgcctaatagtgcaatagaaaaatgctttgaggataggctaactgcccataaaaacaaacttcaaattgcttataaaggtttcttcccctgttcccctttgatggaaaggtcttacatcacatataactgggaagcaggggtccctcctcaattttcagacattttgaaaggatgacagttcttgttggtagaatgagtaaacctctatattcataagttctaaaatccttcattatgagggattcaaagtatttataaaaacactgccctctaaaaatttcctcaggatctgaagtatggtcttggtcctgaatatacagtgttatcctatgtttaaaagggtgatccagacatgagacggcaactagttggtgcataagaggg

SEQ ID NO: 5529 - DNA, 688 bp, Homo sapiens
  SIMILAR (268)..(564): 571254mologous to Homo sapiens Human myelin oligodendrocyte glycoprotein gene,accession number AAZ29204,Smith-Waterman Score= 255.
  misc_feature (1)...(688): n = a,t,c or g
aatgcgccggtacnagggngcgtcccattcgccatttcaggctgcgcaactgttggaagggcgatcggggcgggccttttcgcttattacgccagctggcgaaagggggatgtgctgcaaggcgantaagttgggtaacgccagggtttttccagtcacgacgttgtaaaacgacggccagtgaattggatttaggtgacactatagaagagctatgacgtcgcatgcacgcgtacgtaagcttggatcctttagagcggccgccctttttttttttttttttgttttttttttttttttttttttttttgagacggagtttcgcccttgttgcccaggctggagtgcactggcgtgatctcggctcaccgcaacctccacctcccaggtttaagtgattctcctgcctcagcctcccaagtagctggaattacaggcatgcgccaccacgcccggctaattttgtgtttttagtagagactggtctccaactcccaacctcaggtgatctgcccgcctcggcctcccaaagtgttgggattacaggcgtgagccattgcgcctggccaggaaactggcttttaaaggaaactcgttgtggttcttctgtagggaggcagataacaggccccattaccccggacgcgtgggtcgacccgggaattccggaccggtacctgcaggcgtt

SEQ ID NO: 5530 - DNA, 4665 bp, Homo sapiens
  SIMILAR (586)..(2): 1001254mologous to Homo sapiens dJ747H23.2 (novel protein),accession number AL049699,Smith-Waterman Score=1072.
  misc_feature (1)...(4665): n = a,t,c or g
ttttgtgcttcttgagaaattctaagaattggcccagattcatgtgatagtcattccttaatccatagtcaccatgagcctcaaggagtaactcttcaaaagaatggaaaaggcgcaggtcctcaccatttccttctgtctccacgctttcagcatgcttacaggaaatgtgcttccaattggggtacctaattgtgtgccagaactcctcacagtgctctttgaaaccctccacacagattataccaggctttcctgtcatgcaaaatccagtcacatctaaccttttcccaacatccaaaatctttttccttaggtcctgctgatatatatggtgactgtagatccacattcggaggaatgtgttcttgactggctttgcttgtgtagatggttcatatacaagctttctgttcaggaaataagatgcactgttgtcctgtagccactggattgctgcacatacacagagctcacctggatcaaaagtccctatgtaagaagtgagacctttgttgagaagtagctgctgatgtctgtcaagttcagatgaccgtccaaacagctgcaatgctacataggggtagcatattatgggcactttggaaaacaaatagaggggatcctctagagtcgacctgcaggcatgcaagcttggcactggccgtcgttttacaacgtcgtgactgggaaaaccctggcgtacccaacttaatcgccttgcagcacatccccctttcgccagctggcgtaataacgaagaggcccgcaccgatcgcccttcccaacagttgcgcagcctgaatggcaaatggcgcctgatgcggtattttctccttacgcatctgtgcgaaacgctggtgaaagtaaaagatgctgaagatcagttgggtgcacgagtgggttacatcgaactggatctcaacagcggtaagatccttgagagttttcgccccgaagaacgttttccaatgatgagcacttttaaaggtctgctatgtggcgcggtattatcccgtattgacgccgggcaagagcaactcggtcgccgcatacactattctcagaatgacttgggtgagtactcaccagtcacagaaaagcatcttacggatggcatgacagtaagagaattatgcagtgctgccataaccatgagtgataacactgcggccaacttacttctgacaacgatcggaggacccaacgagctaaccgcttttttgcacaacatgggggatcatgtaactcgccttgatcgttcggaacccgagctgaatgaagccataccaaacgacgagcgtgacacccgatgcctgggacaatggcaacaacgttcgcaaactattaactggccaactactactctagctcccggcaccattaataactggatggaagcggataaagtctcacatccaggtcatgctgatataagaggtgggttcacagtcttgggcagctctgcccttgtggctttgcaagaaatacaaaaaactgtcagagactattatgaacacttctatgcatgcgagctagacaacatagtagaaatggaaaaattcctggaaacatacaaccacacaagattgaaccgagaagagattgaatccctgaacagaccaataacaagttccaaaattgaatcattaataaaaaccctacaaactagaaataacccaggaccagatgaatttacagccaaattctaccagatgtataaggaagagctgggcaatgaacagcatttatcaattctctcttccaaagagaaagaagagctaaaccatggcaaatctccaaatacaacctcctcaggagtaggaggagcagaaggagaaggagaagaagaagaagaagaagaagaagaagaagaagaagaagaagaagaagaggaagaagaggaagaagaagaagaagaagaagaagaagaagaagaagaagaagaagaagaagaaagaagaaagaagaaagaagaaagaagaaagaagaagaaagaagaagaaagaagaagaaagaagaagaaaagaagaagaaaattagccgggtctgtgggtcagacctcagcaggtggtgcctcgtgtgaggaacgctgcagcggcctggtgattgtgacgtatcccttgacatcgaaggtgaaaagggctgtgcagtcatcttcacaaccggcagaccaggagactccctctggtgcctatgctaccagggccctgggtttcaagcacaaaactgggcagccttttggggaagccactgagctagctgcagaaggatcacaactccttgcagcaagggaacaaaactggatgaacaatgagtttgatgaattggaagaagtaggcttcagaagaataaccagtttagagaagaacataaatgacccgatggaattgaaaaacatagcacgagaactttgtgaagcatacacaagtatcaatagccgaattgataaagtggaagaaaggatatcagagattgaagatcaacttaatgaaataaagtggaaagacaagattagagaaaaaagaatgaaaaggaacaatgaaagcctccaagaaatatgggactatgtgaaaagaccaaacctacatttgattggtgtacctgaaagtgacaggaagaatggaaccaagttggaaaacacacttcaggatattgtccggaagaacttccccaacctagcaagacaggccaacattcaaattcagaaaatacagagaacaccacaaaaatactccttgagaagagcaaccccaagacacataatcatcagattcaccaaggttgaaatgaaggaaaaaatattaagggaagccagagagaaagtattggatgttctggccagggcattcaggcaacagaaagaaataaagagtattcacataggaagagaggaagtcaaattgtctgtgtttgcagatgacatgattgtatatttagaaaacctcattgtctcagttcaaaatctccttaagctgataagcaactttagcaaactctcaggatacaaagccaatgtgcaaaaatcacaagcattcctatacactggtcatatacaaacagagagccaaatcatgagtgaactgccattcacaattgctacaaagagaatacctaggaatccaacttacaagggatgtgaaggacctcttcaaggagaactacaaaccactgctcaaggaaataaaagaggatatgaacaaatggaagaacattccatgctcatgagtaggaagcatcaatatcgtgaaaatggccatactggctcaaggaggaaagtagcaaactactgcatcatcaggaaacaagctagcacagtaacctggggaattaagcctcaggtttacgcactttgccctaccgagcagagcagggaaaggaatgaggtatgcagacaagtggaaggtgaacaagatgaaaagaagctttattcagcattacaacagatcagaggagacccgcagtgggtagctcctctctgccagcaggtcatctctgcagctctcagcagagaagggcttttacggacctcagaggggaggatgtgcttgctgattggtccatgggtggctatgggtggcccagaagaggcccacgaatccccactctggtcggcagaggagctcactctatggccaccaccaccacagacccacacagagtattgccagcctatcaccaatgttccccatgcatctagagggcccaattcacccgtatagtgagtctgtattacaattcactggccgtcgttttacaacggtcgtgacgtgggaaaaccctgggcgttacccaacttaatcgcctttgcagcacatccccctttcgccagctggcgtaaatagcgaaggaggcccggtaccgatccgccctttccccaacagtttgcgcagcttgaattggcgaatggcaaaattgtaagcggttaatatttttgttaaaaattcgcgttaaaatttttggttaaaatccagctcatttttttaaccaataaggccgaaaatcggccaaaatccccttataaatcaaaagaatagaccgagataggggtttgagtgttgttcccagtttggaacaaagagtccacttattaagaaacgtggacttccaacgtcaaagggcgaaaaagccgtcttatcagggcgatggcccactaacgngaaaccatcacccctaattcaagtttttttgggggtcgaggtgccgtaaagccactaaatcgggaaccctaaagggagcccccgatttagagcttgacggggaaagccgagcgaacgtggcgagaaaggaagggaagaaagcgaaaggagcgggcggctagggcgctggcaagtgtagcggtcacgctgcgcagtaaccaccacacccgccgcgcttaatgcgccgctacagggcgctgtcccattcgccattcaggctgcgcagcttgttgggaagggcgatcggtgcgggcctcttcgctattacgcccagctggcgaaagggggatgtgctgcaaggcgattaagttgggtaacgccagggttttcccagtcacgacgttgtaaaacgacggccagtgaattgaatttaggtgacacttatagaagagctatgacgttgcatgcacgcgtacgtaagcttggatcctctagagcggccgcctactactactatgactgcgag

SEQ ID NO: 5531 - DNA, 396 bp, Homo sapiens
  SIMILAR (3)..(329): 971254mologous to Homo sapiens leukocyte antigen F,accession number X17093,Smith-Waterman Score=543.
  misc_feature (1)...(396): n = a,t,c or g
cggacgcgtgggaacagacccaggacacagagcttgtggagaccaggcctgcaggggatggaaccttccagaagtgggccgctgtggtggtgccttctggagaggaacagagatacacatgccatgtgcagcacgaggggctgccccagcccctcatcctgagatgggagcagtctccccagcccaccatccccatcgtgggcatcgttgctggccttgttgtccttggagctgtggtcactggagctgtggtcgctgctgtgatgtggaggaagaagagctcagatagaaacagagggagctactctcaggctgcagtgtgagacagcttccttgtgtgggactgagaagcaagatatcaatgtagcagaattgcacttgtgcctcacgaacatn

SEQ ID NO: 5532 - DNA, 178 bp, Homo sapiens
  SIMILAR (3)..(170): 1001254mologous to Homo sapiens MHC HLA-A24 cell surface glycoprotein,accession number M12758,Smith-Waterman Score=296.
ctgtggtggtaccttctggagaggagcagagatacacctgccatgtgcagcatgagggtctgcccaagcccctcaccctgagatgggatagaaaaggagggagctactctcaggctgcaagcagtgacagtgcccagggctctgatgtgtctctcacagcttgtaaagtgtgagacag

SEQ ID NO: 5533 - DNA, 1565 bp, Homo sapiens
  SIMILAR (855)..(1043): 711254mologous to Homo sapiens HLA-A9HH antigen,accession number D83516,Smith-Waterman Score=193.
atggccgtcatggcgccccgaaccctcgtcctgctactctcgggggccctggccctgacccagacctgggcaggctcccaatccatgaggtatttctccacatccgtgtcccggcccggccgcggggagccccgcttcatcgccgtgggctacgtggacgacacgcagttcgtgcggttcgacagcgacgccgcgagccagaggatggagccgcgggcgccgtggatagagcaggaggggccggagtattgggacggggagacacggaaagtgaaggcccactcacagactgaccgagagaacctgcggatcgcgctccgctactacaaccagagcgaggccggttctcacaccctccagatgatgtttggctgcgacgtggggtcggacgggcgcttcctccgcgggtaccaccagtacgcctacgacggcaaggattacatcgccctgaaagaggacctgcgctcttggaccgcggcggacatggcggctcagatcaccaagcgcaagtgggaggcggcccatgtggcggagcagcagagagcctacctggagggcacgtgcgtggacgggctccgcagatacctggagaacgggaaggagacgctgcagcgcacggacccccccaagacacatatgacccaccaccccatctctgaccatgaggccactctgagatgctgggccctgggcttctacccctgcggagatcacacctgaccctggcagcgggatggggaggaccagacccaggacacggagcttgtggagaccaggcctgcaggggatggaaccttccagaagtgggcagctgtggtggtaccttctggagaggagtcagagatacacctgcccatgtgcagcaatgaagggtcttgcccaagcccctcaccctgaagatgggagccatcttccccagcccaccgatccccatcgttgggcatcatttgctgggcctggttctccttggagctgtgatcactggagctgtggtcgctgctgtgatgtggaggaggaacagctcagatagaaaaggagggagcttacttttcaggctgcaagcagttgaacagtgcccaggggcttctggatgtgtctcttcacagcttggtaaagtgttgagacagctgccttgtgtggggactgagaggcaagagtttgttccctgccctttcccttttgtgactttgaaggaaccctgacttttgtttcttgcaaagggcacctgcatgtgtcctgtgttcatggtaggcataatgttaaggaggttggggagaccacccaacccccatgtccaccatgaccctctttccccggttgagccgtggctccctctccaatcatctttcctgttccagagaggtggggctgaggtgtctccatctctgtctcaacttcatggtgcactggagctgtaaattctttccttccctattaaaatttagaacctgagtataaatttactttctcaaattcttgccatgagaggttgatgagttaattaaaggagaagattcctaaaatttgagagacaaaataaatggaacacatgagaaccttccaga

SEQ ID NO: 5534 - DNA, 341 bp, Homo sapiens
  SIMILAR (1)..(249): 771254mologous to Homo sapiens Similar to zinc finger protein 137 (clone pHZ-30),accession number BC000918,Smith-Waterman Score= 302.
  misc_feature (1)...(341): n = a,t,c or g
caggagagaaacctcacaagtgtggtgattgtggtaaagcctttaattcaccttcacaccttattaggcatcagagaatccatactggacagaaatcttacaaatgtcatcagtgtggcaaggtctttagtctgaggtcactccttgcagaacatcagaaaattccttttggagacaattgtttcaagtgcaatgagtatagcaaaccatcaagcattaattgacatcagagtcaaatcagcattgacctgagtttgagttgacttaacattgatttcaagcattaatcgacattaaactgtttatgttaagaggaatgngccaggcgtggtgtctcacac

SEQ ID NO: 5535 - DNA, 396 bp, Homo sapiens
  SIMILAR (2)..(73): 831254mologous to Homo sapiens Similar to zinc finger protein 137 (clone pHZ-30),accession number BC000918,Smith-Waterman Score= 95.
  misc_feature (1)...(396): n = a,t,c or g
cgttcacaagtcattaggcatcagagaatccctactggacagaaatcttacaaatgtcataagtgtgacaaggtttcagtctgaggtcactccttgcagaacatcagaaaattcatttttgagataattgatgcacaggcaatgagtatagcaaaccatcaagcattaattgtcattagagtcaattcagcattgacttgagtttgagttgatttaacattgagttcaagcattaattgatgttaaagtgtttatgttaagaggatnnnnnnnnnnnnnnnnnnnnnnnnnnnnnnnnnnnnnnnnnnnnnnnnnnnnnnnnnnnnnnnnnnnnnnnnnnnnnnnnnnnnnnnnnnnnnnnnnnnnnnncgtgtgccacttttcccagccagtttt

SEQ ID NO: 5536 - DNA, 559 bp, Homo sapiens
  SIMILAR (57)..(128): 581254mologous to Homo sapiens Similar to zinc finger protein 137 (clone pHZ-30),accession number BC000918,Smith-Waterman Score= 65.
tacaaatgtcatgattgtggcaaggtcttcagtctagcttcatcttatgcaaaacaggagacttcatacaggagacaaacttcacaagtatgatgattgtgagcaaagcctttacttcacattcacacctcattagacatcagagaatccatactggacagaaatcttacaaatgtcatcagtgtggcaaggtcttcagtctgagatcactccttgcagaatatcagaaaatttatttttgagataatagttccgaatgcaatgagtatagcaaaccatcaagcattaattgacactagagtcagttcagcattgacttgagtttgagttgacttaacattgagttcaagcattaattgacattaaagtgtttatgttaagaagattgggccaggcggggtggctcacgcctgtaatcccagcactttgggaggccaagaccaatagatcacttgaggtcaggagtttgagaccagactggccaacagacatgagtcacttttcccaccctgtattttgtttctttaataaaaactgttccgggttaaaaaaaaaaaaa

SEQ ID NO: 5537 - DNA, 405 bp, Homo sapiens
  SIMILAR (2)..(256): 801254mologous to Mus musculus putative,accession number AK019063,Smith-Waterman Score=339.
ggacacatcgaaaggaatcgcagatgtccccgagtggttcaaaggcagtcggctcaactatgcagaaaacctcctgcggcacaaagagaatgacagagttgccctttacattgcaagggaaggcaaagaggaaattgtgaaggtgacttttgaagagctgaggcaagaagtggctttgtttgcagcagcaatgaggaaaatgggtatgtacaattcagttcagcgtatgaacttgtatctctaatctgatgtccatttttatattttttgaaactgagcacaatgaaatcctttcttgaatcattttccttttggattataaaaatatgggggaaagtgctatgatgaattttatgcaataaatgtatacatgtgtgcacatgcacccatgctgaaaaaaaaaaa

SEQ ID NO: 5538 - DNA, 380 bp, Homo sapiens
  SIMILAR (73)..(264): 871254mologous to Homo sapiens gamma-sarcoglycan,accession number U34976,Smith-Waterman Score=297.
aaacattctgtctgtggtagagctcgggccagctgtagttcattcgccagtgtgcttttcttaatatctaagatggtgcgtgagcagtacactacagccacagaaggcatctgcatagagaggccagagaatcagtatgtctacaaaattggcatttatggctggagaaagcgctgtctctacttggttggtcttcttttactcatgatcctcgttgtgaatataactcttacaatatggattcttaatgtgacgtgggtttcttcaaccagtactgcccctcatagggtgtaacactagaattcactgtgcgcggagacgcagttgcaactgcgattgccgaagcgtggcaggcatgtcaattttgaggtgccttatcg

SEQ ID NO: 5539 - DNA, 2229 bp, Homo sapiens
  SIMILAR (345)..(1076): 851254mologous to Mus musculus putative,accession number AK019063,Smith-Waterman Score=1124.
agccttcccatgtgatgggtctgtctaggcagtgctgcctaggtatgtatcacaggcaaagcttccattttctgcgatcctgagtcttgaatttcagcatgaccacaggaggtcatttacttagcggatcctctggcaggaaggctcggctaaaacgtcaatcaccagatgtggggggttcattctaatttccatatcacctctcccactgctccctgaagagaagccccacctgtctgggatgttgcagtgtttgtctgggagagtagatatttgtcctcttggcaccttctcctttgttgctcactaatttaacacaatttgtcttgggcttctaaattttgagtctccctttgccattgcttgcaggaggcaccgacatcatctcctgcttcatgggccacaatttttctcttcctgtgtataaaggggagattcaggcccggaacctgggcatggccgtggaagcgtggaacgaggaatgaaaggcgggctggggagagagcggcgagctggcgtgtactaagccgatcccttgccagcccacacacttctggaacgatgagaacggcaacaagtacaggaaggcgtatttctccaaattcccaagtatctgggctcatggcgactactgaagaatcaaccccaagaccgggggcatcgtcatgcttggccggagtgacggcaccctcaaccccaacggggtgcggttcggcagctcggaaatctataacattgtggaatccttccaggaggtggaggacagcctgtgtgtcccccagtataacaagtacagggaggagagggtgatcctcttcctgaagatggcctccgggcacgccttccagcctgacttggttaagaggatccgtgacgccatccgcatgggcttgtctgcgcgacacgtgcccagcctcatcctggaaaccaagggcatcccgtatacgctcaacggcaagaaagtggaagttgccgtcaaacagatcatcgctggaaaagccgtggagcaaggaggtgctttctcgaaccccgagaccctggatctgtaccgggacatccctgagctgcagggcttctgagtcagactggctggcgtgtcactcagccgcacccgtgtgcactgtaacttttgtgtgctcaagaaattatgacagaaaccttacagctgttgtaaaaggatgctcgcaccaagtgttctgtaggcttggggagggatcgttttctctgttttgtttaaatctggtgggtacctgggtttttccacacgagttgggattctgggcctttcagagaccagggagggagtgtctgggccgcaggtgttggcactgtggtgagagtgtgtgtctttgcacacacagtgcagcgggaacggtggggctggctggtgctgaagacagacacactcctgagccaaggtcttgtcttcaacctccccgtcccgttgtcccattttgctctgtgaaggtgcaaatccctttcttcccttcccatctcaggctctcctgttttccctcagggtccagtatgcctttgagctttagctgttagaaaggaacccccgtgacttgacacagctttcacagctggctgctaggaccggcgggctgggtgttcaccgtgtgctgtgtcatggatggcaatgcaggccctgggaggactgtgcgtcacccgtcaaccagagcgtgcctccgggccagcttccctccaaggaatggagtggatttcatacaggatctctttattgcacagactgaatggcttttacatgtttctaatgtgaattaggccatgtgaaagccagtgggtgtcccacccgtgtccctcatgggtgagccctcccagctgtgaagccccaggcagtgtggtcaccgaagtgaggacccctccctcaccccggaacccgcatcccctgtgctgccctcccacctgagagttgcctagggggttccttgtcgagatcatgtcatcagcacccctaagtcaagtccacgggtttcccatagcccaggcaagttggtatgtacaattcagttcagcgtatgaacttgtatctctaatctgatgtcccatttttatattttttgaaactgagcccaatgaaatcctttcttgaatcattttccttttggattataaaaaatatggggggaaagtgctatgatgaattttatgccaataaatgtatacatgtgtgcacatgcacccatgctgtggaaaaaaaaaaag

SEQ ID NO: 5540 - DNA, 1050 bp, Homo sapiens; identical to SEQ ID NO: 1658
  SIMILAR (514)..(1047): 1001254mologous to Homo sapiens hexokinase IR,accession number AF016365,Smith-Waterman Score=887.

SEQ ID NO: 5541 - DNA, 916 bp, Homo sapiens
  SIMILAR (1)..(84): 751254mologous to Homo sapiens Human secreted protein sequence encoded by gene 112 SEQ ID NO:282,accession number AAB56188,Smith-Waterman Score=99.
tttttttttgagacggagtttcactcttgttgcccaggctggagtgcagtggcgtgatctcggctcactgcaacctccgcctctcaggttcaggtgattctcctgcctcagcctcccaagtagctgggactacaggtgcctgccaccactcctggctaattttttgcattttcagcagagacgaagtttcaccatattggccaggctgctggtctcgaactcctgacctcgtgatctgcccgcctcggcctcccaaagtgccgggattacaggcatgagccaccacgcctgtccggttatttgatttttataagaaaattttactattattttcagataaaatttatgtcactgtcattcattacattttaatttttgaaactgatgtctttcccagaatttatgtactctataacggtgtgaatgattaccagtattaagccattttctcatctgatatattgagctatgttttatgtaagtattgcttattcaagtagttttaaaagatatgtaattggttgttgtttcatgtcctacacagtaagaacaagagtatgttaacctttttgtcaggatatttgctatttcatatctttgaaatagagtagtagctctatttctaactaaattctatttatgtaacaacacagctaatttactcttggatctcattctccctttttatcctgagttaccatcagtgctaatgttcctcttttgggtatagttctccaggagaacttgtcctatatttctttgtgtgtgtttttttccttccagcttaaacaaattaaaactaaatatctaaaccttgtatacagacattaaaattagtgagagaaacaaaatatccttgtgtcttggcttttactttttgaagtcattaacaaataataaattaatgaataaaaaa

SEQ ID NO: 5542 - DNA, 351 bp, Homo sapiens
aaagctttcaagctctttgatgatgatgaaactgggaagatttcaggatttcttctttagtatctttctcagacattttctgggtcatcacagttaaaaagtcaccaaagttcatttttgttttcatctgattcaacagaattcctaataacttctttactacttattattgatggaaacttgggcaagtcacaacctgcacaagtttcagtctcataatctataaaagaaaaacaatgatgacaacacaataagagcgtgaactcacaggggctcaatgtccactaactcatgcactgcttggagcacgttggagaggtctaagcctattttcttcagcctaatggattc

SEQ ID NO: 5543 - DNA, 674 bp, Homo sapiens
  SIMILAR (157)..(255): 751254mologous to Homo sapiens PRO2550,accession number AF130089,Smith-Waterman Score=114.
tttttttgagatagagtctggctgtcaaccaggcgggagtgcaggggcgccatctcaggtcactgcagcctctgcctcccaggttcaagctattctccctcctctacctcccaagtagctgggattacagccatgcaccactgttcccagctaatttttgtatttttagtagaaatgatgtttctccatgttggccaggcaggtctcaaactcctgatctcaagtgatccacctgccttagcctcccaacatgctagggattacaggcatgagctgttgcgaccggcctcaatttcccagtttttcatttcagactattttattctccttcacactacttccactgactataagcaattttaaagaaaactccagaataacaactcactgtaaataacatgaggatttcctaatatagattcctaaaaaatccatgagcctttttttataatcccatagatcctacatatcagtgattttcaaacatcttggtttcaggacttctttatacacatggattataaatagttcccacattagaaaggaaaaactgttaaaaaatcttaaatatatatgcaaaaatatggtaagaagcaaaacattttgttttacacttttgcaaaactctttactaaatggcttgaaagaagtcacttagattttgacctcgtgcc

SEQ ID NO: 5544 - DNA, 651 bp, Homo sapiens
  SIMILAR (1)..(276): 931254mologous to Mus musculus putative,accession number AK017287,Smith-Waterman Score=456.
atggtggatgtcggaaagtggcccatcttcactctactctcccctcaagagatcgcgtctattcggaaggcgtgtgtcttcggcacctcagccagtgaagcactgtacgttactgacaatgatgaggtctttgtatttggactgaactatagtaactgtctaggaactggagataaccagagtacacttgtacccaaaaagctagaaggcttatgtggaaagaagattaaaagcctcagttacgggagtggaccacatgttcttctcagcaccgaagggaaagaatatggcaaagctgatgcaagatgggtttattttgatccaaccattgtgtctgtggaaattctgaccgtcgccctggatgggtctctggcattgttcctcatttatgccatagtcaaagaaaaatattaccgacaagtaaggtcatggaaatgtgagagtttggcattactataccaagtgtccaactccctgggtatcaagaggcagtcatggcgggagcagcaggtctgtggtctgagtagccccagtggtggcctcactggtagtgctgcccttgggggtggtccattctgtggtcatcccgtagtcacccccaagagcttagccaagcatctatatcctgtaacccggcagtttgactcctag

SEQ ID NO: 5545 - DNA, 896 bp, Homo sapiens
  SIMILAR (188)..(559): 721254mologous to Homo sapiens emopamil binding related protein,accession number AF243433,Smith-Waterman Score=413.
cggaagcctgaagcatgggcgctgagtgggagctgggggccgaggctggcggttcgctgctgctgtgcgccgcgctgctggcggcgggctgcgccctgggcctgcgcctgggccgcgggcagggggcggcggaccgcggggcgctcatctggctctgctacgacgcgctggtgcacttcgcgctgggaaagaatatggcaaagctgatgcaagatgggtttattttgatccaaccattgtgtctgtggaaattctggccgtcgccctagatgtgtctctggcattgttcctcatttatgccatagtcaaagaaaaatattaccggcatttcctgcagatcaccctgtgcgtgtgcgagctgtatggctgctggatgaccttcctcccagagtgggctcacccagaagcccccaaccttcaacaaccggcaactggctggctgtactggttgggctttaccctgttttttttttaacggtgtgtggggttcctgatccccaggaactggctactgtgggcagtccatgggcctagaacctcaagaaaatggcatcagaaaggaaaccagtttcagtggaaggaagttttcagtggaacttttcaaaacccataaacacccttattcttaactttcatggaaccagaatgaattcaaatctttttgtttggcccaaaatgtaatacattccagcctacactttggttttgtattgtagctcccgaacaacctgtttcaaaatgggttttaaggcgaccagttttcgttgtattgttgttcaattaaatggtgatatagggaaaagagaacaaatttgaatttgtaataataaaatgtttaattatacattttatggctggcattaattgttccacattagtaaaaccaattatcttag

SEQ ID NO: 5546 - DNA, 439 bp, Homo sapiens
atacaccgtggctccgagactttcatgatcccattgtcgaggttgaggtgtccgtgttcccgggtgagcccctccttttctcagcaccaggcctgcctgagcctagggctggtcattctgtccccagtggcctcagtgtggttgcttttccatcgttttcttctgacaatgtcccaggttccttggagcatcttcttgttctccatttccccgggggcgacgtgtccctcctgcgccctttgtgccttcctatctaggagtgaggagctaagatcccacctttgccacaggtgagcagggcagctctcacatctgaaatggtgtcctggctctgcagtaccactccgatgagtgtcgtaccttggattcccggccaatgcaacaaaatggtatggctctgatgactggaggaacactagggtccttgcccacgcgtccg

SEQ ID NO: 5547 - DNA, 1857 bp, Homo sapiens
  SIMILAR (303)..(1199): 1001254mologous to Homo sapiens IRC1a,accession number AJ010101,Smith-Waterman Score=1567.
gacccacgcgtccggctacggagtcactacagggagaggtctcatcactagaaatagccgaagaacctgcagcctcaaccagcgttaaggaggacgtgccgtttctagggagtcttagtcggggctcaccagcttcctgcattttctgaccggctccaggaatagaaccaaaagaagctgaacaaggaagcagcgcggcaccaagaaaagcagaagtcggggccttggaggcgtgactttcccctcgggtccaggtagggcctggagctgctgcaagtgccgcctgtgctggggaagggaccatgtggctgccttgggctctgttgcttctctgggtcccaggatgttttgctctgagcaaatgcaggaccgtggcgggccccgtggggggatccctgagtgtgcagtgtccctatgagaaggaacacaggaccctcaacaaatactggtgcagaccaccacagattttcctatgtgacaagattgtggagaccaaagggtcagcaggaaaaaggaacggccgagtgtccatcagggacagtcctgcaaacctcagcttcacagtgaccctggagaatctcacagaggaggatgcaggcacctactggtgtggggtggatacaccgtggctccgagactttcatgatcccgttgtcgaggttgaggtgtccgtgttcccggcatcaacgtcaatgacacctgcaagtatcactgcggccaagacctcaacaatcacaactgcatttccacctgtatcatccactaccctgtttgcagtgggtgccacccacagtgccagcatccaggaggaaactgaggaggtggtgaactcacagctcccgctgctcctctccctgctggcattgttgctgcttctgttggtgggggcctccctgctagcctggaggatgtttcagaaatggatcaaagctggtgaccattcagagctgtcccagaaccccaagcaggctgccacgcagagtgagctgcactacgcaaatctggagctgctgatgtggcctctgcaggaaaagccagcaccaccaagggaggtggaggtggaatacagcactgtggcctcccccagggaagaacttcactatgcctcggtggtgtttgattctaacaccaacaggatagctgctcagaggcctcgggaggaggaaccagattcagattacagtgtgataaggaagacataggcttttgtcctgcctcgccatcggagctctcatgggccccaggaagtccagggacagctcccttatacctggcccacgtccttctcagcctgccctcgacaacagtgaccaacagacaggcagctgggtttcccaggccatccctctgttgccatcagcttgattggcttccccgagggccagcagggctgggggctccggagagcagcaggaagcactcccagccaccagtgcctgtcgcctctttcccctttgcccctgcttcatcccagctctgtgtgtggaggacaaagcttcttcctgcgtggctccaggaaaagatgtggctcacgtaggtggcacctgccaatagctttgtcaatcacagccccataggaacgtctggaattgcttgggagttggggagaactgtcaagaagagtgaagagagtgccaaagcggagatctgttcacctgggggccatggaggggggacccactaaagatcaagatcaaagattctccccatctcacagacaaggaaactgaggccagagggaggagagaattgctcatggctccagaactggtggcaagtttctctggactcttaggtttatttttaatatgaaatataaaaacagtttcaaatatcttaaaaaaaaaaaaaaaaaaa

SEQ ID NO: 5548 - DNA, 835 bp, Homo sapiens
  misc_feature (1)...(835): n = a,t,c or g
cccacgcgtccggtgcttcatttacacggggaaggctccaaacctcgacaaaatggctgatgatttgctggcagctgctgacaaggtaagataagaatagaaaaataatcaggactaggagttattgtgacttcttgtgtttcatgaacaggattctatgttgcattgtgggtaaaatgagcatatatcttggtttggccaagacggtcctggtttacacatattattccaacacaattattaatagcacactttttattctcaaaagtgtcctgttttgaatagtaaactatatgatcacctaactatgggaaagaaggataagtttgacttctacctctcctcttttttccatctcaaatttaaccacagtgatagtaaagattcaaataatactaacatttggattgtgctttataatttacaaaatggttttgagtttattaatgtatttaaactttatcagtaannnnnnnnnnnnnnnnnnnnnnnnnnnnnnnnnnnnnnnnnnnnnnnnnnnnntcaaggaagtctataactctttggttagggtctccacacttagctaggccctcaacactgccaatagtttttctacagatgtttaggcaactccctttcttaacgatagctgtctcaaaccttaaccactctttaactccttccaaactcctaaaagattaccttgcctacttcctccaagagaaaaggaggcccttttgtaggaacttcctcaactcttgcttcttacctcacctgcattctcagaggaggtgttcttcctcgtggacaaagcagactttntttctacctctgctctgttttatatcccatc

SEQ ID NO: 5549 - DNA, 362 bp, Homo sapiens
  SIMILAR (221)..(349): 811254mologous to Homo sapiens unknown,accession number AF114263,Smith-Waterman Score=164.
caaagctcagctttctgtttagttgtgtcaatcgcaggccactctgctgagcatcttctcccaggagtaccagaaacacattaaaagaacacatgccaaacatcatacttcggaagcaattgaaagttattaccagaggtacctgaatggagtggtgaaaaatggagctgccccagtgctcctggacctggccaatgaggtggactatgcgccctcattaatggctcggcttatactggagaggtttctacaggaacacgaggaaacttcacccttcaagggtattataaatatgatgctacggtacccttctcagattccagatggagctctagcatattaggtctatcatggcaagtaag

SEQ ID NO: 5550 - DNA, 1496 bp, Homo sapiens
  SIMILAR (1)..(372): 871254mologous to Homo sapiens SPOP,accession number AJ000644,Smith-Waterman Score=535.
atgtcgagtggccccgtagctgagagttggtgctacacacaggttgtccacttcctatttaattgcttcctgtttttctatcaacagatcaaggtagtgaaattctcctacatgtggaccatcaataactttagcttttgccgggaggaaatgggtgaagtcattaaaagttctacattttcatcaggagcaaatgataaactgaaatggtgtttgcgagtaaaccccaaagggttagatgaagaaagcaaagattacctgtcactttacctgttactggtcagctgtccaaagagtgaagttcgggcaaaattcaaattctccatcctgaatgccaagggagaagaaaccaaagctatggagagtcaacggggcatataggtttgtgcaaggcaaagactggggattcaagaaattcatccgtagagattttcttttggatgaggccaacgggcttctccctgatgacaagcttaccctcttctgcgaggtgagtgttgtgcaagattctgtcaacatttctggccagaataccatgaacatggtaaaggttcctgagtgccggctggcagatgagttaggaggactgtcggagaattcccggttcacagactgctgcttgtgtgttgccggccaggaattccaggctcacaaggctatcttagcagctcgttctccggtttttagtgccatgtttgaacatgaaatggaggagagcaaaaagaatcgagttgaaatcaatgatgtggagcctgaagtttttaaggaaatgatgtgcttcatttacacggggaaggctccaaacctcgacaaaatggcctaatgatttgctggcagctgctgacaagtatgccctgggagcgcttaaaggtcatgtgtgaggatgccctctgcagtaacctgtccgtggagaacgctgcagaaattctcatcctggccgacctccacagtgcagatcagttgaaaactcaggcagtggatttcatcaactatcatgcttcggatgtcttggagacctctgggtggaagtcaatggtggtgtcacatccacacttggtggatgaggcataccgctctctggcttcagcacagtgcccttttctgggacccccacgcaaacgcctgaagcaatcctaagatcctgcttgttgtaagactccgtttaatttccagaagcagcagccactgttgctgccactgaccaccaggtagacagcgcaatctgtggagcttttactctgttgtgaggggaagagactgcattgtggccccagacttttaaaacagcactaaataacttgggggaaacggggggagggaaaatgaaatgaaaaccctgttgctgcgtcactgtgttccctttggcctggctgagtttgatactgtggggattcagtttaggcgctggcccgaggatatcccagcggtggtacttcggagacacctgtctgcatctgactgagcagaacaaatcgtcaggtgcctggagcaaaaag

SEQ ID NO: 5551 - DNA, 398 bp, Homo sapiens
  SIMILAR (396)..(1): 961254mologous to Homo sapiens caspase recruitment domain protein 11,accession number AF322641,Smith-Waterman Score=661.
cagggtgagctgggaggtgaggctgtcgccattcagcgtcgtgtgctgcaccgagggccctgggccccgcacgtgccccacagaggtgaccgaaggccggaagggtctttccagagagaacttcctgaacatgaggttgacctgctccaggtcgtaggcatccaggccctcggattggtgggaggaggagaaggagtggatgcagtagggtccgaaggagtagcgttcgtgactgtcatcatccagatctaaggcgtcaaacccgccgctgtcattgtcttcttcgactgtgctgcgatggggcgcgtcctccttgtagcgtctgacgatggagtcgtttcccgggggctcggcggtaaatgaaatgatgctgctgcggctccgggggggctgcatct

SEQ ID NO: 5552 - DNA, 2390 bp, Homo sapiens
  SIMILAR (1)..(465): 981254mologous to Homo sapiens caspase recruitment domain protein 11,accession number AF322641,Smith-Waterman Score=795.
agtctgcccaggaacctgccagtaaccatcatctctcaggactttggggatgccagccccaggaccaatggtcaagaagctgacgattcttccacctcggaggagtcacctgaagacagcaagtacttcctgccctaccatccgccccagcgcaggatgaacctgaagggcatccagctgcagagagccaaatcccccatcagcctgaagcgaacatcagattttcaagccaaggggcacgaggaagaaggcacggacgccagccctagctcctgcggatctctgcccatcaccaactccttcaccaagatgcccccccggagccgcagcagcatcatgtcaatcaccgccgagcccccgggaaacgactccatcgtcagacgctacaaggaggacgcgccccatcgcagcacagtcgaagaagacaatgacagcggcgggtttgacgccttagatctggatgagctggcagcaggggagactgtggctcagagtcctccaggtgtgccctgccagccccctctcttccagggctcccccagcctttgccagctaaggctgccaaccgatgaaacgaaagatgagtggtcctccttaatggggaagcatcagcgctaccaagtgttaaagagagatgacagtcacgaacgctactccttcggaccctcctccatccactcctcctcctcctcccaccaatccgagggcctggatgcctacgacctggagcaggtcaacctcatgttcaggaagttctctctggaaaggtgcagaaaccgaggcccacagaggaaggggcttgccaaggccatgcagcatggcagaggcaaagaagtgggacccagatacccagcagtccccatccatgacacagtggagcccgacccttccggccttcggtcacctctgtggggcacgtgcggggcccagggccctcggtgcagcacacgacgctgaatggcgacagcctcacctcccagctcaccctgctggggggcaacgcgcgagggagcttcgtgcactcggtcaagcctggctctctggccgagaaagccggcctccgtgagggccaccagctgctgctgctagaaggctgcatccgaggcgagaggcagagtgtcccgttggacacatgcaccaaagaggaagcccactggaccatccagaggtgcagcggccccgtcacgctgcactacaaggtcaaccacgaagcccagcagaaaatccgtgggcctgcagaatatgatgtgggcagcacctccaaagcccggagctgcgcagcagcacagccctgcaagtctggaattccagggaaagaaagttcattccggcaggggtaccggaagctggtgaaggacatggaggacggcctgatcacatcgggggactcgttctacatccggctgaacctgaacatctccagccagctggacgcctgcaccatgtccctgaagtgtgacgatgttgtgcacgtccgtgacaccatgtaccaggacaggcacgagtggctgtgcgcgcgggtcgaccctttcacagaccatgacctggatatgggcaccatacccagctacagccgagcccagcagctcctcctggtgaaactgcagcgcctgatgcaccgaggcagccgggaggaggtagacggcacccaccacaccctgcgggcactccggttcgtcagcaggtccgagaacaagtataagcggatgaacagcaacgagcgggtccgcatcatctcggggagtccgctagggagcctggcccggtcctcgctggacgccaccaagctcttgactgagaagcaggaagagctggaccctgagagcgagctgggcaagaacctcagcctcatcccctacagcctggtacgcgccttctactgcgagcgccgccggcccgtgctcttcacacccaccgtgctggccaagacgctggtgcagaggctgctcaactcgggaggtgccatggagttcaccatctgcaagtcagatatcgtcacaagagatgagttcctcagaaggcagaagacggagaccatcatctactcccgagagaagaaccccaacgcgttcgaatgcatcgcccctgccaacattgaagctgtggccgccaagaacaagcactgcctgctggaggctgggatcggctgcacaagagacttgatcaagtccaacatctaccccatcgtgctcttcatccgggtgtgtgagaagaacatcaagaggttcaggggaccagtagccatgtttctgccccaacaagtaacctccttgccctgtcctggctcccgggatccttcctctggtggtctgcacgggccacggcgctcagggtgccgcagcggcaaagtgggcagtggtcgcccgtgttccagggaaggaggagggtga

SEQ ID NO: 5553 - DNA, 304 bp, Homo sapiens
  misc_feature (1)...(304): n = a,t,c or g
cattctagtttaaggtggttgatggatttagccatatatgctgcaggttatttagctagcttagtgttgaactaaattttttttaaacaaggcaaggtttaatgctgttttgagattttgaaattaatgaaaatacttatttcagaaatgcatttaatgctttttttcttgtgacagttacgcaaatcagcttgaattccatatgtccctgagttatttttatcataaagccccaaatgtattataacaaggcaaattgtaatatatataatcctgaactcnnnnnnnnnnnnnnnnnnnnnnn

SEQ ID NO: 5554 - DNA, 408 bp, Homo sapiens
tattttactaactgtaaccctaaaattgatgtcttttggtttatgaaatcagtaatttttgatatttccccagttctttttaatggggtcaataatggacatagggagtgaagtggagttatggtttcattcaatagagtattgctgattatacttgagtggaatcctttcctcacgtactcccccagacgtctgggcctggaaattttttttttattttattttaatgtttttttttttagaaaaaccccccttttattatgtacaataaaatatttcattagcttgaattgtatagatttttaaaaattcaatgaaagcatgttgtttaatttctttttaaaatccctgttgggctttgaaagcattgagaatataatatgaaattatgaaaaaaaaaaaaaaaaa

SEQ ID NO: 5555 - DNA, 109 bp, Homo sapiens
gggcctggaaattttttttttattttattttattgtttttttttttagaaaaacaccacttttattatgtacaataaaatatttcattagcttgaaaaaaaaaaaaaaa

SEQ ID NO: 5556 - DNA, 1219 bp, Homo sapiens
ttgtaatatatataatcctgaactcatgaccatgtctcagtttattttttttttcttggattgaaaagtactgaaattcaatgtgacattaaaatgcaaattttcctatttatttgagtagaaaatcacttaccagtgagcatatatattttaaaatactttctttggatattgtaattcttaactggttgtaaattagaaaagctgggattacatatggtgtgcggttacagtctaaattttttcatcctcctatgcatcataagcatgtttgtaatattttcaaaaatagttctactgatgctacaggaattttctagtttaaggtggttgatggatttagccatatatgctgctaaagaaattgtctaccttttcttcctcacctgttccatttatgtaaagttgagattagagggaaagcattttctatatcaattgtgtttaaacctttcaagaaggttatttagctagcttagtgttgaactaaattttttttaaacaaggcaaggtctaatgctgttttgagattctgaaattaatgaaaatacttatttcagaaatgcatttaatgctttttttcttgtgacagttacgcaaatcagcttgaattccatatgtccctgagttatttttatcataaagccacaaatgtattataacaaggcaaattgtaatatatataatcctgaactcatgaccatgtctcggtttattttttttttggattgaaaagtactgaaattcaatgtgacattaaaatgcaaattttcctattaaataaagaaattgtctaccttttcttcctcacctgttccatttatgtaaagttgagattagagggaaagcattttctatatcaattgtgtttaaacctttcaagaaggttatttagctagcttagtgttgaactaaattttttttaaacaaggcaaggtctaatgctgttttgagattctgaaattaatgaaaatacttatttcagaaatgcatttaatgctttttttcttgtgacagttacgcaaatcagcttgaattccatatgtccctgagttatttttatcataaagccccaaatgtattataacaaggcaaattgtaatatatataatcctgaactcatgaccatgtctcggtttattttttttttcttggattgaaaagtactgaaattcaatgtgacattaaaatgcaaattttcctatttaaaaaaaaaaaa

SEQ ID NO: 5557 - DNA, 1993 bp, Homo sapiens
  SIMILAR (1991)..(1878): 971254mologous to Mus musculus Similar to capping protein (actin filament) muscle Z-line, alpha 2,accession number BC003915,Smith-Waterman Score=188.
ctcgagttttttttttttttttttcataatttcatattatattctcaatgctttcaaagcccaacagtgatttttaaaaagaaattaaacaacatgctttcattgaatttttaaaaatctatacaattcaagctaatgaaatattttattgtacataataaaagtggtgtttttctaaaaaaaaaaaacaataaaataaaataaaaaaaaaaatttccgggccccagacgtcttgtgggagtccgtgaggaaaggattccactcaagtataatccggcaataccctattgaatgaaaccataactcccacttcactccctatgggtaaatactaacatttcaccacaggcttgaaattcctgtagcatcagtagaactatttttgaaaatattacaaacatgcttatgatgcataggaggatgaaaaaatttagactgtaaccgcacaccatatgtaatcccagcttttctaattttacaaccagttaagaattacaatatccaaagaaagtattttaaaatatatatgctccctggtaagtgattttctactcaaataaataggaaaatttgacattttaatgtcacattgaatttcagtacttttcaatccaagaaaagaaaaaaaaaataaaccgagaacatggtccatgagttccaggattcatatatatttacaatttgcccttgttaataataacatttgtggcttttatgataaaaataaactcagggacatatggaattcaagctgatttgcgtaacatgtcacaagaaaaaaaagcattaaatcgcatttctcgaaataagtattttcattaatttcaggaatctcaaaacaggcattagacccttgcccttgtttaaaaaaaatttaggttcaacactaaggctaggcctaaataaccttcttggaagggttttaaccccaattggatatagggaaatgctttccctctaatctcaacctttacataaatggaacaggtgaggaagaaaagggtagacaatttcttttaggcagcatatatgggctaaatcccatcaaccacccttaaaactaggaatggtccattattggacccccatttaaaaagaactggggggaaatatccaaaattactggatttcataaaccaaaagacatcaattttagggttacagttagtaaaatatttttgagacacttcaaaaacttttaaccataaactagaagaatcatctcttcattgtaagaaagaaaggcctaaccagaaagacatttaaactaaactgattttcaatcctcttagaacaaacaaaatgaaaaataatggttgatatagctaagcaatgtgctctaatcaaactaattaattacagtgattttaaatggcaacagcccatctgactgggcagcttgacagttcagaatacttttgcaatgattttttaacgcaaagacactaaaatgatccagtcatgcaatgttcatcttatgcattctgcatctctttgccaatcttgtagctaaggatcttgttccaatcaatcttagtgcgtgtaactggcaactgtcaacgtaaggctttgaaagtagtgtccgacattgtctaacttttaaccataaactagaagaatcatctcttcattgtaagaaagaaaggcctaacagaaagacatttaaactaaactgattttcaatcctcttagaacaaacaaaatgaaaaataatggttgattagctaagctttgtgctctaatcaaactaattaattacagtgattttaaatggcaacagcccatctgtctgggcagcttgacagttcagaatacttttgcaatgattttttaacgcaaagacactaaaatgatccggtcatgcaatgttcatcttatgcattctgcatctctttgccaatcttgtagctaaggatcttgttccaatcaatcttagtgcgtgtaactggcaactgtaaacgtaaggctttgaaagtagtgtccgacattgtct

SEQ ID NO: 5558 - DNA, 1490 bp, Homo sapiens
  SIMILAR (451)..(624): 771254mologous to Homo sapiens CMP-sialic acid transporter,accession number D87969,Smith-Waterman Score=209.
  misc_feature (1)...(1490): n = a,t,c or g
gactagtaggaaatgtagttttattcagtaaattatcgcctcatctccgattaagaaattatcaatggtttgaatgattggtcacctgtcttttactctaaactttcacaggttcctggttgtcacggaaaagccaatcctaccacattttcttttgtacttatatatatttatacttacatttaaaaaaaattatatattttatagggaaattagttatgttctttgtcagagtggtcagatagtgtcagttaggcatactcatgttctaaaaagtctgtaatcagtgatcaacaaaacactgccttgattttacccgccctgcctccccctctcctttttttttggctgtaatggaagacctttctaaaccttgccatcataaaaatatgatctgatagtgtaaacccacaattaagagttttcaaaattttaaactgatcattaggcattttaaagacacacatacagataaagctatttttctttttcttttcagcactcacctttgccctgggtactcttcttgtatgtgtttccatatatctctatggattacccagacaagacactacatccatccaacaaggagaaacagcttcaaaggagagagttattggtgtgtgattttagcctcacgtgagaactccttttaagactaaaccattttgcattaaactagagcctttaagtcaatctcagaaggtagcataaccaaataaaagattaactgtatggcatgatcagtgcggttatgtggaaacaacaacaaacaaacgaagctatctgagtgaactgctaatacagaaacttaatgtagacctgtttggggtctactattgttttagaatgaaggaattgtattattgtgtggtatatataatttgtaaataaaaagtatggagatgataccggtgttaaaaaaaaatcatggtaaggctacaatactcaagtaacaaggtttgggacaatgtcctaagggttaaagtgcccaaagccatttctgtactaactgttctcttggttccggtaccggggagaaggatgacccctccttattctccgaattccatgtacagtattttgtccctagcagcataaagaccctagctcttttcttaccaagagggcagaaaccaaggacaggcctagttccataaacaaactgaatgtgtaactaacttcctcaaaatgaatcctatttccataactcggacaatttctggggtggtgactgggagtacccgctttagtgagtacgcncctttagtgctatatattgtgccattcattatctggttcatatttcttttctgttagatgatacacatttcttcaaaaaaaatttctaatgtcacttttgtacttttttaaataaagtatgtttaactgttgggctctcaataatttgtgaaatttcagtgttttctataatgttaatggggaaattcagcaataaactttatttgtaagaaaaaaaaaaaaaaaaa

SEQ ID NO: 5559 - DNA, 418 bp, Homo sapiens
  misc_feature (1)...(418): n = a,t,c or g
aaaaacactagttcccttaatcttaccaattattactaccttagccaacccctgcaaaaaagattgatacccatactacgtaaaaatatctattgcatgtgtnnnnnnnnnnnnnnnnnnnnnnnnnnnnnnnnnnnnnnnnnnnnnnnnnnnnnnnnnnnnnnnnnnnnnnnnnnnnnnnnnnnnnnnnnnnnnnnnnnnnnnnnnnnnnnnnnnnnnnnnnnnnnnnnnnnnnnnnnnnnnnnnnnnnnnnnnnnnnnnnnnnnnnnnnnnnnnnnnnnnnnnnnnnnnnnnnnnnnnnnnnnnnnnnnnnnnnnnnnnnnnnnnnnnnnnnnnnnnnnnnnnnnnnnnnnnnnnnnnnnnnnnnnnnnnnnnnnnnnnnnnnnnnnnnnnnnnnnnnnnnnnnnnnnnnnnnnng

SEQ ID NO: 5560 - DNA, 395 bp, Homo sapiens
gagtcatattacaaaaccgagggcgatgaagaagcagaggaagaacaagaagagaaccttgaagcaagtggtaagtgacttcagcatgtagtgccattcggtgtgtggaagaaagaccttccctgcctatctctgctggatggactttgctgtttgatggcctgcccttctcctcccagataattctgaaattcttttcttcctttgaacttcgcagagctaccctaggctcttatatgcagatcttactctagtgtgccctaagttttttttggacactggtagtttgacatcttttggtccctgataaatggccatgaccataggtattttttgtcatcttaagtggttcaagtgagacccttctcatccagggaagtagtggtaccatttct

SEQ ID NO: 5561 - DNA, 510 bp, Homo sapiens
  SIMILAR (4)..(210): 781254mologous to Homo sapiens PRO2550,accession number AF130089,Smith-Waterman Score=266.
tcccggttcaagcgattcttctgcctcagcctcccgagtagctgggattacaggcatgcacccacccacgccctggctaatttcgtatttttaatagagacagggtttctccatgttggtcaggctggtctcaaactcctgacttgaggtgatctgcccgccttggcctcccaaagtgctgggattacaggcgggaaccactgcacccggcaggtacagtgtttctttaggtgctgggggtacaccagggaatcagggcagaagctggatcctgcaagagtaatgtttgagaacaaataaatactttcgaaaggaggtcgaaacaaaaaggagtgtaggtgttattactgcagagaagactgaatggagtccacttttcttattagtaacttactaaaaatgatctcaaatgggctccacacactttgccctggccatgaggcaaacttgttgggtttggagaaaaacacataaccctaaattcactattttttgcctatataaaacatt

SEQ ID NO: 5562 - DNA, 499 bp, Homo sapiens
  SIMILAR (50)..(334): 541254mologous to Homo sapiens Human secreted protein, SEQ ID NO: 6953,accession number AAG02872,Smith-Waterman Score=248.
acaggtactcattttcatttttatttattattagtattgttatttttagagatggggcctcaatctatcacccaggctgatgtgcaggggcataatcatagctcactgcagcctcaaactcctgggctcaagcaatcctcccgcctcagcctctagaatagctgggactacaggcacacaccaccacacccggctaatttttttagaattttgtagagacaggggtctcactatgttgcccagggctgatctcaaactcctggtctcaagcaattctctcgcctcggcttcccaaagcgctggggttacaggcatgagtcaccacacatggccagagacaggtactcttattgtccccatttcccagatgaagaaactggagacccagagagatgaagtgacttgcccaaggtcacattgctggaaaggggcagagcagggattcaaatggggccaaacagggatataatccaaggtgagatgggccgatacgatacca

SEQ ID NO: 5563 - DNA, 416 bp, Homo sapiens
  SIMILAR (3)..(158): 631254mologous to Mus musculus putative,accession number AK002939,Smith-Waterman Score=150.
  misc_feature (1)...(416): n = a,t,c or g
agcagctgtagtggagccacctactaaaaatgctgcagcgttatagctcttgtaacgtgtgatgaaaacgtcgcggtctgatccgaacatatgggcttgatatgtgcagccagagtttatgtcagtacgcgaaggatatcggtttcattaagttggactaaatgctcttccttcagaggattatccggggcatctactcaatgaaaaaccatgataattctttgtatataaaataaacatttgaaaaaaccnnnnnnnnnnnnnnnnngggggggctgtttaaaagaatcctttggggggccaaagttaacgggggcatgcaacctaaaaattttttccttatggggggcagaataaaaatctacctgggaatctttgtaaagaaaccttatttttggggggaaacaaaattgaac

SEQ ID NO: 5564 - DNA, 1240 bp, Homo sapiens
  SIMILAR (301)..(1089): 711254mologous to Homo sapiens tripartite motif protein TRIM19 kappa,accession number AF230410,Smith-Waterman Score=846.
atgcgacggcggaagcgggccccggccggcatcctcttcctgcgcccgcgccgccgcgggtggccgcgcgggtctgggtaccgggcgctgcccctgggtgattttgaccgcttccagcagtcgagcttcggctttctgggctcgcagaagggctgcttgtccccggagcggggcggcgtggggacaggggccgatgtaccccagagctggccctcctgcctctgtcatggcctcatcagtttcctggggttcttgctgctgttggtcaccttccccatttctggctggtttgccctgaagcccgaggaggcagagagagtgaaggcccaggttcaggccctggggctggctgaagcccagcctatggctgtggtacagtcagtgcccggggcacaccccgtgccagtgtacgccttctccatcaaaggcccttcctatggagaggatgtctccaatacaacgacagcccagaagaggaagtgcagccagacccagtgccccaggaaggtcatcaagatggagtctgaggaggggaaggaggcaaggttggctcggagctccccggagcagcccaggcccagcacctccaaggcagtctcaccaccccacctggatggaccgcctagccccaggagccccgtcataggaagtgaggtcttcctgcccaacagcaaccacgtggccagtggcgccggggaggcagaggaacgcgttgtggtgatcagcagctcggaagactcagatgccgaaaactcgcccgctgagcaggctgccacccccgatgctgagcctcacagcgagcctcctgatcaccaggagcgccctgccgtccaccgtgggatccgctacctgttgtacagagcacagagagccatccgccttcgccatgccctccgcttgcaccctcaattgcatcgggcccctattcggacttggtctccccatgtggtccaagccagcactcctgccatcacagggcccctcaaccatcctgccaatgcccaggaacatcctgcccagctgcaaaggggcatcagcccaccccaccggatacgaggggctgtgcgatcccgcagccgctccctccggggctcctcccatttatcccagtggctcaacaacttttttgccctccccttctcctccatggcttcccagcttgacatgtcttccgtgggtgggccccatgctccccagctcatcccagacacccacctgcccaccctcattgagggcagac

SEQ ID NO: 5565 - DNA, 3587 bp, Homo sapiens
  SIMILAR (15)..(1847): 991254mologous to Homo sapiens tripartite motif protein TRIM19 beta,accession number AF230402,Smith-Waterman Score=3185.
ctaagctggggtccatggagcctgcacccgcccgatctccgaggccccagcaggaccccgcccggccccaggagcccaccatgcctccccccgagaccccctctgaaggccgccagcccagccccagccccagccctacagagcgagcccccgcttcggaggaggagttccagtttctgcgctgccagcaatgccaggcggaagccaagtgcccgaagctgctgccttgtctgcacacgctgtgctcaggatgcctggaggcgtcgggcatgcagtgccccatctgccaggcgccctggcccctaggtgcagacacacccgccctggataacgtctttttcgagagtctgcagcggcgcctgtcggtgtaccggcagattgtggatgcgcaggctgtgtgcacccgctgcaaagagtcggccgacttctggtgctttgagtgcgagcagctcctctgcgccaagtgcttcgaggcacaccagtggttcctcaagcacgaggcccggcccctagcagagctgcgcaaccagtcggtgcgtgagttcctggacggcacccgcaagaccaacaacatcttctgctccaaccccaaccaccgcacccctacgctgaccagcatctactgccgaggatgttccaagccgctgtgctgctcgtgcgcgctccttgacagcagccacagtgagctcaagtgcgacatcagcgcagagatccagcagcgacaggaggagctggacgccatgacgcaggcgctgcaggagcaggatagtgcctttggcgcggttcacgcgcagatgcacgcggccgtcggccagctgggccgcgcgcgtgccgagaccgaggagctgatccgcgagcgcgtgcgccaggtggtagctcacgtgcgggctcaggagcgcgagctgctggaggctgtggacgcgcggtaccagcgcgactacgaggagatggccagtcggctgggccgcctggatgctgtgctgcagcgcatccgcacgggcagcgcgctggtgcagaggatgaagtgctacgcctcggaccaggaggtgctggacatgcacggtttcctgcgccaggcgctctgccgcctgcgccaggaggagccccagagcctgcaagctgccgtgcgcaccgatggcttcgacgagttcaaggtgcgcctgcaggacctcagctcttgcatcacccaggggaaagatgcagctgtatccaagaaagccagcccagaggctgccagcactcccagggaccctattgacgttgacctggccgaggaggcagagagagtgaaggcccaggttcaggccctggggctggctgaagcccagcctatggctgtggtacagtcagtgcccggggcacaccccgtgccagtgtacgccttctccatcaaaggcccttcctatggagaggatgtctccaatacaacgacagcccagaagaggaagtgcagccagacccagtgccccaggaaggtcatcaagatggagtctgaggaggggaaggaggcaaggttggctcggagctccccggagcagcccaggcccagcacctccaaggcagtctcaccaccccacctggatggaccgcctagccccaggagccccgtcataggaagtgaggtcttcctgcccaacagcaaccacgtggccagtggcgccggggaggcagaggaacgcgttgtggtgatcagcagctcggaagactcagatgccgaaaactcggtgagtggcccagaagttcagcccaggactcctgcctccccccatttcaggtcccagggggcacagccacagcaggtgactctcagacttgccttgcgcctggggaattttccagtgaggcattgagtcccaagctgtgctgaggacagtctccaaatgacagctgcatgcctggaccaccccagccctcccactacaccagggccaggagctcttctgaaatgctgatagcatgtgtccagagcactgtctcttttctggaatgtccaagacctttgtctggagcttccttatgcattttctgtcctctaagtcctcagtgaggagggctggacaagaatccattccttggtttattacagccagtgggggccagtgaaggggtgtcaggccacagggcagctatataggggccaaacaagtgaggtttgactccatccatgtagaaagatatataaatccattccacagtgaaacaggtggcctcgtgggtagtgacccttctgtccctagaggtttattactagaggctggactatcacctgtccaggggaaaaggggatctgaatagagtgaaaggttggactgggtggcccctgaggtctcttccagccctcagtctgaggttctgtattggaaagtgcatggaacccatggagaccgccgagccacagtcctcgccagcccactcctcgccagcccactcctcgccagtccagtctctgctgagagcacaaggagcctccagcctgccctgtggcacataccaccccccagcttggcctccccaccagcccgctgagcaggctgccacccccgatgctgagcctcacagcgagcctcctgatcaccaggagcgccctgccgtccaccgtgggatccgctacctgttgtacagagcacagagagccatccgccttcgccatgccctccgcttgcaccctcaattgcatcgggcccctattcggacttggtctccccatgtggtccaagccagcactcctgccatcacagggcccctcaaccatcctgccaatgcccaggaacatcctgcccagctgcaaaggggcatcagcccaccccaccggatacgaggggctgtgcgatcccgcagccgctccctccggggctcctcccatttatcccagtggctcaacaacttttttgccctccccttctcctccatggcttcccagcttgacatgtcttccgtggtgggggcaggggaaggcagagcccagactcttggagcagttgttccccctggggactctgtcagaggctccatggaggcctctcaagtccaagtgcctctggaagcctctccaattacattcccaccaccctgtgccccagaaaggccccccatcagcccagtcccaggcgcccgtcaagcaggcctctgagagtgctacccttctcttgtaaccttgcagccaacacccctgcccggcccctgagctgcctcctccagcccatgctcttacaggccctgcacagagtagcactcattaattcttggttaaggaatgaatcaacgaatgaatggctatgcatggacctctgggcagggagacctgggtcttctctggctgagaggggaaggctaaggcatggctgagattcaagccaccattccaggcctctttgcccaagaaagaaacttctgtcacccttgcactctcctgtgttctgagtccctggccaatagcacagccttccatgccccgacccccaccccaagcctctccactaggcctctgccaggatctaagcccatgagcacagggactggctatcccaagacctggcagatgtggctgctcaataaacacttgttgaaccatcaaaaaaaaaaaaaaa

SEQ ID NO: 5566 - DNA, 451 bp, Homo sapiens
  SIMILAR (2)..(415): 831254mologous to Notothenia coriiceps alpha tubulin,accession number AF255558,Smith-Waterman Score=609.
ggcttgctgcctgctgtaccgtggtgacatggttcccaaagatgtcaatgctgccattgtcaccatcaaaaccaagcgcaggatccaatttgtggattgatgccccactggcttcatggatggcatcaactaccagccttccactgtggtgcctgttgaaaacctggacaaggtacagagagctgtgtgcatgctgagcaacaccacagccattgctgaggcctgggctcgcctggaccacaagtttgacctgatgtatgccaagcgtgcctttgttcactggtacatgggtgaggcgatggaggaaggcgagttttcagatgcccgtgaagatatggctgcccttgacaaggattatgaggaggttgatgcggattctgttcaacgatagggcgatgaagacggacaggaatactaataatccattccttttggccctgcggatgacaat

SEQ ID NO: 5567 - DNA, 420 bp, Homo sapiens
  SIMILAR (20)..(418): 831254mologous to Homo sapiens alpha-tubulin isoform 1,accession number AF081484,Smith-Waterman Score=578.
  misc_feature (1)...(420): n = a,t,c or g
atagcgagcggccgccctttattttttttgctgcctgttttaccgtgttgacgtgggggggnnnnnnnnnnnggctggcgttgccaccatctagaccaaccgttccatccagtttggggattggtgccccactggcttcaaggttggcatcaactaccagcctcccactgcggtgcctgctggagacctggccaatgtacagagagctgtgtgcatgctgagcaacaccacagccattgctgaggcctgggctcgcctggaccacaagtttgacctgatgtatgccaaacgtgcctttgttcactggtacgttggtgaggggatggaggaaggtgatttttcaaaagcccgtgaggacatggctgcccttgagaaagattatgaggaggtctgcgtggattctgttgaatgagagggtga

SEQ ID NO: 5568 - DNA, 727 bp, Homo sapiens
  SIMILAR (2)..(613): 971254mologous to Homo sapiens tubulin alpha 6,accession number BC004949,Smith-Waterman Score=1076.
cggggccctcaatgtggacctgacagagttccagaccaacctggtgccctaccctcgcatccacttccccctggccacctatgcaccagtcatctctgcagaaaaggcataccacgagcagctgtcggtggcagagatcaccaatgcctgctttgagcctgccaaccagatggtaaagtgtgatccccggcacggcaagtacatggcctgctgcctgctgtaccgtggagatgtggtgcccaaggatgtcaacgctgccattgccgccatcaagaccaagcgcagcattcagtttgtggactggtgccccacaggcttcaaggttggtatcaactaccagcctcccactgtggtgcctgggggtgacctggccaaggtgcagcgtgccgtgtgcatgctgagcaacacgaccgccatcgccgaggcctgggcccgcctggaccacaagttcgacctgatgtatgccaagagggcgtttgtgcactggtatgtgggtgaggggatggaggaaggcgagttttcagaggcccgtgaggacatggctgcccttaaaaaggattatgaggaggttggagcagatagtgctgacggagaggatgagggtgaagagtattaacctgtgtgctgtacttttacactcctttgtcttggaactgtcttatttttgttctgtaaatgtctattgccgtaaattgttaataaaattgatgttttgtcgacgcggccg

SEQ ID NO: 5569 - DNA, 1865 bp, Homo sapiens
  SIMILAR (1163)..(1603): 441254mologous to Homo sapiens alpha-tubulin,accession number X01703,Smith-Waterman Score=212.
acggtttcgctgatgctgaggggccactttctgtctcgcgttgttctctggggaccgggagaggaggaggcacccaaaaagagcgggggcgttgggcgagctcgggggacgtgggagggggaacgggaacaaagcgcagcctagggttagcgtgggaagaccctccgcggtctttggcgttttggaaagatacccacacattcccgggaaaacatgcgtgagtgcatctccatccacgttggccaggctggtgtccagattggcaatgcctgctgggagctctactgcctggaacacggcatccagcccgatggccagatgccaagtgacaagaccattgggggaggagatgattccttcaacaccttcttcagtgagacgggggctggcaagcatgtgccccgggcagtgtttgtagacttggaacccacagtcattgatgaagttcgcactggcacctaccgccagctcttccaccctgagcaactcatcacaggcaaagaagatgctgccaataactatgcccgagggcactacaccattggcaaggagatcattgacctcgtgttggaccgaattcgcaagctggccgaccagtgcacgcgtctccagggcttcttggttttccacagctttggtgggggaactggttctgggttcacctcgctgctcatggaacgtctctcagttgattatggcaagaagtccaagctggagttctctatttacccggcgccccaggtttccacagctgtagttgagccctacaactccatcctcaccacccacaccaccctggagcactctgattgtgccttcatggtagacaatgaggccatctatgacatctgtcgtagaaacctcgatattgagcgtccaacctatactaacctgaataggttaataggtcaaattgtgtcctccatcactgcttccctgagatttgatggagccctgaatgttgacctgacagaattccagaccaacctggtgccctatccccgcatccacttccctctggccacatatgccccctgtcatctctgctgagaaaagcctaccatgaccagctttctgtagcagagatcaccaatgcttgctttgagccagccaaccagatggtgaaatgtgaccctcgccatggtaaaaaacatggcttgctgcctgttgtaccgtggggacgtggttcccaaagaatgtcatatgcttgccattttgccaccatcaagaaaccaagcgtacctatccatgttttgtggattgggtgcgcccatctggctttcataggtgtggcatttcaactatccagccttcccactttgttggtgcctggtgcgagacactggcgcaaggtaccagagaagctgtgtgcattgctgagcaaacaccacagccatttgctgaggcctgtgctcgcctggaccacaagtttgacctgatgtatgccaagcgtgcctttgtttcactggtaccgttggggaggggatggaggaaggtgagttttcagaggcccgtgaggacatggctgcccttgagaaggattatgaggaggttggtgtggatttctgttgaaggagagggtgaggaagaaggagaggaatactaaagttaaaacgtcacaaaggtgctgcttttacagggaagcttattctgttttaaacattgaaaatgttgtggtctgatcagttaatttgtatgtagcagtgtatcgctctcatatacaattagctgacctatgctctaaaacatgaatgcctttgttacagacccaagctgtccatttctgtgatgggttttgaataaagtatttccctgtcttacatgaggcacgaataacaaaacatccttgtccttcaaaaaggggg

SEQ ID NO: 5570 - DNA, 641 bp, Homo sapiens
  SIMILAR (225)..(338): 631254mologous to Homo sapiens Human secreted protein, SEQ ID NO: 6953,accession number AAG02872,Smith-Waterman Score=110.
tgtttaaaggaaatttccttccttaatggtagtctcaccccaggtgcagcagtgaaatcttggctcactgcaacctctgcctgcagtttcaagggattctcctgcctcagcctctcaagtagctggaattacaggtgtgcgccaccacgcccgactaatttttgtatttttagtaaagacagggtttccctctttcttcttttgttttcactctttcttcctctgttggccaggctggtcttgaactactgacctcaagtgatccatctgccttggactcccaaagtgctgggattataggcgtgaaccactgcatctggccaattctggttaattttctgaattaaaaatttagggaaaaggacctagcaagataatgtaatagttaattagacttggagaattgatttttagtattttcatgatataaataaatcaaggggatcttctccttagaagttggtagttattaactatgtggtggtgcctaacatgaaagaacattttaaaaaacaaggactacagtttaatcaccatctctgcctcctttcaaaatctgtggttacctgctttcggaaccatagctttcttctttctttcttcatgggtctttctacatcctgttattgtcatggcaacgg

SEQ ID NO: 5571 - DNA, 421 bp, Homo sapiens
  SIMILAR (46)..(417): 941254mologous to Homo sapiens Ku protein subunit,accession number M32865,Smith-Waterman Score=588.
gtccaagttggtcgcttccctgcgccaaagtgagcagtagccaacatgtcagggtgggagtcatattacaaaaccgagggcgatgaagaagcagaggaagaacaagaagagaaccttgaagcaagtggagactataaatattcaggaagagatagtttgatttttttggttgatgcctacaaggctatgtttgaatctcagagtgaagatgagttgacaccttttgacatgagcatccagtgtatccaaagtgtgtacatcagtaagatcataagcagtgatcgagatctcttggcttgggtgttctatggtaccgagaaagacaaaaattcagtgaattttaaaaatatttacgtcttacaggagctggataatccaaggtgcaaacgaattctaaagctttgccaagttaaagggccgg

SEQ ID NO: 5572 - DNA, 445 bp, Homo sapiens
  SIMILAR (175)..(20): 691254mologous to Homo sapiens Human secreted protein, SEQ ID NO: 6613,accession number AAG02532,Smith-Waterman Score=196.
gtcgactttttttttttttttttgtatttttagttgagatgggattttgccatgttggccaggctggtctcaaactcgtgacctcatgtgatccgcccacctcggcctcccaaagtgctgggattgcaggcgtgagccaccgcgcctgacccaacacaagtttaaaatgaaagctgttatcagtagagaatcttcaccacgttggcaccagctcaagtgtagtgtcggcgcacttttagcttagagtcagaaaaatagacatgtatgaaaatgcgtggcaggagcccttccataaagcaaatctctctgttgcagtggttcttaacaaggtgtaaacgttataactacctatggaacttttaaacctgtatgccaggccccatccaaacttactgactcaaaatctccgggcatctgtttttttgtttgttttgagatagagtct

SEQ ID NO: 5573 - DNA, 406 bp, Homo sapiens
  SIMILAR (2)..(154): 961254mologous to Homo sapiens HSPC055,accession number AF161540,Smith-Waterman Score=271.
ctgtaaatttgcacatggaaatgccgaacttcatgaatgggaagaaagaagagatgccctagggatgaagctgaacaaagcacgaaaagatcacttaattggcccaaatgataatgactttggaaaatataggtttttgtttaaagatttaaactaatatgctggcttttatgtatgatacctaatcagagcattgaccagaaaaattgaaagtgttctgaggcgcatagcagaggagctgcaaatttcctgcttgtattggcgtatatcgttcctcctgagcagcaccccacagtaggtaagaaaatgggctgtttcacagggctggccacgctctcacggaacccactgcatcaaatggtgaagtgactgctacccgttgccatctgttgaacagacttttgga

SEQ ID NO: 5574 - DNA, 531 bp, Homo sapiens
  SIMILAR (282)..(371): 1001254mologous to Homo sapiens Human secreted protein from clone B196,accession number AAW64462,Smith-Waterman Score=146.
ggcctagaaatggggagcatgtttcctgttcccaaccagcgaggtgtcagtaaatcaccaggagcgcggagcagcccctgcccgggaccatagctggtgatcccccatagtgggcaaccatgcccagcctgcttccttgattggccaagtttggggtgagggggtggttgtagggttttccttagggatggcagccctattggggtctgtgggtgctcagggctgcgggccgcatgcctgctcaccaggccctgcccacctatgctcgctcctttctctctgtcagcgttggggccttcgtgaagacctggctgcccttcatccttctcctgggcatcatcctcaccgtcagcctggtctttaacctccggtgatggctgctcggtggccccacacccaccagggtcccgaggaaacagccgccatcccttttggttccagatttttttctcctcaccccaaaaggcagggttgggcctgctgttgtggaccgggggtcggggctggcaggatggaaggactgaggaccag

SEQ ID NO: 5575 - DNA, 1457 bp, Homo sapiens
  SIMILAR (9)..(173): 651254mologous to Mus musculus putative,accession number AK017503,Smith-Waterman Score=182.
tttcgtgcgcgccgcatggcggaagcggaagggagttctctgctcttgttgccgccgccgccacccccgcccaggatggcggaagtggaggcgccgacggcggccgagacggacatgaagcaatatcaaggctccggcggcgtcgccatggatgtggaacggagtcgcttcccctactgcgtggtgtggacgcccatcccggtgctcacgtggtttttccccatcatcggccacataggcatctgcacatccacaggagtcattcgggacttcgcgggcccctactttgtctcagaggacaacatggcctttggaaagcctgccaagtactggaagttggaccctgctcaggtctatgctagcgggcccaacgcatgggacacggctgtgcacgacgcctctgaggagtacaagcaccgcatgcacaatctctgctgtgacaactgccactcgcacgtggcattggccctggaatcttgatgcgctacaacaacagcaccaactgggattatggtgacgctctgcttcttctgcctgctctacgggaagtacgtcagcgttggggccttcgtgaagacctggctgcccttcatccttctcctgggcatcatcctcaccgtcagcctggtctttaacctccggtgatggctgctcggtggccccacacccaccagggtcccgaggaaacagccgccatcccttttggttccagatttttttctcctcaccccaaaaggcagggttgggcctgctgttgtggaccgggggtcggggctggcaggatggaaggactgaggaccagcatgaagtgggggtttgttgtctccctgcctctcagaagcaccctgtcccctcctccccaggcctgtgactccggccctggaagcccctttgttcttctgttgaaaggctttggcttcccgctgtagagctgctcccgccaccacctgctggggtcctgcctcagcccagtgcccagtatggggagaggaggacatttgggctcacctgtcaagggggccctgggaccagagctggtcccagcatggggtgcaccgggtacacttaacgtgtctctataagccaagttgcttcaggaccctttcaccactggcctctataatggtccagaggggctggctgggtccctttgtcagactcctgccggcagctgccctgggggacatgtgtgcccatctggcatcctccagacagagcagtgtagacagcactcagccccagccccaggtgtggacctcatgctggtgatggctcccctgggtggcctgccagcacagccagtgccatcagggagctgaaggggctgtcccccacctaactccagctcccccttcacgttgtcaccaaggccctgtgccgcccgcctcgcccccctgctctgtggattcctttgggaagggctccctgggcaggacaataaagagttttgactccaa

SEQ ID NO: 5576 - DNA, 707 bp, Homo sapiens
ttgaaaggctttggcttccctctgtagagctgctcccgccaccacctgctggggtcctgcctcagcccagtgcccagtatggggagaggaggacatttgggctcacctgtcaaggtggccctgggaccagagctggtcccagcatggggtgcaccgggtacacttaacgtgtctctataagccaagttgcttcaggaccttcaccactggcctctagaatggtccagaggggctggctgggtccctttgtcagactcctgccggcagctgccctgggggacatgtgtgcccatctggcatcctccagcccgtgcagtccgctcttaactgttccaagggcctcccaagtgcctcccaaagaattggacccaatctccccctgcagtttgaggccaagaaaggtaagtggaccttgacaaagtgccagagtaaccgtgtgagacaggagcagtgtagacagcactcagccccagtccccaggtgtggacctaatggtgggtaatggctcccctggggtggcctgccagcacagccagtgccatcagggagctgaaggggctgtcccccacctaactccagctcccccttcacgttgtcaccaaggccctgtgccgcccgccttgccccccttgctttgtggattcctttgggaagggctccctgggcaggacaataaagagttttgactccaaaaaaaaaaaaaaaaa

SEQ ID NO: 5577 - DNA, 1172 bp, Homo sapiens
  SIMILAR (21)..(221): 831254mologous to Rattus norvegicus zinc finger protein HIT- 39,accession number AF277902,Smith-Waterman Score=317.
tagtcagcgtggtggaattcctttgctccaagcgttttgctcagtggagccacctggcccagcaccagctgctgcacacgggggagaagcctttcccctgcctcgagtgtggccggtgcttccgccagaggtggtctctggctgtccacaagtgtagccccaaggccccaaactgtagccctagatctgctatcgggggctccagtcagaggggcaacgcccattaaaaggggaaggactgcctacgttcatttcattttatggagggtcccagaaaagggaaggaggagccccaggtcatacagggcagagtcagaactaaacccgggtctcctgctgcacagagctgaactttgtatcttgcaatgcgctggctgcctccctgtgcgtgtctggaacagtcccattaggagaggtgacgtcatttgcttaaagttttccaagctaccctatcctaaaataagttggggggaattcaagggctaaaagttctccccatctattttaggggctgtctgcttttctagtctgtccacacagggattacctgtcatcttgcatgcaatcaggagaatctcataggggcaggaccttcccctactctcgcctcttcctccatactaggttagaaaaatctggtttagcccactttttgcaacactcctgccaagtggtcttctacccattgcttgaaaatctctcttgacagggagctcactacctcacaaggcaggtcatttcatttgtgggatctatagaaggttaaagtaccacattctcctctaaacctttgcctacggacatggtttaaataccttcatctacatagcaggcccttcaggataatcacaaccacttttgcccccaagttttcaggttaagtagcgatgaatttggtcattccttaaagacagggtttcaatttccacacatgatctctgcaaacaggcactgggttttcagtgtcctttttgaagggtcatataaaaataaggtaacatccacagtgccactacaccttctggggctggacttgtttcagcagctttggttgcactgaatttgggggagctgccatggtaccagggggttattgcgttgcagatatataaaagccctatacttaagcaagaaaaaaaaaggggggcccatataaaggaccccccctcacc

SEQ ID NO: 5578 - DNA, 444 bp, Homo sapiens
agaaggggctgccccctcctctggagggcccttaagggacttttggggcttcccgagaaacaccaacaagccctgcagtggcactgggtaatctctgcagcgaatctgctggatggcctcactggcccctcctggacctgctccaagaggccaagccccacacacacaccggcccctaggaaggcctagccgaggggctcaagtccagccagcagctcaggctggccaggccacttccaagcagagtcctggaccagggttctggtcccagctcccacaggacctgactactgcctcagtttccccatctgtcaatggagccagcaaggcctgtctggagtgcaaatcttgaccaagtcaccccggaagtcccttcaaaagcaagaccaggggttgtgggccggtcccagaggagaagccagagctgctagtcctcctcctgct

SEQ ID NO: 5579 - DNA, 474 bp, Homo sapiens
agggggtgaggaccccccagccctctgcaggaagcccacagcccagacccagacagggaagaaacattcagggacagcggccgtaagaagcagagagagacataaggaagtgagagctgggcactcactttccgctctggactctccgcccagcctcctccctggcatcttatctcctgtccatcagtgtgatgtcactagagttgaccctatcccttccctgctcacagctcttctctggctccccagtgctcccaagtgaaggtctgagccccacaagcctggcgttggagaccctgtgtggtctgcccctcccacctctggagaagacctcattcttctagcaacctcggcccactgaatttctttcagtcactctccattactggctgatccaatccaatcattctctcccagctctgggccgctctacatagaactataatctgtctgcgtgctgaactcctcctgttc

SEQ ID NO: 5580 - DNA, 1767 bp, Homo sapiens
  SIMILAR (101)..(1297): 691254mologous to Mus musculus putative,accession number AK013941,Smith-Waterman Score=1379.
  misc_feature (1)...(1767): n = a,t,c or g
tcgcacctgaggctcttggagcggcctcggggcgcgcccacctggaggttggaattacacagggtcgaaaaagctgagtcctggaggcgaggcgctgtagatgaaaagaagcaaagaattgataactaaaaatcatagtcaagaggaaacaagtattcttcgttgttggaaatgtagaaaatgtatagcaagctctggttgttttatggagtatcttgagaatcaagtgattaaggataaagatgattcagttgatgctcaaaatatttgtcatgtgtggcacatgaatgtagaagcccttccagaatggataagctgcctaatccaaaaagcccagtggacagttggaaaactgaattgtcctttctgtggggcccgtttagggggctttaattttgtcagcactccaaaatgttcctgtggccagcttgcagctgtacatctctccaagagccggactgattatcagccaacacaggcaggcagactaatgagaccatcagtgaaatacttgtcacatcctatagttcagtcaggttgtgacaaggaagctctgctgacaggtggtggctctgaaaacagaaatcacaggcttttaaacatggcccgaaataataatgaccctggaagattaacagaagcactctgcctggaggtgcgaccaacatattttgagatgaagaacgaaaaactgctgtccaaagcatcagaaccaaaataccagctttttgttccccagcttgtgactggcagatgcgctacaagagcttttcatagaaaatcacatagtttggatctgaacatcagtgagaaactgactttattacccactttatatgaaatacatagtaagactactgcctattccagactaaatgaaacacagcctattgacctttcaggcttgcctttacaatctagtaaaaatagctattcctttcagaatccatccagttttggatcctagtatgctgctgcaaagattttcagtgggccccccatgagacccagacacaaagaggagggaggaatttcagtgtgggtctaggaggctgcttcagtgtattctggaccatactaatcactaacaatctgactttcctgatgggacctgccctcagctggcaggagcatgccggaggcctcagaccaggaagagcacctctcccctctggacttcctgcactcagccaatttttcattgggcagcattaatcagaggcttaataagagagaaaggagcaagttgaagaatctaagaaggaaacaacgaaggcgtgaaagatggctacagaagcannnnnnnnnnnnnnnnnnnnnnnnnnnnnnnnnnnnnaattgaacaatgccacaaaaactttcctttacctaaagaaatatttgaaaaataaaaacaaaagctttccagaaaatcccaactcctgcaaaatggcccccctacccaagcctgccagaaaagcatttccatcctttttggaggtttcccgcagacatgcagactcccagttacaagaaggcagttccccacacggtgcacacaggatggattacctgcactttgaggatgatagcccgtggatggtggtttgacatggatatggtgatcatatatatttattcagtgaactgggtcattggattcattgttttctgctttttttgctattttttctttccgttttaggaatttcataccttactacaattgaccaatcataaatgatgtaaataacaattgcttaaacatttttaaaaaaaaaaaaaaaa

SEQ ID NO: 5581 - DNA, 1504 bp, Homo sapiens
  SIMILAR (138)..(341): 581254mologous to Homo sapiens Human secreted protein, SEQ ID NO: 4433,accession number AAG00352,Smith-Waterman Score=196.
agttaaattgtgttgcctaattttgttttgttttgttttgttttgtttttgaagacaaggtcttgcctctgtcaaccccaggcctaagaagtgcagtggcatgatcaagggcttactgcagcctcaccctcgatttccctgggctcaagcaatcctcccacctcagcccccaagtagctgggcctacaggtgcgtgctaccacgcctggccaattttttaaattttagcacagatgaggtctcactatgttgcccgggctggtctcgaactcctgagctcaagggatcctcccgcctcagcctcccaaagtgctggtgttacaggcataagccaccacgcctggcctgtgttgctattatatttggcaggaacccagagtccagaacatttcatctatgatgggttagataatgtgtctagttgtttgcatgccaatttcagtagcctcagttattcaacctaggagatttttctacctctttactaccctgctgaagttgctcttcagcagaaaatctttgtggaacacattccacactttgaaatcttcgtggaacaaaagatatttgtggaaccaatctttgtggaacatattccagctttttgaatgagtgcatatccagtagtacctttaaagtaacactttgtacataacaaatactcagcaaatgtgaaactttatttggctcttacttcaaaattagtccaaaatgttggaaataaaatataagacattgatctagatatgaggtttttctccttcattctcagctgtcgaagaaatcaaagtagcatatgcacaaggttaaaaaccacatatacaaatactatagaacagcttataatgaaaaccttgcctgcctttataaaaaatgtgattatcttcttctgttaatgtcaataaaagatggtttgtcctagaaggtctataaatggtattatgttctggaggaaacctagcaaaaactttgctagtttagtacttgtctctaaattgatgttcacccatttcaatattgcacttattaatggtctttaatttttctaggcatagataacaattgattctttaggattcatatatggaggtaattcttgctttctaaagaaaggaatatggcacattggaaccattttattcaccagtggatttacccttagagtatttttagatctgagctgatgacttgtgagagaaaaatgggaacagacgtaaagccatggaagccatgaacagtaagagactgccgcctggcatggtttcttcttctgcagaagatgaaactgaggagaaacaagacaacatcctttcataccaggaatggtcaagataatgcaagaagaaaaaagctttcaaacaaatcagaaggcagtcaacaaacagaaagggggacattccttccctggcagttactcaaaactgaaattgcttattgtgtacaccggggcttgtacttggggaatttaataaaaatgctcattaccaagctccaaaaaaaaaaa

SEQ ID NO: 5582 - DNA, 2261 bp, Homo sapiens
  SIMILAR (811)..(1815): 951254mologous to Homo sapiens pregnancy-specific beta- glycoprotein e,accession number M20882,Smith-Waterman Score=1700.
atggccatactgcccaaggtaatttacagattcaatgccatacccatcaagctaccaatgactttcttcacagaattggaaagaactactttaaagttcatatggaaccaaaaaagagcctgcatcgccaagtcaatcctaagccaaaagaacaaagctggaggcatcacactacctgacttcaaactatactacaaggctacagtaaccaaaacagcatggtactggtaccaaaacagagatatagatcaatggaatagaacagacccctcagaaataacacctcatatctacaactatctgatctttgacaaacctgagaaaaacaagcaatggggaaaggattccctatttaataaatggtgctgggaaaactggctagccatatgtagaaagctgaaactggatcccttccttacaccttatacaaaaatcaattcaagatggattaaagacttaaatgttagacctaaaaccataaaaaccctagaagaaaacctaggcattaccattcaggacataggcatgggcaaggacttcatgtctaaaacaccaaaagcaatggcaacaaaagccaaaattgacaaatgggatctaattaaactaaagagcttctgcacagcaaaagaaactaccatcagagtgaacaggcaacctacaaaatgggagaaaattttcacaacctactcatctgacaaagggctaatatccagaatctacaatgaactcaaacaaatttacaagaaaaaaacaaacaaccccatcaaaaagctcatctccacagaggagaacacacagacagcagagaccatggggctcctctcagcccctccctgcacacagcgcatcacctggaaggggctcctgctcacagcatcacttttaaacttctggaacccacccacgactgcccaagtcacgattgaagcccagccaaccaaagtttctgaggggaaggatgttcttctacttgtccacaatttgccccagaatcttactggctacatctggtacaaagggcaaatcagggacctctaccattacattacatcatatgtagtagacggtcaaataattatatatgggcctgcatacagtggacgagaaacaatatattccaatgcatccctgctgatccagaatgtcacccaggaagacgcaggatcctacaccttacacatcataatgggaggtgatgagaatagaggagtaactggacatttcaccttcaccttatacctggagactcccaagccctccatctccagcagcaacttaaaccccagggaggccatggaaactgtgatcttaacctgtgatcctgagactccggacacaagctaccagtggtggatgaatggtcagagcctccctatgactcataggtttcagctgtccgaaaccaacaggaccctctttctatttggtgtcacaaagtatactgcaggaccctatgaatgtgaaatacggaactcagggagtgccagccgcagtgacccagtcaccctgaatctcctccatggtccagacctccccagaattcacccttcatacaccaattaccgttcaggagataacctctacttgtcttgcttcgcgaactctaacccaccggcacagtattcttggacaattaatgggaagtttcagcaatcaggacaaaatctgtttatcccccaaattactacaaagcatagcgggctctatgtttgctctgttcgtaactcagccactgggcaggaaagctccacatcgttgacagtcaaagtctctgcttctacaagaataggacttcttcctctccttaatccaacatagcagctgtgatgtcatttctgtatttcaggaagactggcaggagatttatggaaaggtctcttacaaggactcttgaatacaagctcctgataacttcaagatcataccactggactaagaactttcaaaattttaatgaacaggctgataccttcatgaaattcaagacaaagaagaaaaatactcaatgttattggactaaataatcaaaaggataatgatttcataattttctatttgaaaatgtgctgattcttggaatgtttcattctccagatttatgaacattttttcttgagcaattggtaaagtatacttttgtaaacaaaaattgaaacatttccttttgctctctatctgagtgccccagaattgggaatctattcatgagtattcatatgtttatggtaataaagctatttgcacaagttcagtaaaaaaaa

SEQ ID NO: 5583 - DNA, 345 bp, Homo sapiens
  SIMILAR (12)..(344): 721254mologous to Mus musculus putative,accession number AK003779,Smith-Waterman Score=424.
ctgacgcgtgggcgtggccgttgaatagaggctttttcaggatgatgatggatattggggctgcaggtgttatgcaggggggggactctgtggaactgttggatatcccaatactgaagctccctgatggctcggacatcccgctccctcctattctgctcggcaggctgggcttccacccactgaagaacaccgtgtgcatttacgggcacctggatgtgcagcctgcagccctggaggacggctgggacagcgagcccttcaccctggtggagcgagacggcactctgcatgggagaggctcgactgatgattaggtcccgctggccggctggataaacgccg

SEQ ID NO: 5584 - DNA, 462 bp, Homo sapiens
  SIMILAR (1)..(435): 1001254mologous to Homo sapiens plasminogen activator inhibitor-1,accession number M16006,Smith-Waterman Score=750.
cacaaatcagacggcagcactgtctctgtgcccatgatggctcagaccaacaagttcaactatactgagttcaccacgcccgatggccattactacgacatcctggaactgccctaccacggggacaccctcagcatgttcattgctgccccttatgaaaaagaggtgcctctctctgccctcaccaacattctgagtgcccagctcatcagccactggaaaggcaacatgaccaggctgccccgcctcctggttctgcccaagttctccctggagactgaagtcgacctcaggaagcccctagagaacctgggaatgaccgacatgttcagacagtttcaggctgacttcacgagtctttcagaccaagagcctctccacgtcgcgcaggcgctgcagaaagtgaagatcgaggtgaacgagagtggcacggtggscctcctcatccacagctgtcatagt

SEQ ID NO: 5585 - DNA, 627 bp, Homo sapiens
  SIMILAR (129)..(383): 751254mologous to Homo sapiens PAI-1 (Arg 350) mutant,accession number AAR23812,Smith-Waterman Score=293.
cgaaccaggcctccctctccttccttcacctccgtccctattctggccacttgattcgggggacacctggtaggggatggggaaaggtgggagctgccagccagaggggaccccggcttgagcagcctcttgctgctatctgcaggttctccctggagactgaagtcgacctcaggaagcccctagagaacctgggaatgaccgacatgttcagacagtttcaggctgacttcacgagtctttcagaccaagagcctcttcacggcccgcaagcgctgtaaaaagtgaagatcgaggtgaacgagagtggcacggtggcttcctcatccacaggtgagtctggctcaggtgaggctccacgggtgtcgcctccatcgcccttcaggataactggtccccagacccggaaaggaccccgcagccctctcggcacagagcagctctgtctgtgctcagccatcacccactccccacctgtttctcagcctggaaaacgggcttgggaccatggaaccctgtttcctcgcctgatggctcctaagttccctgactgtgaaaaggcctcctaaagaaaaacccaagttgttcccacagtgggaagtaaacttaagaaacatgcttatcagg

SEQ ID NO: 5586 - DNA, 846 bp, Homo sapiens
ttttttttttttttacttgtacacaaatgttcataacagctttatttataacagccccaaactggaaacaacccaggtgtccatcgataggtcaatgaacaaatctattcaatgaagcagtactcagcagggaagagagcataaaaacaaaaactcgggacagatgctaccacatggatcgaatctcaaaataactatactgagtaaaatatgcctgaccaaaaaagggatacatattggtatgattcaatttacatagaattctaggacatggcaaactaataacaggggcacaaggggcacttggggaatggatggggtccgttcctcacttcagttggtgggtggataggttttacgcaggggtatacatacgcccaacaccattggtacacttttggatacgtggcaggtttattgggggtggtcaaggtacacctcctaaaattaaaattattgatggggctctacattctgggagacacggggcagtagaactattattttccagcttgaaatattagctacactttggtaaaaatacttttgaactttatcttcacagtcgcggcaaggaaaacaaaaggtataaacattcattggttgaaaaacaatgtcataaagttgtccccgtatctgtggggggttggttccaggactcctgaggatactaaaatcctcagatgctcaagcccctgataaaaaatggtgcagtatttgcatataacctacccacatcctcctgcacagtttaaatcatcactagattacttatattacccaatacaatgtaaatgctgtggaaatagttgtcatactgtattatttagagaataataacaagaa

SEQ ID NO: 5587 - DNA, 690 bp, Homo sapiens
  SIMILAR (99)..(284): 791254mologous to Homo sapiens Human myelin oligodendrocyte glycoprotein gene,accession number AAZ29204,Smith-Waterman Score= 227.
ggagatggagtcttgctccatcacccaggctggagtgcagtggtgagatctcagctcactgcaacctccgcctcctgggttccagcgagtctcctgcctcagcttccccagtagctgggattacaggtacctgccaccacgcctggctaatttttgtatttttagtagagatggggtttcaccatgttagccaggctggtctcgaactcctgacctcaggtgatccacctgccttggactcccaaagtgctgggattacatgcatgagccaccacgcctggccaacactggggcttccctttttcctggccaccaaaatcttgccagtgcttcccctcccactggctgaacccatgcagaagtcagctgacaaggtagactgggaaattcccagggtcactttcctgcaacatagggcagaggatgagagaagactttcagacaaggagggtctggaaagatacagagggcaaggactttctgtttcaaagtgtgaatttttaatacttgactgaactagaacagcaattaagacttttctactccaagaatataaaagtaaaattagttaacctactgtgattgtactcaacacaaagcatgatactgattttcttaaacaattcattttgatcacgctagagatcagaatatttcgagagaaatgaggaagcaaagaaaagaacccaa

SEQ ID NO: 5588 - DNA, 1024 bp, Homo sapiens
  SIMILAR (10)..(246): 741254mologous to Homo sapiens neuronal thread protein AD7c- NTP,accession number AF010144,Smith-Waterman Score=308.
tcgacttttttttttttttttttttttgagatggagtcccactctgtcacccaggctgtagtacagtggcgtgatcttggctcactgcgacctcctcctcctgggttcaagcagttctcctgcctcagcctcctaagtagctgggactacaggcatacacctccacacccagctaatttctgtatttttagtagagacggtgtttcaccgtgttggccaggctagtctcgaactcctgacctcaggtgatccacttaggtattattatatttcagaagctgtcaaaccataggaacatctaaaaccttaccttaagcccaagctaacaaagccaaactgttactaattccttccagtgaaggaatgatacttcttcaaatgtgagccagaagtaaagttatttacaccaatacatttaagaactatcagtttcatgaatgaacatctatcagtgaagaaggataaagaaaagttatagccggggaaaaaaaggtaccaatatccaaaattagcaagccaaagggctgttgaggaaaaacagcaagtagcctttttttttcaaacacctgtcctcctcttattattaaatctaggaatccagagcattaaaaagttaccaaagcactgatatacaactgagtatctgtttctatttaaacatactgaaagaagataaaccgctaaaataatctgcattctctacagagttcactgtttacaagttaaataacaaaacattaacttctttatgccttgttttgtagatttgactttggaactacacttcataattataaaatgattaacttttttttatatatcccccccaaaactccaaaataagatgaaacaaaagcacctcactgtgtaaccagttggtgacaaaaaccacagagaggaattattctgagtgactttaaagcatagtaaaggcacattcataacaaaatatacactaagaacaaagaaaatctctaggtatacgaatacagtcatatgccgccatgatgacgtttcagtcaac

SEQ ID NO: 5589 - DNA, 405 bp, Homo sapiens
ccaggttctcaggcccaccctcagagccctggcttgagagtcatcagttctactgatacaaaggatgtcccctaattggagatggggtccaccatgcctggccacccctcaaggtgtaactccctctgacactcagccctgccaggccctaggcctagggccccaccctaggaatgttcaacccccaatcatcatcagcggcactggctagagagcaagtctaagggaagctggcctcagtgtttctggaaactcaggaattaacctggagcttgcggctccaccccagagttggatggggcagggctctggtttaaggagaagggagagaaacagcagaagcacttcctggaagccagaggttctgggctctaacttgaactagaactagtcctgcaaaattgg

SEQ ID NO: 5590 - DNA, 556 bp, Homo sapiens
  misc_feature (1)...(556): n = a,t,c or g
ggaggtcgaggctgcaatcagtcatgatcgcgtcactgcactccagcctgggtgacaaagcaaggccccatatcagatatagatatacttatcagaccccccctgaccatttagattggcagtgctttgagaaatgcactatgacctttctgtgtcaatgggaatatacagaaggaacattcgggaccccgctgtcccccacagcctcattgttgtctccaggacactgctgggtcacacgaatgctccaggacagacagggacctggagtgcatcaggatctgaccagataggagtttttgcctcgtatctgggtgctacggattttttgccgttctctgaggtccaccacctgcccttcctggcatggtttccttcgtgaccatccctgctgcccctgggggtggaccccactggcccttctgcagacagctccctgccttctgccctccagggggttctggccagagtccatgcttggagacaggatcatctgccttcagccctcacagtgctntaaattatagcaagtttgcccataggacaaaagagcatt

SEQ ID NO: 5591 - DNA, 380 bp, Homo sapiens
  SIMILAR (30)..(92): 901254mologous to Homo sapiens ryudocan core protein precursor,accession number D13292,Smith-Waterman Score=89.
cctgcgcgccttctccagtccgcggtgccatggcctccgcccgtctgttcgcgctgctgctgttcttcgtaggcggagtcgccgagtcgatgacttggaagactccatgatcggccctgaagttgtccatcccttggtgcctctagataaccatatccctgagagggcagggtctgggagccaagtccccaccgaacccaagaaactagaggagaatgaggttatccccaagagaatctcacccgttgaagagagtgaggatgtgtccaacaaggtgtcaatgtccagcactgtgcagggcagcaacatctttgagagaacggaggtcctggcagctctgattgtgggtggcatcgtgggcatcctctttgccgtcttcg

SEQ ID NO: 5592 - DNA, 313 bp, Homo sapiens
  misc_feature (1)...(313): n = a,t,c or g
aagtatgggctttgagggcggacctaagattcttaactggaagtttaagaaagtganccaatcccantcttgccttcanaaaggccaagntgaatccatttttctgaacacttnaaaggtaatcagagctggagatactnacaagtcagtattaggttgacctcaccctaccctaatgtccaccctttaaaatcccctggnttccctccccgctaaagtccaagccagtgcccacaagcaagcttnacgcgtagaactcattggtgggggctttcttgtagatgggtttcttgcccaggtcatagctgccttc

SEQ ID NO: 5593 - DNA, 310 bp, Homo sapiens
cctgaaaaaaatatatttatctatttttctagaaccaaggaagaataataatatattataagaacacagacacaaatatcccaccatccccttcattatattttgggatctgctaaaaaaaaactatgtttcggcaaaagctattttataagaggaagcagcttcagaaagggccaaggccatgaggagcggggtttaaagtataaaaaaaaaactggggaaggggtttaatgaaagagaacaaagaaacaaacaaaaacaaaaacaaaaaccattaaatacaaacttagcaggtgctgtggaaatgtgc

SEQ ID NO: 5594 - DNA, 1257 bp, Homo sapiens; identical to SEQ ID NO: 303
  SIMILAR (430)..(1254): 991254mologous to Oryctolagus cuniculus elongation factor 1 alpha,accession number U09823,Smith-Waterman Score=1427.

SEQ ID NO: 5595 - DNA, 422 bp, Homo sapiens
  misc_feature (1)...(422): n = a,t,c or g
nnggaggcaagtcaaccggctcgaggttacgtgacanacactacgggaatctctgtggtatatacctggggccattctatgtctctttcaagtgacttttggaaatcaaccttttttatttgggggggaggatggggaaaagagctgagagtttatgctgaaatggatttatagaatatttgtaaatctatttttagtgtttgttcgtttttttaactgttcattcctttgtgcagagtgtatatctctgcctgggcaagagtgtggaggtgccgaggtgtcttcattctctcgcacatttccacagcacctgctaagtttgtatttaatggnnnnnnnnnnnnnnnnnnnnngctttcttcaggctctagggctgtgctatccaatacagtaaccacatgcggctgtttaaagttaagccn

SEQ ID NO: 5596 - DNA, 2718 bp, Homo sapiens
  SIMILAR (2675)..(2082): 1001254mologous to Homo sapiens ryudocan core protein precursor,accession number D13292,Smith-Waterman Score=1002.
ctttttttttttttttttttagaaagtaccaggttttattatctttttatcaaaaaaaaatcagtaactagacaacaggtgtgagaggtgccttacagagggagggtggctcacttcccacacagccccaaggggaaagggcacttgggggcagaagaaggaaccagccagctggggaccctggggttgtcagtggtgacggggagcttaatggcccactgggtgcaagcaagggaggggtggttccccttcaccgcagccactggggtcaggaggaagacacgaacctggccaggctaaagccaccaaggcctccccctctcagggagagggagacaagggtcgtcccagacaacagggccccagctggcgttccaaatcaagccctcgccccatttctgacccccctaccccagggggagacaagggtccgtccccaagcacaagcttgaggctgtgaactcggttagagccagatctagtgtctctaggaataagtgctggtccaaccagatggacattgctctccgctgtccagttacagtagcccatgaactcacatacagtgacgccctctagaaaacgtggttaagtgcaactggaggagggaatgtgtaatcttaatgtgattttaattggcttaactttaaaccagccgcatgtggttacttgtattggatagcacagccctagagccctgaagatagcaaaccaaagaacacccagctgggtcccaaaccagcaggcagaaaggggtaaatccatcaagcttcaactatccaggccccatcggaagccaccaggaacagggcaagggaataagggcaaaaccccacccagcccacatgaaaattcactcactcaaccacccagcaacatcaaactggaaacaccacacttatttcctgaaaaaaatatatttatctatttttctagaaccaaggaagaataataatatattataagaagcacagacacaaatatcccaccatccccttcattatattttgggatctgctaaaaaaaaactatgtttcggcaaaagctattttataagaggaagcagcttcagaaagggccaaggccatgaggagcggggtttaaagtataaaaaaaaaaaactggggaaggggtttaatgaaagagaacaaagaaagaagaggggaagggaggccctatctaaagctataaatagtaaaaaaaaaaaaaaaaaaaaaaaattaataaaaatcatctctccggctcttctctcattttcaagaaacaaacaaaaacaaaaacaaaaaccattaaatacaaacttagcaggtgctgtggaaatgtgcgagagaatgaagacacctcggcacctccacactcttgcccaggcagagatatacactctgcacaaaggaatgaacagttaaaaaaacgaacaaacactaaaaatagatttacaaaatttctattaatcccattccagcatagtctctaagctcttttcaccatcctcccccccaaataaaaaaggttggtttccaaaggtcacttgacagagcctagaatggccccaggtatataccacagagattcccgtagtgtgctcacaagtccccatttacagaatcatctcaaggtgcaggtggttttagttccttcccccatttcctggcagagagaccggctgtgaaaggaagggagcaaggcctctgggggaggaccttcagccaggactccacacaacatccgttagccccctggcttcagaggagctctggatgaggcatggtcagtatgggcttgagggcggacctagattcttaactggaagtttaagaagtgatccaatcccagtcttgccttcagaaaggccaagttgaaatcatttttactgacaggggaactgagggccaaagctcaagaagaacctggcagaacagtagaagacaatgtctcttctgaacacttcaaaggtaatcagagctggagatactgacaagtcagtattaggttgacctcaccctaccctaatgtccacccttcaaaatcccctggcttccctccccgctaaagtccaagccagtgcccacaagcaagcttcacgcgtagaactcattggtgggggctttcttgtagatgggtttcttgcccaggtcatagctgccttcatccttcttcttcatacggtacatgagcagtaggatcaggaagacggcaaagaggatgcccacgatgccacccacaatcagagctgccaggacctccgttctctcaaagatgttgctgccctgcacagtgctggacattgacaccttgttggacacatcctcactctcttcaacgggtgagattctcttggggataacctcattctcctctagtttcttgggttcggtggggacttggctcccagaccctgccctctcagggatatggttatctagaggcaccaagggatggacaacttcagggccgatcatggagtcttccaagtcatccagatctccagagccagacagctcaaagtcatcagattcctgcccgggccccactacatcctcatcgtctggtagggctccggagaagtatcggccttctaggaggtcctgggggtcgatgacctcagtctctcggatcgactcggcgactccgcctacgaagaacagcagcagcgcgaacagacgggcgggggccatggcaccgcggactggagaaggcgcgcaggctgcggcgagtggc

SEQ ID NO: 5597 - DNA, 722 bp, Homo sapiens
  SIMILAR (162)..(314): 681254mologous to Homo sapiens PRO2550,accession number AF130089,Smith-Waterman Score=140.
tcttttttaaaaaaatttttatttatttttttgagatggagtttcgctcgttgcccaggctgtgcaatggcgcgatctcggctcaccacaacctccgcctcctgggctcaagctactctcctgcctcagcctcccgagtagctgggattacgggcatgtgcccaccatgcctggctaattttgtacttttagtagagacggggtttctccatgttggtcaagctggtctcgaaactctcgaatctcagatgcatccgcctgcctcggcctcccaaagtgttgggaattcacaaggcgtgacaactctgcaccacggtcgtaggggcctcaaataaattccttctcccttcttgcccttgacagagataggcacgagatatcactaccattcccaactttcaacacgtgggagggaaatccaaacgcgagaacgctcggatttcccccttctttacttgcaacaactccgtaacccgcaaatcggctacggacaactgcgatgtccactatgttagttctcgtagcgtggattctctctcctcaagatgccatctggggggctagaggccactaataattgccctcacgatcgaagaaactcgatcctaatcctcgacggcacttcaggaacaaagctgctctcccatcgtccctaacctcactaccgtaaaggtcgcagcagagccccggctccaacccgtagcgccatcttgggtcgacgc

SEQ ID NO: 5598 - DNA, 365 bp, Homo sapiens
aagagatgagacttagtatgttgcccaggccggcctcaaccttctggcctcaagccaatcctcctgcctcagcctcccaaagcactgggattatgagtgtgaaccactgtgcctagcctttttttttttccttttgtagaggcagggtcttgctatgttgcccaggattctaccacctattaaaagcattagcatcaggtggaggaatggccaaaaaaaaatgcatcaggtactttagtatgaaaatccacctccaagctcaatgagcaagcaacccacatcacaggcctgtgacatccagagctcttgacttccagtcagaatgacacctgggagagtcactcactgcagagtcgacgccggcc

SEQ ID NO: 5599 - DNA, 1680 bp, Homo sapiens
  SIMILAR (196)..(897): 1001254mologous to Homo sapiens Hlark,accession number U89505,Smith-Waterman Score=1247.
gccattacagaggtcctttcaccacctgtgagaggtttgattttgggggagctccgggactctcaaggctacagtgtggactgctggcccaaggagaagagcactgctgcggccgccgccattttagcgttttgtcagaagcgtccgcgccgcgaggaggaggccctgctggtttctgtgcgggctcttgtcaggatggtgaagctgttcatcggaaacctgccccgggaggctacagagcaggagattcgctcactcttcgagcagtatgggaaggtgctggaatgtgacatcattaagaattacggctttgtgcacatagaagacaagacggcagctgaggatgccatacgcaacctgcaccattacaagcttcatggggtgaacatcaacgtggaagccagcaagaataagagcaaaacctcaacaaagttgcatgtgggcaacatcagtcccacctgcaccaataaggagcttcgagccaagtttgaggagtatggtccggtcatcgaatgtgacatcgtgaaagattatgccttcgtacacatggagcgggcagaggatgcagtggaggccatcaggggccttgataacacagagtttcaaggcaaacgaatgcacgtgcagttgtccaccagccggcttaggactgcgcccgggatgggagaccagagcggctgctatcggtgcgggaaagaggggcactggtccaaagagtgtccgatagatcgttcaggccgcgtggcagacttgaccgagcaatataatgagcaatacggagcagtgcgtacgccttacaccatgagctatggggattcattgtattacaacaacgcgtacggagcgctcgatgcctactacaagcgctgccgtgctgcccggtcctatgaggcagtggcagctgcagctgcctccgtgtataattacgcagagcagaccctgtcccagctgccacaagtccagaatacagccatggccagtcacctcacctccacctctctcgatccctacgatagacacctgttgccgacctcaggagctgctgccacagctgctgctgcagcagcagccgctgctgctgttactgcagcttccacttcatattacgggcgggatcggagccccctgcgtcgcgctacagccccagtccccactgttggagagggctacggttacgggcatgagagtgagttgtcccaagcttcagcagccgcgcggaattctctgtacgacatggcccggtatgagcgggagcagtatgccgatcgggcgcgttactgctaccaatgccaaagccaggtgccgccacgcagcggacactgctctgcctgccgcgtctgcatcctgcgtcgggaccaccactgccgcctgctgggccgctgcgtgggcttcggcaactaccggcccttcctgtgcctgctgcttcatgccgccggcgtcctgctccacgtctctgtgctgctgggccctgcactgtcggccctgctgcgagcccacacgcccctccacatggctgccctcctcctgcttccctggctcatgttgctcacagccgcactgccctaccaccttgtggtcaacactcactcccctcagtcacggaagactctggctccagtcacagactctctcttcgccctgggccctgtggaaatcaagggtgtctggaagtttgcatga

SEQ ID NO: 5600 - DNA, 555 bp, Homo sapiens
  SIMILAR (7)..(555): 281254mologous to Caenorhabditis elegans predicted using Genefinder; preliminary prediction,accession number AL132880,Smith- Waterman Score=201.
ttgacgaccttagtcactgtggtggaattcctccatcagcggcagacagtcatcaccaccatgaccaccttgaagaagaacctggctgacgatgatgctgtgtcttgcctggtgctgggcaccgagaacaaggagctcctggtgcttgaccccgaggccttcaccattttagccaagatgagccttcccagcgtccccgtcttcctagaggtttctggccagtttgatgttgagttccggcttgccgcggcctgccgcaatggaaacatctatattctgagaagagactccaagcaccccaagtactgcatcgagctgagcgcccagcctgtgggacttatccgggtacacaaggtcctagtggtgggcagcacccaagacagcctgcatggcttcacccacaaggggaagaagctgtggacagtgcaaatgcccgcagccatcctgaccatgaacctcctggagcagcattcccggggcctgcaggccgtcatggctgggctggccaatggagaggtccgcatttatcgtgacaaggccctgctcaatgtcatc

SEQ ID NO: 5601 - DNA, 865 bp, Homo sapiens
  SIMILAR (7)..(207): 581254mologous to Mus musculus putative,accession number AK017737,Smith-Waterman Score=173.
cctagtcctccggctccgacagctgggtgtccaggccatggggcagccctgggcggctgggagcacggacggggcgcccgcgcagctgcctctcgtgctcaccgcgctgtgggccgcggccgtgggcctggagctggcttacgtgctggtgctcggtcccgggccgccgccgctgggacccctggcccgggccttgcagctggcgctggccgccttccagctgctcaacctgctgggcaacgtggggctcttcctgcgctcggatcccagcatccgtggcgtgatgctggccggccgcggatgggctctggggcagccctgtgcacaatatggggcatctgagctgctgggggaactgacgctgtggttccttcctgcagttactgctaccaatgccaaagccagcggacactgctctgcctgccgcgtctgcatcctgcgtcgggaccaccactgccgcctgctgggccgctgcgtgggcttcggcaactaccggcccttcctgtgcctgctgcttcatgccgccggcgtcctgctccacgtctctgtgctgctgggccctgcactgtcggccctgctgcgagcccacacgcccctccacatggctgccctcctcctgcttccctggctcatgttgctcacaggcagagtgtctctggcacagtttgccttggccttcgtgacggacacgtgcgtggcgggtgcgctgctgtgcggggctgggctgctcttccatgggatgctgctgctgcggggccagaccacatgggagtgggctcggggccagcactcctatgacctgggtccctgccacaacctgcaggcagccctgggcgcccgctcgtcggcttgggccgtgacttag

SEQ ID NO: 5602 - DNA, 943 bp, Homo sapiens
  SIMILAR (9)..(212): 971254mologous to Homo sapiens SEQ ID NO 361 from WO9922243,accession number AAY19643,Smith-Waterman Score=370.
  misc_feature (1)...(943): n = a,t,c or g
taatcctcgcgacgggcccaccactgccgcctgctgggccgctgcgtgggcttcggcaactaccggcccttcctgtgcctgctgcttcatgccgccggcgtcctgctccacgtctctgtgctgctgggccctgcactgtcggccctgctgcgagcccacacgcccctccacatggctgccctcctcctgcttccctggctcatgttgctcacagccttaaagcccactctcatcttgcaagcctctgaagccaccagttttctgagatgttcctcccggccccggagaccacggatgtggctaccttctcagaatatagatgtttccattgcggcaggccgcggcaagccggaactcaacatcaaactggccagaaacctctaggaagacggggacgctgggaaggctcatctgcaaacaagaagcgcaaacactccaatttctctggagcccccgtccctccctgccctgtcagtaactcctctgagtgagtgcctggtctaaagtcccaatctcctcacttacacccagtttaaactcatacagtttttcaggagggaaacttggggcaacatttagcaaaagccttttagtctgtgccttttgactaaacgatgccacttctaggactgcgatcctaaggatgtacttaaacaaccgtgcagctgggtgtggtggcccacacctgtaatcccagcactttgagaggctgaggcgggtggatncttgagctcaggagttcnagaccagcctgtccaacatggcaaaatttgtctctaccaaaagtacaaacttagctggggtggtggtccacagatgagaagatgaggtgagaggctgtttagcccagtngcataggttnagtantgagattgtcantgaatntacctggnaagagacagattgtttaaacaacaaaaaacatnaaggttttcggaaagct

SEQ ID NO: 5603 - DNA, 383 bp, Homo sapiens
  SIMILAR (24)..(209): 701254mologous to Homo sapiens serine/threonine protein kinase,accession number U07747,Smith-Waterman Score=228.
ggcacgagaacgggtaaaatgaaccaagggcttctacgctgacatcatcaaaggctggacaacgtcaagcaccctgtaccttgttcccgaactcatacccattgtgagaatacccacctgccaaccccttccaggggggcccccacgactgcagggcacagaccaaagacatgggtgcccaggccccgagggtgccggaagcggggccttgagtgggccaggccactcccccgagctccagctgccttaggaggagtcacagcatacactggaacaggagctgggtcagcctctgcagctgcctcagtttccccaaggaccccacccccctttgggggtcaggaacactacactgcacaggaagccttcacactggaaggggg

SEQ ID NO: 5604 - DNA, 548 bp, Homo sapiens
caatggatttcgtggggcccactctcagtgcccgccagcctgtgtcctgcctggccaggcaatgagtaccggcggcaggcagctgcctcacccctgcatgaacccccccagcccaggggactcaatggacgctgtcatcaaaggggcagctgtagatctaggagggacgtggaagggggctaagcccctgggcctctggcattgtggaggctgacctatagagaacagagctggagctggggagacatgaagtctgcacatctagaccccagtgaggagcccaggctttttaggcacaagccccatgggctccccgggcccagcccttaagaaccacggcagctgcgccaggccactcctgtctccacttccataccctccaaaggagaggcccctcccccccccatggcatctccaatctgaggacctgccacctcccagaggaccggaggccctgatgccccaagaattgggcttggaaagatgttaatatcccctgccccaagtgccaaggttcagaggcactggtgcaggcctcgtgcaagcgt

SEQ ID NO: 5605 - DNA, 895 bp, Homo sapiens
  SIMILAR (52)..(360): 1001254mologous to Oryctolagus cuniculus elongation factor 1 alpha,accession number U09823,Smith-Waterman Score=543.
  misc_feature (1)...(895): n = a,t,c or g
gggtttgccgccagaacacaggtgtcgtgaaaactacccctaaaagccaaaatgggaaaggaaaagactcatatcaacattgtcgtcattggacacgtagattcgggcaagtccaccactactggccatctgatctataaatgcggtggcatcgacaaaagaaccattgaaaaatttgagaaggaggctgctgagatgggaaagggctccttcaagtatgcctgggtcttggataaactgaaagctgagcgtgaacgtggtatcaccattgatatctccttgtggaaatttgagaccagcaagtactatgtgactatcattgatgccccaggacacagagactttatcaaaaacatgattatcctgaaccatccaggccaaataagcgccggctatgcccctgtattggattgccacacggctcacattgcatgcaagtttgctgagctgaaggaaaagattgatcgccgttctggtaaaaagctggaagatggccctaaattcttgaagtctggtgatgctgccattgttgatatggttcctggcaagcccatgtgtgttgagagcntctcagactatccacctttgggncgctttgctgttcgtgatatgngacagacagttgcngtgggnggcatcaaagcagtggncaaaaaaggctgctggagctggaaaggcaccaaagnctgccanaaagcncagaaggngaaatgatattatccccaaaacctngcnaccccctnttaatcagtggtgganaccgggcncagaactgttngtnanntggcncttnaggttngnggnaaancntggtaatggnncaatngnncgaaaaccctcnaaagngatgggnatgtttttggcnnccttgggntcctttttgcggggggggtta

SEQ ID NO: 5606 - DNA, 793 bp, Homo sapiens
  SIMILAR (377)..(556): 701254mologous to Homo sapiens Human secreted protein, SEQ ID NO: 7874,accession number AAG03793,Smith-Waterman Score=220.
ttaaaattatagcaaaggtagaatgcacttgtttaatatactctcatgattcttttgcagggtgttcatttagaagaaagcaacactaatgattcaaacagcttcctgaattttaattttgtgttgtctcacagaaagccttatcataaattccataattctaattaatttaccaagataatgtaattacatttggttttgtaaggtatacagcagtaatctcctattttggtgtcagtttttcaataaagttttgattatgggcaaatcccctctttttctttttttaaaatatatttgagtatgccatacatttatatatatggtgtatatgaatttggtttaaacattttaaaatttattctgattagtttgtgtcttttttttttttttttgagagagagagtcctgctctgtcactcaagctggagtgcagtggtgcgatctcggctcactgcaacctccgcctcccaggtccaagcaattctcttgccttgtcctcccaagtagctgggattataggcacacaccaccatgcctggctaatttgtgtctcattttcaagagtagaaaccctaaatattttattttcattccttttccaaattgctatgaatgggattaaaggattacagatgtaaagtctattatttgtggaattctaaaatgttagttctgctgttgttacctgtggaaacatcttaaagaagtacatattttgcacgtcctgcacgtgtaccctcagaacttaaactataattaaaaagaatagtttcaaaaaaatacatattga

SEQ ID NO: 5607 - DNA, 495 bp, Homo sapiens
  misc_feature (1)...(495): n = a,t,c or g
ntctttaaaacggccgccccnnnnnnnnnnnnnnnnnnncttgttatgcctttaatttttgtatttatgagcttgttcatttgaaaatcaaagatacatattgccatattttcaaattgaatttatacagaggcaagcctccagtgaaagaaaaacagtatttttcagataaaaattaattcaaatgaatgtaacttaaatgaaaaaataaaactataaaatcttaggaaaaaaataaaagaaaatcttcaggatccaggggtcagcaaagagttcttagtcatgacaccgaaagtnnnnnnnnnnnnnnnnnnnnnnnnnnnnnnnnnnnnnnnnnnnnnnnnnnnnnnnnnnnnnnnnnnnnnnnnnnnnnnnnnnnnnnnnnnnnnnnnnnnnnnnnnnnnnnnnnnnnnnnnnnnnnnnnnattttgtagaccccttgggtttggatttcagtagaatctgcatcttgggaggactctgagtcagtctgct

SEQ ID NO: 5608 - DNA, 437 bp, Homo sapiens
  misc_feature (1)...(437): n = a,t,c or g
agcagactgactcagagtcctcccaagatgcagattctactgaaatccaaacccaaggggtctacaaaatnnnnnnnnnnnnnnnnnnnnnnnnnnnnnnnnnnnnnnnnnnnnnnnnnnnnnnnnnnnnnnnnnnnnnnnnnnnnnnnnnnnnnnnnnnnnnnnnnnnnnnnnnnnnnnnnnnnnnnnnnnnnnnnnnactttcggtgtcatgactaaaaactctttgctgacccctggatcctgaagattttcttttatttttttcctaagattttatagttttattttttcatttaagttacattcatttgaattaatttttatctgaaaaatactgtttttctttcactggaggcttggctctgtataaattcaatttgaaaatatggcaatatggatctttgaatttcaaatgacaagcctcataatacaaa

SEQ ID NO: 5609 - DNA, 403 bp, Homo sapiens
  SIMILAR (17)..(139): 801254mologous to Homo sapiens Human secreted protein, SEQ ID NO: 7519,accession number AAG03438,Smith-Waterman Score=181.
aaaaaacctccactgaatggagtcttactctgttgcccaggctggagttcagtggcacgatctcggctcagtgcaacctctgccacctgggttcaagcgattctcctgcttcagcctcctgagtagctgggattccagattgtactttcggtgtcatgactaagaactctttgctgacccctggatcctgaagattttcttttatttttttcctaagattttatagttttattttttcatttaagttacattcatttgaattaatttttatctgaaaaatactgtttttctttcactgtaggcttgtctctgtataaattcaatttgaaaatatggcaatatgtatctttgattttcaaatgaacaagctcataaatacaaaaattaaaggcataacaagaaa

SEQ ID NO: 5610 - DNA, 791 bp, Homo sapiens
  SIMILAR (762)..(76): 791254mologous to Mus musculus putative,accession number AK016457,Smith-Waterman Score=899.
  misc_feature (1)...(791): n = a,t,c or g
agttcctctgtcacatcattccacagacgttggtcctcaggtccanaatgcctcatgatactggatcggttggcaaaaagcccgatatcggcgacttcgaagtttcttctcctctttttccttcaggcctttaaaggggttcagggagttgcggtactcacgcctcttagtaaggaagtaggccacacaggctccttttagctccttatcagtgtaattgtggggactggtcaccagctcttgcttgagcttttccagaagaacattcacttctgaaattttcaaagaggacttgatgctttcagacccattcaatctcttgtcattggtgatgtggttatgcacattgtggctcagtttagagagagcaagatcccgcttgcgcctggagttcttctgcccaaattcctcctggtccctgcatggggaagcggtcagccatagagagtgtctcagctccccagtgctcccagggcctgactcttccaaggcactgtccagcgcagcagcggcattgagcatgtcctcagggcggggtggtggcagcttggttccattttctggtcctgtctctggggttgcccgctggattgccagttgtgtggctggtgagagttgcttggcataagcagggaccagaactcgctgtactgcaccctcagaggccacgtaatcatccaccagaggattgagcaggggggccgcctcgctggcagccagcgtgcaccatgggagccgcatgtccctatgagttgctgggaattccaccacgctggactagggtctcagaa

SEQ ID NO: 5611 - DNA, 1929 bp, Homo sapiens
  SIMILAR (1617)..(1027): 801254mologous to Mus musculus putative,accession number AK016457,Smith-Waterman Score=778.
atgtcaagaaggcctcatgtttcttggacccatcctcctcattttctcatcccaggcttctccgagatactgtttatgctgaggaataagcatattctggcttactgttcacagtggagggagtttctccccttctagataagtttttaatccccaccagtgttctgcttcccccagtagagactgtgttaagaaaagaggcaaatttgctttctcagactgcacagagcatctcattatttttgtgaagccccatggccacctatttctgagacatggggcatgggcgaaagccagagttattcttggctgtagattttattcatccttttccaccttgatttcaatgaatgagttcaagtcaggacagcaggttttgtggggttggtcaaaaagatggggagccaggtgcattctcatcccctccctcatcttcctcttcttggaaattaggattgtaaagttctggtggaaggagctgggcttcagcaggaaggcagtctgtctgagggaggcccatacacacggttgggctttggtgccatgcttaggagttagcatccagggtgggtagcagagcttctgtgagggcgctgggcccggaaacggggagggcgggccacccacacacctgggctcgttaagacttgtcctcttcatctgacatcagttcctctgtcacattcattccacagacgttgggtcctcaggttccaaaatggcctcatggatactggatcggttgggaaaaagccgatatcggcgacttcgaagtttcttctcctctttttccttcaggcctttaaaggggttcagggagttgcggtactcacgcctcttagtaaggaagtaggccacacaggctccttttagctccttatcagtgtaattgtggggactggtcaccagctcttgcttgagcttttccagaagaaacttcactactgaaatattccaagaggacttgatgctttcagacccattgaatctcttgtcattggtgatgtggttatgcacattgtggaccagtttagcggcattgagcatgtcctcagggcggggtggtggcagcttggttccattttctggtcctgtctctggggttgcccgctggattgccagttgtgtggctggtgagagttgcttggcataagcagggaccagaactcgctgtactgcaccctcagaggccacgtaatcatccaccagaggattgagcaggggggccgcctcgctggcagccagcgtgcaccctgggagccgcatgtccctctgagttgctgggaagcccaaaggcccaggccccactgaggctgctcccagctgccgcagctcctcaatcaccacctgcacgccgctgcccacgctgtcacactcctcttccacggcagacagagccttaaaggcttccccgggactttccttgagaggcccaggctcctcaggtggggaactatgtgcccggctttccccatcttcatcagggatggacactttcccttgcctcaggtcacccacttcctcctggagacgttttaacaactcattgttggccctggcaagacccagagcagcttcagccaaacccactgccttatcgacccgctggtagataacatgcaggagctgctctgagctctgaacagccaagccatgtccagtcactgtgatgggggtgctgggaggaggattcccaccctgggagcctgtgttgcctccattagtctcactcttacaggcgcagcagcagcatctggcctcgctgccatttcctttctcaatgaggatggtcagaggagcccaggccccaagctgtagggtccggctaccgcgcgcacgcggggagacaccgccccgtttgccttctggctcccggtgattggcggttagacgatggctggggagcagggtcacggacactattggcat

SEQ ID NO: 5612 - DNA, 926 bp, Homo sapiens
  SIMILAR (137)..(292): 631254mologous to Homo sapiens Human secreted protein, SEQ ID NO: 6953,accession number AAG02872,Smith-Waterman Score=157.
ggcttaagcagaagtgcagtggcgcaatctcagctcactgcaacctccgcctcctgggttcaagtgattcttgtgcctcagcctcccacgtagctgagattacaggcttgcaccaccatgttcagctaatttttgtatggtaaagacggagtttcaccatgttggccaggttggtctcgaactcctggcctcaagtgatcctccccctgcgctcgcttcagcctcccaaagtgctgggattacaggtgtgagccaccacgcctggccaagagcctcactcctgtctttagtgattgcactgaagcaggcctcatttttttgcagtcatgctaaaccacaagttagtcaacatttcactaattgacatttcattaggaataggtctccaaggtgaggcataacgtttggggtgttaatctgggattttcgcagttcatctttttgggggaaactgaaagtaccatctcatttgcatgaagtgactcccacactggccctgtatatggactctggtaaaatgtgagtgtggtacagaggaaataggtaagaccccccttatctagcccctctcggcagcagcgggggggtgttacaaaggactagctgttcaaatatcttttgtattgtattgattcccctaatgaataataaatatttaaagtataataactatactgtaggtgggcttatgagtgttctaaatatctaatagctaaattgaaataagtagaaatataaacaatttagcagctttctgtaatacatttacactcaaattataagcagctaattctaaaaaaagatgtcactgtaaactattgagaactatagtattttatatataattatatgttcatgaatttgaacccaaaataattttaactgaaatgctttgaataaagtatcctgtaaatataaaaaaaaaa

SEQ ID NO: 5613 - DNA, 375 bp, Homo sapiens
  misc_feature (1)...(375): n = a,t,c or g
nnnnnnnnnnnnnnnnnnnnnnnnnnnnnnnnnnnnnnnnaaggatatcagaacatattctctgcatatttaggagcaattcccgtatgatatttttttctttctgtgtaaacacatggtgtcatagtccattttgtgctactgtaacagaatatcacagcctaataacnnnnnnnnnnnnnnnnnnnnnnnnnnnnnnnnnnnnnnnnnnnnnnnnnnnnnnnnnnnnnnnnntctgggaagggcttttttgttgcatcatcacacagaggaaggtggaagggtgacagagagagcaagaaggggctgaacttacccttttataacatcaccaatcccaccctaatcacctcttaaatattccacctattaata

SEQ ID NO: 5614 - DNA, 416 bp, Homo sapiens
  misc_feature (1)...(416): n = a,t,c or g
aaactttaacatgcatatgtatgggaannnnnnnnnnnnnnnnnnnnnnnnnnnnnnnnnnnnnnnnnnnnnnnnnnnnnnaaggatatcagaacatattctctgcatatttaggagcaattaccgtatgatatttttttctttctgtgtaaacacatggtgtcatagtccattttgtgctactgtaacagaatatcccagactaataacnnnnnnnnnnnnnnnnnnnnnnnnnnnnnnnnnnnnnnnnnnnnnnnnnnnnnnnnnnnnnnnnntctgggaagggcttttttgttgcatcatcacacagaggaaggtggaagggtgacagagagagcaagaaggggctgaacttacccttttataacatcaccaatcccaccctaatcaccttttaaatattccacctattaata

SEQ ID NO: 5615 - DNA, 429 bp, Homo sapiens
  misc_feature (1)...(429): n = a,t,c or g
nnnnnnnnnnnnnnnnnnnnnnnnnnnnnaaggatatcagaacatattctctgcatatttaggagcaattcccgtatgatatttttttctttctgtgtaaacacatggtgtcatagtccattttgtgctactgtaacagaatatcacagactaataacnnnnnnnnnnnnnnnnnnnnnnnnnnnnnnnnnnnnnnnnnnnnnnnnnnnnnnnnnnnnnnnnntctgggaagggcttttttgttgcatcatcactcagaggaaggtggaagggtgacagagagagcaagaaggggctgaacttacccttttatatcatcatccatcccaccataatctcctcatagaatgtcctcctaaaattcgtacgcgatgataacgccaggcgtgggtcgacgcgggaattacggcctcaacgcaaggtatcagn

SEQ ID NO: 5616 - DNA, 695 bp, Homo sapiens
  SIMILAR (57)..(629): 831254mologous to Rattus norvegicus elongation factor-1 alpha,accession number L10339,Smith-Waterman Score=823.
gcaagggttttgccgccagaacacaggtgttgtgaaaactacccttaaaagccaaaatgggaaaggaaaagactcatatcaacattgtcgtcattggacacgtagattcgggcaagtccaccactactggccatctgatctataaatgcggtggcatcgacaaaagaaccattgaaaaatttgagaaggaggctgctgagatgggaaagggctccttcaagtatgcctgggtcttggataaactgaaagctgagcgtgaacgtggtatcaccattgatatctccttgtggaaatttgagaccagcaagtactatgtgactatcattgatgccccaggacacagagactttatcaaaaacatgattacagggacatctcaggctgactgtgctgtcctgattgttgctgctggtgttggtgaatttgaagctggtatctccaagaatgggcagacccgagagcatgcccttctggcttacacactgggtgtgaaacaactaattgtcggtgttaacaaaatggattccactggcattgccatccttacgggtgactttccatcccttgaaccaaggcatgttagcacttggctccagcatgttgtcaccattccaaccagaaattggcacaaatgctactgtgtcggggttgtagccaattttcttaatgtaagtgctgacttccttaacaatttc

SEQ ID NO: 5617 - DNA, 412 bp, Homo sapiens
  misc_feature (1)...(412): n = a,t,c or g
cttaacatgcatatgtatgggaannnnnnnnnnnnnnnnnnnnnnnnnnnnnnnnnnnnnnnnnnnnnnnnnnnnnnaaggatatcagaacatattctctgcatatttaggagcaattaccgtatgatatttttttctttctgtgtaaacacatggtgtcatagtccattttgtgctcctgtaacagaatatcacagactaataacnnnnnnnnnnnnnnnnnnnnnnnnnnnnnnnnnnnnnnnnnnnnnnnnnnnnnnnnnnnnnnnnntctgggaagggcttttttgttgcatcatcacacagaggaaggtggaagggtgacagagagagcaagaaggggctgaacttacccttttataacatcaccaatcccaccctaatcacctcttaaatattccacctattaata

SEQ ID NO: 5618 - DNA, 2967 bp, Homo sapiens
  SIMILAR (20)..(88): 701254mologous to Homo sapiens Human secreted protein, SEQ ID NO: 6953,accession number AAG02872,Smith-Waterman Score=74.
  misc_feature (1)...(2967): n = a,t,c or g
ttttttttttttttttttagacagagtctctctgtcgctcaggctggagtgcagtggtgtgatctctgctcactgtaatctccacctcccaccttgagcactcctctcgcctcagcctcccaggtagccgggaccacaggcgcacaccactgaacagggataattttttttgtttttgtagagacagtgttttgccatgttgcccaggctggtctcgaactcctgggctcaagtgatccacctgcttcagcctcacaaagtgctgggattacagccactgtgcccagcctattatagctctttataaaacaaaaacaacaaaaaaaccgaacatattgattcatgactccctacctttgcattcacatgattcctttgcctggaatgtcccccttcttctacctgcttgggaattcctagctatatctactaaaattctattcagatgtctttttccaggaagcttttcttaacctaactcacgccattaagttattcgctttatttttctaggttatcttctatttgtttctactgttgtactcatcattctgtaaggtattggggctctgtagaatttctgttacaaaattactttttggtttgataatatttacctacattgagcaatcccataagaaacaggcctgtgaaactctctattgggtttcctaaaacaatattgttgagagattatttaattacctagctttctttttatagggacttgccagagaaatatatttctggtcttatcatattagttactcttcagatttgttttagaaaatagtcaccattaacaccttttagaattggttggtggaaagtttccaatcaaaattgtggtccacctctagcaagctgtaaaattttatgatctccaattagcctcagtttaaactctagtcaggcatttagcttcacaaaaactgaagtcagggatagtcagttttcccatattagtagagagctgggaagtgctgatgtgcacaacctgcagcctgaaatagttgctttttctaaataacagtaaaactgttgctctctgaggatggataggtggatgctatttgttgtttgcaaagcttagggaaccctgtggttgagattttttccaatacatgcattttttttccctttgcaaagggactttggataattgttaattttcccaagaatataattataattcttttattgtttaaatagagttaatagtttatctacagtttcactttctgcagtttcagttatccatggcttgaaaatattaagatattttgaaagaaagaggaagaaaaagaggcgtcagtcacataacttttattacagcacatcgttacgtttctatttcattattagttattgttcatatcttactctgcctaacttataaactttaacatgcatatgtatgggaaaaaaaacatagtatatataaggtttggtactatctgcagtttcaggcatccactaaggatatcagaacatattctctgcatatttaggagcaattaccgtatgatatttttttctttctgtgtaaacacatggtgtcataagtccattttgtgctactgtaaacagaatatcacagactaataacaaataacagaaatttattggcttatagttctgtaggctgagaagtccaaaatcaagatgctggcatctggggaagggctttttggtgccatcatcaccaccnggggaaggtggaagggtgaccagagagagcaagaaggggctgaacttaccccttttataaccatcacccaatccccaccctaatcacctcttaaatattccacctattaatactgttatcatggcaattacatttcaacatggagttttgcaggggagaaacattcaaatcatagcacatgggttaggtgagaaatgaagagtgaggtatacaagagcatccagaaccatactatatacattccagctgttttggtgtagaagcagcacaaatgtagaagctgcattgtttcttgataaaagggccctggaaagatgaccagctatacagtttccactagaggaaatgcagattggcttgtatgactttagagtatgaaatataaagatctggagtctgttccatgttttttccaggcctggtgtgcttattttatggaataccaaaggaaaggagcctccctttgaaagaagcatctaaattagggatgggctcctcatttggaggatgttagaaactacgaatcaatgtctctcatgttcaatggagctcccatttttatcggtttcatgagactattattaatttatttgaatccaagatgagtctcaaatatacccagaagaaaaaaaattaagaaatgaaaccaagactcctaatgctttgaatgttcgtaacattcgagaaaaatttgagcctgggctatataatcaaagtctaggatttgtgaacctaacagggttccactgtcacctgttttcaagagagtgctgagaaaaattccaatctataccttaaacaattaggttaaatgatttaaagaaattagccttcagaggactgaatttttaatgatttttctacttggaaaatgtgacttctaaataaaaaaagtgcttgcttattataaaaccttggttcaaaggtaaatactatgttctgacaagtgtaaaataagtacaagcacatgtgaaaataactgttaacaggcaaatgcttaagaagtgttcttgttttctaaaataaacatttcctgttcctaaagtttttggatcagaaaatggaaaaatataactctagttaatggggatatgcaatttgactgtagaccaataattaattgtcataaagactttaaaaatccttctagattaataatgtgtagaggagtcttagaggattactcagtaaaataaattcaaggtaacaatattaatctaagtttctttaatattcttgatctgggtaaacatttt

SEQ ID NO: 5619 - DNA, 1106 bp, Homo sapiens
  SIMILAR (3)..(572): 811254mologous to Homo sapiens Amino acid sequence of human intracellular signalling molecule INTRA39,accession number AAB64407,Smith-Waterman Score=759.
ttgataaagactgctcacgagcctttttattatatggctcatattctagagctcctgccctaggaggaactgcaagaacattgttgggattgctaaatgaggcaaaactagaatttcattctgttgtacttctggaacctggaaataagcatgcagtaactgaactctccaaaattaaaaaggaattaattgagaaaggacactgggatgatgtctttcttgattccacacaaagaccaaatgggggaaaacccattgataatccaccgcatcctggatcatctaatccactcaggaaggttattattgaagaaactggtaatttgatacagactattgatgtgccagatagcactactgctgctgctccagagaataatcctattaatctagcagatgtaatagcagccacaggcaccacaagtaagaagaattcaagccaagatgacctttttcccacaagtgatactccaagagcaaaagtattgaaaatagaagaagtcagtgatacttcatccctgcagaaagaaaagccattactcatctttgaaatcttacaaagactttctgaactaaaaaggtttgatatggcagtgatgtttatgtcagaaacagagaaaaagaatcgctatggctcagagcaagagtttgtcgatgacttgaagaacatgtggtttgggctctattcaagaggcaatgaagagggggactcgagtggctttgaacatgtcttctcaggtgaggtaaaaaaaggcaaggttactggcttccataactggatccgcttctacctggaggagaaggagggtctggttgactattacagtcacatctacgatgggccttgggattcttaccccgatgtgctggcaatgcagttcaactgggacggctactataaggaagtgggctctgctttcatcggcagcagccctgagtttgagtttgcactctactccctgtgcttcatcgccaggccaggcaaagtgtgccagttaagcctgggaggatatcccttagctgtccggacatatacctgggacaagtccacctatgggaatggcaagaagtacatcgccacagcctacatagtgtcttccacctaa

SEQ ID NO: 5620 - DNA, 936 bp, Homo sapiens
  SIMILAR (1)..(795): 981254mologous to Homo sapiens Amino acid sequence of human intracellular signalling molecule INTRA39,accession number AAB64407,Smith-Waterman Score=1324.
cgatggatagcagcagatgccgctaatgcccttcttccagctaacagagctatggcctatctgaagattcagaaatatgaagaagctgaaaaagactgcacacaagccattttattagatggctcatattctaaagcttttgccagaagaggaactgcaagaacatttttgggaaagctaaatgaggcaaaacaagattttgaaactgttttacttctggaacctggaaataagcaagcagtaactgaactctccaaaattaaaaaggaattaattgagaaaggacactgggatgatgtctttcttgattccacacaaagacaaaatgtggtaaaacccattgataatccaccgcatcctggatcaactaaaccactcaagaaggttattattgaagaaactggtaatttgatacagactaatgatgtgccagatagcactactgctgctgctccagagaataatcctattaatctagcaaatgtaatagcagccacaggcaccacaagtaagaagaattcaagccaagatgacctttttcccacaagtgatactccaagagcaaaagtattgaaaatagaagaagtcagtgatacttcatccctgcaacctcaagccagtttgaagcaggatgtatgtcagtcttacagcgagaaaatgcccatagagatagaacaaaaacctgctcagtttgccacaactgttcttcctccaattcctgcaaactcgttccagctcgaatctgatttcagacaattgaaaagttctccagatatgttgtatcagtatttaaagtggttgctgagccactgtcaggataacacaagagcacagcggctggagaaggcaggctggcagctggcatttcttcggtattactaccacctactggatgttcagaaaataacagtatgcatgtggcagaaagcattctga

SEQ ID NO: 5621 - DNA, 615 bp, Homo sapiens
  SIMILAR (1)..(306): 881254mologous to Homo sapiens Amino acid sequence of human intracellular signalling molecule INTRA39,accession number AAB64407,Smith-Waterman Score=441.
cttcctccaattcctgcagactcgttccagctcgaatctgatttcagacaattgaaaagatctccagatatgttgtatcacgattgaaagcagattgaaccatctttgtatcctaagttgtttcagaaaaatctggatccagatgtattcaaccagatcgttaaaattctgcatgacttttaccattgaggaaagaaaagcccattactcatctttgaaatcttacaaagactttctgaactaaaaaggtttgatatggcagtgatgtttatgtcagaaacagagaaaaagattgcacgtggcattatttaatcacatagacaagtcaggattgaaggatagttctgtcgaagaactcaagaaaagatacgggggttgatttccatttttgctggaaataattgttttttgactttcatatgtaaatttttttctactggaaagtgttttgctttttaaggaaaatgaaattatatagccagggaaaggactatctttggaacataagttaattaactataaggtgaattgtgatttaactagtgagaattgaattccacgtgaactctgtttttctgaaaataaaaatataaacaatgagaaaaaaaaaaaaaa

SEQ ID NO: 5622 - DNA, 939 bp, Homo sapiens; identical to SEQ ID NO: 1576
  SIMILAR (145)..(249): 771254mologous to Homo sapiens Human secreted protein, SEQ ID NO: 5327,accession number AAG01246,Smith-Waterman Score=134.

SEQ ID NO: 5623 - DNA, 1026 bp, Homo sapiens; identical to SEQ ID NO: 1577
  SIMILAR (145)..(249): 771254mologous to Homo sapiens Human secreted protein, SEQ ID NO: 5327,accession number AAG01246,Smith-Waterman Score=134.

SEQ ID NO: 5624 - DNA, 744 bp, Homo sapiens; identical to SEQ ID NO: 2212
  SIMILAR (558)..(334): 901254mologous to Homo sapiens glucose transporter-like protein,accession number M20681,Smith-Waterman Score=359.

SEQ ID NO: 5625 - DNA, 2986 bp, Homo sapiens
  SIMILAR (64)..(1380): 1001254mologous to Homo sapiens general transcription factor IIE 56 kda subunit, TFIIE 56 kda subunit,accession number S67859,Smith-Waterman Score=2270.
agctgtagtgggagtgttccaggattcgccttgtatatttaaagttggagttcgttgctaaagatggcagacccagatgtcctcactgaagttccagcagcattgaagcggttagccaagtatgtgatccggggattttatggcattgagcatgccttggccttggacatcttgatcaggaactcctgtgtgaaagaggaggatatgctggagctgctcaagtttgatcggaagcaacttcgatcagttttgaataatttaaagggagacaagtttatcaaatgcagaatgagggtagagactgctgcagacgggaaaaccactcgccataactactacttcatcaattatcgtactcttgttaatgtggtaaaatataaactggaccacatgagaagaagaattgagaccgatgagagagattcgaccaaccgggcttccttcaaatgtcctgtctgtagtagtactttcacagacttagaagctaatcagctctttgatcctatgacaggaactttccgctgtactttttgccatacagaggtagaagaggatgaatcagcaatgcccaaaaaagatgcacgcacacttttggcaaggtttaatgaacaaattgagcccatttatgcattgcttcgggagacagaggatgtgaacttggcctatgaaatacttgagccagaacccacagaaatcccagccctgaaacagagcaaggaccatgcagcaactactgctggagctgctagcctagcaggtgggcaccaccgggaagcatgggccaccaaaggtccttcctatgaagacttatacactcagaatgttgtcattaacatggatgaccaagaagatcttcatcgagcctcactggaagggaaatctgccaaagagaggcctatttggttgagagaaagcactgtccaaggggcatatggttctgaagatatgaaagaagggggcatagatatggacgcatttcaggagcgtgaggaaggccatgctgggcctgatgacaacgaagaggtcatgcgagcactgctcattcacgagaaaaagacttcctctgccatggctggttcagtgggggcagctgctccagtgaccgctgccaatggcagtgactcagaaagcgagaccagtgagtcagatgatgattctccaccccgtccggcagctgtggctgtgcataaacgagaagaggatgaagaggaagatgacgagtttgaagaagtagcagatgaccccattgtcatggtggctggccgtccgttctcctacagtgaagtgagccaacggccagagctagtggcccagatgacaccagaagaaaaggaagcatatatagcaatgggacaacgcatgtttgaggacctctttgagtgagctttccctaattctttctcctttctctaatgctcagttcaaaaaggaatgtctcatctttgaagaaaagtatttaagtggctttctgcccctcttgatgtaagcaactgtccatccttgtgcaaagattgatggtagagagtttgacgttttatgccagaaactttcccagcaaggtagggtgctgagaatcctacccttccttgctgtcactacagtattaatattttactgtattttcttttctttttttttttttttttggagatgaagtctcactcttgtaccccaggctggagtgcaatggcgtgatctcggctcactgcaacctctgcctcctgggttcaagcgattctcctgcctcagcctcccgagtagctgggattacaggtgcctgccaccatgcctggctaattttttgtatttttagtagagacagggtttcaccgtgttagccaggatggtctcgatctcctgacctcatgatctgcccgcctcggcctcccaaagtgctgtattttcttatctgatttttttcttgccttattaagacataattttctcccttctgaaatgagtgagggaagttcataaggtaaatccttcccatccatctgtttactacaataggttacaataattcactgatcacatccattttatctgttctagccaggcattccaaacaatttcttatactgctgcccaccaaagcagcttgccaacagtcaaatcactgattgggggaaaaaatcctgaaattttgcttagaatttgagcatttcctcaaaattgagatggatcaatatgtaaggggaggtgggagcgtgtgtggaagggggagagatatacttgagtcttatgattaatgtctaaaccagaatttgtgtctttagaactgaccagactggtagattttattgtattgcttaatgtcttttggtttggatttaggatgatagaaaacagaagtataattggtaaacccttaggaagaaattagaaaaacatggacgtaagacaaaaagtctcaaaaaagggtatgaagagtgacaagcattggaaacagagccttagaactgtgtcagttagactgatttggaaatcctttatgtaaagctgagactggtcctggtttagttccctttgggtacagacctcttgtcagtgctataaattgtttaatgaggccattccagcagaaatcaacagaataattgattactcttctctctctctgtcactctccctctttctaaacatcattgaaggctgtctctcttttaatttttgtcagacacagtattttagggtgcatccagatataccattgaacattgtaacctcaggaaaaagtttattttgggttctgatatgtagcatggtattttccctaaggcagaactttaaaaataaagaactttcacacaagggtctgtaacaattgtatatcttacaatatttttccttgcattgtaatttttaagtatttatcattttatagtacacatgtaaagaatatatgagccttgtatggagtgatgtttcatttacctgggttgtgttaatgactgaatgttgacaataaatctgttttatactg

SEQ ID NO: 5626 - DNA, 392 bp, Homo sapiens
  SIMILAR (19)..(333): 401254mologous to Homo sapiens bA203I16.1 (KIAA0970 protein),accession number AL137000,Smith-Waterman Score=186.
ttttggaggccagttcgacgacaatctgagtacaaacaggtgaacaagggacaagactccacatttccaatctaatgcctccagaccaacacagactacaggttccgcgtatgtgcgtgacggcgctgtctagacacctctcaggagctaagcggagcctttagcccctctgcgggttttgtattacaacgaagtgaggtcatgcttacaggggacatggggagcttacatgattccaaaatgaacagcatgatgcctactgatgaacagattgcagccatcattgcgcttggctttgcaactttagccattttatttggctttatataacagacttgctgtatgagggaacccaccaaccttcagggatgatttaaggctcacatcttaaa

SEQ ID NO: 5627 - DNA, 1841 bp, Homo sapiens
  SIMILAR (491)..(1546): 791254mologous to Rattus norvegicus elongation factor-1 alpha,accession number L10339,Smith-Waterman Score=1303.
  misc_feature (1)...(1841): n = a,t,c or g
gcttttttttttttttcgcaacgggtttgccgccagaacacaggatgacgtgaaaaactaacccctaaaagccaaaatgggaaaggaaaagactcatattcaacattgtcgtcattggacacgtagataacgggcaagtccaccactacttggccatgctgatctataaatgcggtggcatcagacaaaagaaccattgaaaaatttgagaaaggaggctgctgagatgggaaagggctccttcaagtatgcctgagtcttggataaactgaaaagctgagcgtgaacgtggtatcaccattggatatctccttgtgggaaatttgaagaccagcaagtacttatgtggactatcattgattgccccagggacacagagacttttattcaaaaacatgatttacaggggacatctcaaggcttgacntggtttggggggccccctttttgggggggttntcccctgattgtttgctgctggtgtttggtggaatttgaaagctggtattcttccaagnattggggcagaccccgagagcatgcccttcttggctttacacactggggtgtggaaacaaactaaattgttcggtgttaacaaaaattggatttccacttgaggccaccctacagcccagaagaagatattgaaggaaattgttaagggaaagtcagcacttacattaaggaaaattggctacaaccccgacacaagtagcattttgtgcccaatttctggtttaaatggtgaccacatgcctggagcccaaatgcctaacttgccttnggttcaaggaatggaaaagtcacccgtaaggatggcaatgccagtggaaccacgctgcttgaggctctggactgcatcctaccaccaactcgtccaactgacaagcccttgggcctgcctctccaggatgtctacaaaattggtggtattggtactgttcctgttggccgagtggagactggtgttctcaaacccggtatggtggtcacctttggtccagtcaacgttacaacggaagtaaaatctgtcgaaatgcaccatgaagctttgggtgaagctcttcctggggacaatgtgggcttcaatgtcaagaatgtgtctgtcaaggatgttcgtcgtggcaacgttgctggtgacagcaaaaatgacccaccaatggaagcagctggcttccctgctcaggtgattatcctgaaccatccaggccaaataagcgccggctatgcccctgtattggattgccacacggctcacattgcatgcaagtttgctgagctgaaggaaaagattgatcgccgttctggtaaaaagctggaagatggccctaaattcttgaagtctggtgatgctgccattgttgatatggttcctggcaagcccatgtgtgttgagagcttctcagactatccacctttgggctgctttgctgttcgtgatatgagacagacagttgcggtgggtgtcatcaaagcagtggacaagaaggctgctggagctggcaaggtcaccaagtctgcccagaaagctcagaaggctaaatgaatattatccctaatacctgccacccaactcttaatcagtggtggaagaacggtctcagaactgtttgtttcaattggccatttaagtttagtagtaaaagactggttaatgataacaatgcatcgtaaaaccttcagaaggaaaggagaatgttttgtggaccactttggttttcttttttgcgtgtggcagttttaagttattagtttttaaaatcagtactttttaatggaaacaacttgaccaaaaatttgtcacagaattttgagacccattaaaaaagttaaatgag

SEQ ID NO: 5628 - DNA, 773 bp, Homo sapiens
tttttttttcatttttttctttttacttgaaaacttgttttaaccatcaaattttggcagttacaaacctgtacactgttgtgtttttttttgttgttgttgtttcttttttttggctgtctttttttttgtttgcttttgtttttttttttccttttcttttctttttttttagaaaaagaacacaagactgaatactgccaccagcaatatatgcaggaacaatccatttccttaagggacaaaatccactctaagtgttagctttcccctttgcataaggtttggtgtgtgatgtgtgtgcaagttgaggtgaatgtgcatgtatatgaagaaatggcatacctcattgtgattctgaaattgcataaaaataaaatacttaataactgggcaaaacacattcttttttacaaatgtcaataaagacaatttttcttgaaaacagagaaagttaaatgaaaacagtaagaaccaaagaaaggttacagtacattttgaaatgagtaaaaaacatcattttcaaatctaaaatccttgtgtgtgtgtgtgtgtgtgtgtgtgtgtgtgtgtgtgtagttacctcaaaagtttgcagaccaacagcgtggatgacttacaattatattcgaccccccaaattaaagcatcctgataggcatcaaatatagtatctacaaaagcctggaaaattgaaaccatttatatacaattttataaacatttcaaacaccaaaacatacatcttttacaaaccagcctgtttgcaacag

SEQ ID NO: 5629 - DNA, 448 bp, Homo sapiens
  misc_feature (1)...(448): n = a,t,c or g
cccccaaggttttttccggaatttttttattccggcccccccaaacccccttttttcaaaaccccggtatttttgggggtaaaacccggggtcnnnnnnnnnnctccctaccaaaaaaaaccaaccaattttgggccaaaaatgggggccctttaaagaatccccctttttgaaaccccaatttgggttttcccaataaagggtttccataaaaaaaaaccccccgttttaaattagcccccaacccgaaaaccccctccggataaaattttnnnnnnnnnnnnnnnngatgattgtatttctagattagcaagaaattagttacttctggctgatttctatttctagctaattaaaacaatctttgccatagcttactctattcaaataaaccggacgcgtgggtcgacccggcacttcnnnccngttcgcatgggagtctatcaan

SEQ ID NO: 5630 - DNA, 438 bp, Homo sapiens
  misc_feature (1)...(438): n = a,t,c or g
ctttttttaacaaaaaacctcccccttttggccgggggtggccatttttggttcccgcaaccttgcgcttctaaggttaaaaaatttttccccccccaccccccccggaagttagattcccgggggnnnnnnnnnnnnnnggggtaatttttttaattttttaattttggaagggcgggggttttttattttgggccgggtgggttttaacccccaacccccaatgtttnnnnnnnnnnnacccccccaaagggttgggtttcagggcttagcccccccgccccactaaaaaagggggannnnnnnnnnnnnnnnnnnnnnnnnnnnnnnnnnnnnnnnnnnnnnnnnnnnnnnnnnnnnnnnnnnnnnnnnnnnnnnnnnnnnnnnnnnnnnnnnnnnnnnnnnnnnnnnnnnnnnnnnnnnnnnnnnnnnnnnnnn

SEQ ID NO: 5631 - DNA, 254 bp, Homo sapiens
ctagtctggtccagtgggtctcaaacttgactgcaacaaatggcccagagatctttttgaagtgtagagtctgactcaacaggtgtgggtggagctgagaggccagcaagatcccaggtggggccgaggctgctcatcctcctaccacattttgagtagcaaggagctaccaagagcagccgacggggtttcattctcgtctactggaagcaaccttaatagacaactgaaaaacaaaacaaaacaactgagat

SEQ ID NO: 5632 - DNA, 2302 bp, Homo sapiens
  SIMILAR (108)..(299): 701254mologous to Homo sapiens Human myelin oligodendrocyte glycoprotein gene,accession number AAZ29204,Smith-Waterman Score= 192.
ttttttttttgagtcagggtctcgctctgtcacccaggctggagtgcagtgacacagtctcggctcactgcaacctctgcctcccaggttcaagtgattctcctgcctcagcctcccgagtagctgggattacacgcatgtgccaacacgcccagctaatttttgtatttttagtggagacggggtttcatcatgttggccaggctggtctcgaactcccaacctcaggtgatctgcccaccttgggatttgcctcccaaagtgttgggattataggcgtgagccagtacgcccagcctaacaaattctaaaagagctgtaacactgacagtctcttcatggtcccagttatttccaaaagggcacgttctgctctggttccttctggtggggttagcaacaggggcagatcccactagaatacagctctcaaaatctactgcacatgggacttaacccaaagtgcttttacaaaaatccctgatcccgggccacattccagatccacttaacatttggaacctcaggttccaaactcagggcatcagcattttaaaaacattcctcaggtgactcccaacatgcagctgatttgccagccagccctctgcagtctgggatcaaaggttcttcaacatgaggtccctggaaccaggcgggtgcttttgcttaaggaactggggaacttgtgggaaaggcagcgtctcagaccccaccccagatctactgaatcagaaactctgggggtggggccagcactttgtttcaacaagccctccaggagattcttaaggcactagtctggtccagtgggtctcaaacttgacttgcaacaaatggcccagagatctttttgaagtgtagagtctgactcagcaggtgtgggtggagctgagaggccagcaagatcccaggtggggccgaggctgctcatcctcctaccacattttgagtagcaaggagctaccaagagcagccgacggggtttcattctcgtctactggaagcaaccttaatagacaactgaaaaacaaaacaaaacaactgagatacctgtttctgccagaaaacccaggccattcactggtcagctgttccaaaaccagagttaagctactgcagctgttcccgcgtgcctgcctgcattccagtaaataatcccacgtggcaagtcagctcacctggttactgccaaagcatgttcccagctggtgtgactcagaggcacaccagaatttctttattataatttggcgatagggtcttgctttgccacgcaggctggagtgccgtggtccgatcacagttcactacagccttgaactcctgggctcaagtgatcttcctgccttagactcccaagtagctgagattattaggcacacgccaccacaacccagcttaatttaaaaatattttttgtagggaccaggtctcactatgttgcctggtttggtatcaaactcctggccttaagggatcctcctgcctcggcctcccaaagtgccgggattataggtgtgagccatcatgcccagccagagcaccagaaatagctcccaactgtagaagggagcctcccttgtaagcgctgttggctcccaaccatcctgtggagtctccaacagcagtccctcccccaaccatgaggcccagagaggcttaacagctttgctgtcacccaacagaaatgctttaagtactgaccactgctggagggaaaggctaccgctaacacttgggatgttttctgacagcctctgaaacttctacgaactgctgaggcataggatcctctcctaaaatttctcccagatcttaacgtcagggctgtctggccctttcatgagtatgtgggttatagtctctggcaggcacttgtgaagagtgtgactgattgacacttttttgcccttgggttggctgggaaagctcagatctccccctctgcatgtccccttgccttaggacctccccatggtgtacttggagttgggacctcaccctggctctcccttatctttccggctgccattttttcccctttctaactttctttccccatacaacttatttgaaatattatctcacggtaacgaaataaagtgtctgtcacctcctgctgtgttgtcatcttgcatgagctatctaaggtctctgttcttcagtttctgcatctgtaaaacgatgacaatgacagagccaacctcgctttgaggatcacatgagttaataaaggcctggcacacagttagcactcaataaatgttagttatgatttttaaaaaaaaaaaaaaaaaaa

SEQ ID NO: 5633 - DNA, 1177 bp, Homo sapiens
atggttttttaccctagatgttcccaccttcagtgctccacgccctccatagaccttcagagaaggtgaaaccaggttatctgggaatctttccagcccgcaggtcgccacggccatccctttgctcccagcctggctccatcagcctccagcttcctttcttcattctgtccttcagggaaggcagaagaaacattggaaagcatctagtccagtgggaagccaggggttggagaaggtgctacatccctcttcccatcaatatcctaaatgttttgggagggcccagagaatggcacccaagagcctgcggggatgcccatcccacacaccccacccagctgttctaaccctgctatccacagccctggaggaactggggctcctggaaggagggaggaggctctccactgtccaccctaacacataccctcccacccaccttccagacccccttggttggcacccctctccctccggttccctttcacccccatggctgtgaatgaccaggacaggtcacacgtgtgttttccattgggtttaatttaatggacgtgcaattttcatttgtaaaattgtggcattagccacctccttcagtggccaggatgtgagtggctacctggctcaactggaggggaccccttgggccctctggggcttcccctcccccacctggttggggtagagcaaaaggatggtcactcttccgyggtctccctgaaatgaatgtatttctcccccccaaaaggggctgatatttaatgttttaataaaggatttttggagaaacaaataaccttaatttataatctgggtgatcccaatcattttttactcccttttgatgccatacatagaggaaagtctagcttttttggcgtgagacttttgcaatgtgcagtgggataaaatgcatttccgttttctggttcgtttttcttgttaacacgcgcacacagacacacacacacaccgttccactcaccacctggacaggcgtcccccagcacggacacgactggcacacaggtgcccacatctcttcctctcagcccctccacctgcctaatgttatgcaacctccttctgatgtatccaccaaaccagtactgaatgtggccgagacgttttcagtaaatcttattacctaccgtaaaaaaaaaaaaaaaaa

SEQ ID NO: 5634 - DNA, 520 bp, Homo sapiens
gaaatttgtttttttcaaatatgtttcctttttgaacttacagaattgttgaaattttctactaacagccagctaaaatttggtatatgttagctctatctgtttcacttggacgtttcattttgaaagaaagaaattttatgtttcacatatagttttatacaaagtagccagtcccataatgaaatgcttgtattgccatagtggtcacacccaagtggtccagtatctcaatggtgaggcagccagactgggtcaagggctgctttgttgaaatgtaataattttcatatgccttctttctctttctctctctctttttttttccttttttggcccaatgttgaagatgtagaactttgtttttaaataatgtttttataatttcattcgtaaacctaagtttgtattttttgtgactttggacttcaacagtttgtatattgggacttctaatgtgattactgtactaaataaattccactaataaacatcttacattaaccccttaaaaaaaaaa

SEQ ID NO: 5635 - DNA, 806 bp, Homo sapiens
  SIMILAR (253)..(324): 541254mologous to Homo sapiens Human secreted protein, SEQ ID NO: 7874,accession number AAG03793,Smith-Waterman Score=62.
aaaaagtcgaagaccctagtccagtgtggaggaactcgattttttggaagtttgtaattacattcaaagtatactttttttgtttgtttgttttccttgagacagagtctctctctgtcgtccaggctggagtgcagtggcacagtctcggctcgctgcaacctctgcctcctgggttcaagcaattctcctgcctcagcctactgagtagctgagattacaggtgcacaccaccacgtccggctgacttttgtatttttggtagggacggggtttcaccatattggtcagggtagtcttgaactcctgacctcatgctctgcccagcttggcttcccaaagtgctgtgattacaggcttaagccacagcgcccgacccaaagtgttcttttttccttgaaaagaagtacagattttttaaaaagctaatattgctgtgattcaactctcaagttacttgatgctatttcttcatttctattgtattcacatgtgaaagcatgtgatcagttgtcacggcatcaaagataggagagtttctttttttttaggtgggcattatttatgaccttttctttggaagagtaaggacattaaaatgtaacatgcatgatgaaaatctaagtggagatgatatttgtggttaattatgatattgagtggtgcatgaggtaggtgtttagagtaatattcttttgcattatagtaagaacatttaagttttgttaaaattaaaaaattagtagtacgttattttactatttgtacttttatgtaataaaatgcagtacatttttaaattttca

SEQ ID NO: 5636 - DNA, 1443 bp, Homo sapiens
  SIMILAR (72)..(299): 651254mologous to Homo sapiens PRO2550,accession number AF130089,Smith-Waterman Score=230.
ttttttttttaaatagggcctcactctgttgctcaggctggagtgcggtggtgtgatctcggctcatgtagcctcaacctccccggctcaagtgatcctcctgcctcagcctcccaagtagctgggactacaggcgttcactactacacccagctaatttttaagttttttatagagatgagggctccctaaggtggcccagggttggtctcgaactcctggactcaaagtatcctcccgcctcggcctcccaaagtgttgggattataggagtgagccaccacaccggccaagatgcttttcaaactgatacagatgacaatgggagcctcataaagatggcttttgtttcttcccttcaaggtcatttacttgtacgagacagaaaaagatagcattggggacatgggatgggggagggagggcaatagtggaacgaactttccatgggaaactttcccttttgtaagttgagggccaggggtagggatattttttagtttgtgattttacatttatctgtacatactttttccaagattgatccatttttataaccatggttttcctgaaatcctcaattcatcaatatgaaggaaatgaacccacataggactttatgccaataaataacagtgcaagtgaggtataactcctaactgatgttccacaaaacatttttgatttcaggtttgtatgatgtagtttttaatcgtacattttccatatgcttcaaactaacacattttttaaagctttcccccacttttctctctatttgtattgttaggccatcttggaggtgatggttggttttaacataaaattgtaccggttggaattggggcttacgggtgtaaacactgatgggtatatcagtatctgagaccccaaactcttccaaatactgatggtgcattttaattcttgaagtgaaatctgtgcaataaaattaccagactgtctgcaaaactggccttgcaatcttctgttgtatccagaggtatcattattgatttaaaaaaaatctcattaatctctactggtaatttatagggaatctgatcagtgattcaagaacatagtaattctgcattgccttgaataattaaaaagttatattttattcacggtattgcagtggtaatttgtggtcatgaaagcataacctcagtgctctctaggtttcttaagtggggtgactttatggcatctttaatcatcgatcaatgggcagcaatcagaaacaaagttctcagcattatgcagttaatgtccttcatctacttctaacacttagtaaaggaattgattggctaggtataaaaagagaattaacgaaacctattttattggatctttaagtaataatatctaaatacatttcgttcaaacatacatatgtagctgtttggacattttggacaaagacacattgagttg

SEQ ID NO: 5637 - DNA, 378 bp, Homo sapiens
  SIMILAR (2)..(301): 801254mologous to Homo sapiens hypothetical protein,accession number AL050158,Smith-Waterman Score=408.
cttggacaccccattgggggctgctcctgccgcttttttcctgccaagcctgaatcaatgtttgatctacaaccctatgccagttcgtcccctcaaagcttggcggctaaagactggtatcctgactgagccacgggtgaagggagaagctcttggagcaggcatgatgcccaccggtgtttcaactgcctcctcgcccagctaccctttggccccattggggcctcgattgcctcttcaggattgtatgcatcaagccttgtcctgagcccctttgtctgacgctctgtgtatcgctctttgaatcgagtttggaagaaaagttgaattaaatgagtggcggcatgatggtagggccggacttactggttcaagttt

SEQ ID NO: 5638 - DNA, 2446 bp, Homo sapiens
tggggcccagcaaaccaagaaagacaaggataagaaaaatgcaagcttcacataaagcctggcaagccaaggatgttcccgcattcacctgcttttgcagtaatatcgtatctctgccatgtgtgttctttagttttattttattttattttatttttttacccttcctcaaacaccaggaactaataattaactcgttttgctgaatgttgttgggtggtagaaaatgataggaacaaggggaataacccgcggaatgcttcttgtggcagctgggactctgtttccggaaagtaaatgatttgctttttatgcctgttctgaatggcagcacgaagccaggcctgttacttgtatgtcgctttggacagaggaaagttggggtaaaatgctacctgtacggtctgacatgaaaacttctcaccgcctcagcagctggaactaaaaacctggaatagccatggacaagagtttggcattttcttggatggatttcatcttccatggagtggcacaatccctggaacttcactgtcttttctccacacttgtcctaagccaaggtaggatttgtacgtggacaggactgggtgagcaagccttatattttattttttacccttgcatggacattttccattttaatcaataacattatttggcctgagcttgtgggtctggttcagactgtctcctctcaagggtttgaaactgcatctgaatgcctcccctccaaccctggccaagtaagaagaagactggtatgaagaaaactatgattaagttcacatttactggtgcatccttgatcctctcacaagatagaggtcttaaaggttggatcatgtaacattggcttagttagaagaatcttcttctaaggatgatggggcctttctaccagccctgcttaccacctaacagtaaggaatcctttccataaaaccaccacctccagtttgttccccagtgggccttagaggggaggaccctgatgactgattcccaggatacttgtacttctaataacatttttcatgaatcatgagaaaatttccacagatacttccccttaggaaaatttggttataaactcttgtatcattgggtagcacaaattttgggcgaggccttgtcaaattttaagggtgggaaataggaaggaccacaacatgacccgtaagtcaagaaggtagacatttcatatccagcttccttgcttagtctcctttcagtatttggcaataaaagaaagaagaaatagaacagctgaagtctcaaatcattgtctggaattttcctcaccttggctagctccacctgctctttgtctaaggcccttgcctcatcagggattagaactggcccatatgccagaacctgtactaaatgcctaatttgtatggaagagtgcatatttaatctcttttctatactgctcctttctgatgcttatcctttcatctgtgtgattgttttttcccctctactaacaagatcctcccagctttctctctacatgtagaaaggataacatttctcatgaacccactgcccctctgcattttcctcactggttaggagattaagtaaatagggataggaatatggctgcgtctcccctggacacacactttcttttttggaatgaggcaagtctccattttggatttcaggcaaaggatttttttctcctttttctttgtccctcaaccatacttagaggaaagaaggaatggtcttccatgaactgattatgcttaattaagcaaagtaaggaaattacttccatggaagcctaaacaaagctggaatagaaactacacactagacacagcagtagtcatagtcttcacaggtttaggagcctactggaccaacattcttgcttttgcttttggttttttaaataattctagcctgcagctaattgtgcagcaaccaaatatcagctggcttgctgctttcaaaccatggggctgaatttgctccaaggctgtgcatcagaccaaaagctttgaatatttgtgttgtatgcttgttccaaccaccgcttgtgtgagcatttttgtgggcttgtacaggaaagtacacttttaaattggtctcttgcatcactaaaaattttttaaaatgaggcataacaacggaaagggcatccagctggactttttgattcccaggattattgattggggttgacttttttgcattaaatttttcccagcaaaataaatcatatggcgagtcagggaataaaaagtcaaaagaaacaaatagaagcttttttttttaaaaaatgtattgcttctgaacttttttctgccactgctccctagccctgttttagtttgttattgctgcttttcttttttctttctgtatctatgcctttttttcacagtagtccttggctctgcacggaataaatgataccctcaaatct

SEQ ID NO: 5639 - DNA, 447 bp, Homo sapiens
  misc_feature (1)...(447): n = a,t,c or g
agcctcctccagccttctntagcctcctccagccttctccggctttctttagcccagccttctgtggccttctctaaccttctgtagtccagccttctccagccttctccagccttctatagccttctccagctttctctagccttctctagcccagccttctctggccttccttctctggccttctctaaccttctctaaccttctctaaccttctgtagtccagccttctcccatcaacagaagaaacgcctgcaggacagagacaggaactgcagctcttccctgtagggggcgctgctgatgcttactttccctttaaatgtttcaaaattctctccagtgaatgtttgaaatgaaactttgttttcatacaattaaagagatgaatttaaaaagacaaaaaaggaatgtacacaccnctgttcagttcctgactgtgccacc

SEQ ID NO: 5640 - DNA, 430 bp, Homo sapiens
  SIMILAR (2)..(70): 601254mologous to Homo sapiens PRO2550,accession number AF130089,Smith-Waterman Score=47.
cctcagtcttctgagtagctaggactacagatgagcaccatcacaactggctaatttttcaatttttttgtagagatggggtcttgctgtgttgcccaggctggtctcggactcctggcctcaaatgatcctcctacctccagttcccgacgtgctagaattaaaggcataaggcaccacttctaggcaaaaatattatttattaaatattatttaaaactcttcatgcacgggtaaaaagatccattcaaagtgcaaggtaaacaaacaggttttaatgtaaccaaaatatgaaaggttcactgatgtgctttcagatttcacactgcaactaacttgagaaagtatcctgtgtcaaattttactgtagtatcaaagaagaatatccacagttgcctggaaggtcctttaaaatgcatcgtccttcttt

SEQ ID NO: 5641 - DNA, 251 bp, Homo sapiens
  SIMILAR (3)..(80): 961254mologous to Homo sapiens Human secreted protein clone ck213_12 protein sequence SEQ ID NO:60,accession number AAY94927,Smith-Waterman Score=134.
  misc_feature (1)...(251): n = a,t,c or g
ttgagaagaagatggctgacttccacaaggaggagatggatgatcaagataaggacaaagctaagggaagaaaggaaactttgattcttgaaagagaaaacaaaagcatgtgaataaactttgaagtgttcacctcagtttgggaccaaactgcttggttctttgtaaaaaccggttttgtatgtcaaggagattttcccacaggaaagtnttccttttccattactcgagaggcacaggtcaatgtccgg

SEQ ID NO: 5642 - DNA, 4480 bp, Homo sapiens
  SIMILAR (203)..(3067): 1001254mologous to Homo sapiens thyroid hormone receptor- associated protein complex component TRAP150,accession number AF117756,Smith-Waterman Score=4999.
ggcacgagcgaggttcgggctggttgttccgttgcgagctgcagctgcgatctctgtggtaggcccagaagtgtatgctgacttgtaaagtgaagaagccagtggtgctgcgggtgttcttttggggtagtgtctgggatccagtacgagttgaatcattgttcaaataaggtgtaattgaaaagtgatcctctcttcagagatgtcaaaaacaaacaaatccaagtctggatctcgctcttctcgctcaagatctgcatcaagatctcgttctcgttcattttcgaagtctcggtcccgaagccgatctctctctcgttcaaggaagcgcaggctgagttctaggtctcgttccagatcatattctccagctcataacagagaaagaaaccacccaagagtatatcagaatcgggatttccgaggtcacaacagaggctatagaaggccctattatttccgtgggcgtaacagaggcttttatccatggggccaatataaccgaggaggctatggaaactaccgctcaaattggcagaattaccggcaagcatacagtcctcgtcgaggccgttcaagatcccggtccccaaagagaaggtccccttcaccaaggtccaggagccattctagaaactctgataagtcgtcttctgaccggtcaaggcgctcctcatcctcccgttcttcctccaaccatagccgagttgaatcttctaagcgcaagtctgcaaaggagaaaaagtcctcttctaaggatagccggccatctcaggctgccggggataaccagggagatgaggtcaaggagcagacattctctggaggcacctctcaagatacaaaagcatctgagagctcgaagccatggccagatgccacctacggcactggttctgcatcacgggcctcagcagtttctgagctgagtcctcgggagcgaagcccagctctcaaaagccccctccagtctgtggtggtgaggcggcggtcaccccgtcctagccccgtgccaaaacctagtcctccactttccagcacatcccagatgggctcaactctgccgagtggtgccgggtatcagtctgggacacaccaaggtcagttcgaccatggttctgggtccctgagtccatccaaaaagagccctgtgggtaagagtccaccatccactggctccacatatggctcatctcagaaggaggagagtgctgcttcaggaggagcagcctatacaaagaggtatctagaagagcagaagacagagaatggaaaagataaggaacagaaacaaacaaataccgataaagaaaaaataaaagagaaagggagcttctctgacacaggcttgggtgatggaaaaatgaaatctgattcttttgctcccaaaactgattctgagaagccttttcggggcagtcagtctcccaaaaggtataagctccgagatgactttgagaagaagatggctgacttccacaaggaggagatggatgatcaagataaggacaaagctaagggaagaaaggaatctgagtttgatgatgaacccaaatttatgtctaaagtcataggtgcaaacaaaaaccaggaggaggagaagtcaggcaaatgggagggcctggtatatgcacctccagggaaggaaaagcagagaaaaacagaggagctggaggaggagtctttcccagagagatccaaaaaggaagatcggggcaagagaagcgaaggtgggcacaggggctttgtgcctgagaagaatttccgagtgactgcttataaagcagtccaggagaaaagctcatcacctcccccaagaaagacctctgagagccgagacaagctgggagcgaaaggagattttcccacaggaaagtcttccttttccattactcgagaggcacaggtcaatgtccggatggactcttttgatgaggacctcgcacgacccagtggcttattggctcaggaacgcaagctttgccgagatctagtccatagcaacaaaaaggaacaggagtttcgttccattttccagcacatacaatcagctcagtctcagcgtagcccctcagaactgtttgcccaacatatagtgaccattgttcaccatgttaaagagcatcactttgggtcctcaggaatgacattacatgaacgctttactaaatacctaaagagaggaactgagcaggaggcagccaaaaacaagaaaagcccagagatacacaggagaatagacatttcccccagtacattcagaaaacatggtttggctcatgatgaaatgaaaagtccccgggaacctggctacaaggctgagggaaaatacaaagatgatcctgttgatctccgccttgatattgaacgtcgtaaaaaacataaggagagagatcttaaacgaggtaaatcgagagaatcagtggattcccgagactccagtcactcaagggaaaggtcagctgaaaaaacagagaaaactcataaaggatcaaagaaacagaagaagcatcggagagcaagagacaggtccagatcctcctcctcttcctcccagtcatctcactcctacaaagcagaagagtacactgaagagacagaggaaagagaggagagcaccacgggctttgacaaatcaagactggggaccaaagactttgtgggtccaagtgaaagaggaggtggcagagctcgaggaacctttcagtttcgagccagaggaagaggctggggcagaggcaactactctgggaacaataacaacaacagcaacaacgattttcaaaaaagaaaccgggaagaggagtgggacccagagtacacacccaaaagcaagaagtattacttgcatgatgaccgtgaaggcgaaggcagtgacaagtgggtgagccggggccggggccgaggagcctttcctcggggtcggggccggttcatgttccggaaatcaagtaccagccccaagtgggcccatgacaagttcagtggggaggaaggggagattgaagacgacgagagtgggacagagaaccgagaagagaaggacaatatacagcccacaaccgagtaggggccacccttgacgggattcctgcccaggggagagaggcgctgggaagatggctggtgaggagcttaacagaggaacctcaagaagattctgaaaatcctacccccaccccccaccagccgcacagattgtactaccgcgagaggcatccctggcgctgtctcccactggacagaggaggctggccatggggcccaggggtcaggcccagcttttgagcagaatacaacgcattgggctttagctgtttttctcatttgttggtgtgtggggtgggggcaggggtagggcgggagagcgatgcttggatttttgtttcctattagaaaccaacagttttgttctaatttcatttcatttggagctaagatgactaatttgatgattttcgatctcttttcccctgtcctgattttaaaagccccctccttttttttttttttttttctttttttaggcatatgtagtaatattagaaacatttaatttggggaaactttgattcttgaaagagaaaacaaaagcatgtgaataaactttgaagtgttcacctcagtttgggaccaaactgcttggatctttgtaaaaacccggttttcgtatgtcaaggaggagtttaaggcctttccgaccaccttgtgttaccattctgatgttgccgccatgtatcacgtggatgttgctccttaccacacctcacgtgcccatgagcacatatttcctgatttcttctggggctggacttccccgtttctccaccagcagctccagtatcccaaacttttctagtcctgctgatcctcccaggcaacggggtgggaaaactgggaggggcagtgtctgggtttgtttttcttaaggaaacttatggaattttatttatcttttaacaaatatggagaaaaattttttcaatattttttattaatctttttataaaatgaaaaggaaactcctatgaatcgattaaggaagggtggttatggcttgggtggttcaggggttttttttgggtttctttttttttttctttgtctttttaaccttaagctgtttaaagttgaagcattcctcagatgtttggggggaaacatccctcttaaaatgggtccttgtgcttgccttctggggaggcggtccctaaccagttgaatcataagggcatttatgcagatgttataggcggactgcacccacctctccccgcccagcgctttgcccacttgggttgttgtgcctggctttccccttactttgctacatttctatagttaagttgggttttacttgaatggattcatggtttagggggggaaaatgaaaatctcccttaaaaatttgttttcaactcctcctgcaaataaaataaatgaagtggcagatgtaaaaaaaaaaaaaaaaaaaaaaatt

SEQ ID NO: 5643 - DNA, 370 bp, Homo sapiens
  misc_feature (1)...(370): n = a,t,c or g
ttccccctccccccaagtaaattttataaagggccccaaacccccccctcccnnnnnnnnnnttttccaatccacccacttgggggccaggtccccaaccacccccctcgaaattttcaaagtttgccaggttcccttttctccctccccccttcccgtttaagaaggaaccccccnnnnnnnnnnttttttttccaacaaaagaggggactgttatttaaaaaaacccccctttttccggttttcaatccccagatagtattaaataaggccgggttgaaccccctgggggaaccaaacggggaannnnnnnnnnnnnnnnnnnngagttggagnnnnnnnnnnnnnnnnnnnnnnnnnnnnnnnnnnn

SEQ ID NO: 5644 - DNA, 1344 bp, Homo sapiens
  SIMILAR (17)..(133): 841254mologous to Homo sapiens CGI-85 protein,accession number AF151843,Smith-Waterman Score=152.
caggacttccgcacgagagaagagagatttaaataggcttaaaaagttaggtgacagcagcaaaaattcagactgttaatctgtcagctctaacactgatgcagatgcgactcaggaaaaaaacaatgcaacttctaaccgaaaatcttcagttggcgtaaaaaagaatagcaagagcagaacgttaacgaggcaatctatgtcaagaattccagcttcttccaactctacctcatctaagctaactcatataaataattccagggtaccaaagaaactgaagaagcctgcaaagcctttactttcaaagataaaattgagaaatcattgcaagcggctggagcacaagaatgcttcaagaaaactcgaaatgggaaacttagtactgaaagagcctaaagtagttctgtataacaaattgccccataaaaaaagataaggagccagagggaccagcccaagccgcagttgccagcgggtgcttgactagacacgcggcgagagaacacagacagaatcctgtgagaggtgctcattcgcagggggagagctcgccctgcacctacataactcggcggtcagtgaggacaagaacaaatctgaaggaggcctctgacatcaagcttgaaccaaatacgttgaatggctataaaagcagtgtgacggaaccttgccccgacagtggtgaacagctgcagccagctcctgtgctgcaggaggaagaactggctcatgagactgcacaaaaaggggaggcaaagtgtcataagagtgactcaggcatcgtccaaacgaagtcacgacaaggaaaacttgcgaaacagtttgcaaaacgtacaggaacctaactccagggccggagtttcctggaaaagacgacgcggtaccagatttgatgggtccccattctgaccagggtgagcacagtggcactgtgggcgtgcctgtgagctacacagactgtgctccttcaccccgtcggttgttcagttgtgacatcagatagctttcaaaacaaaagacagctttagaactgcaaaaagtaaaaagaagaggcgaatcacaaggtatgatgcacagttaatcctagaaaataactctgggattcccaaattgactcttcgtaggcgtcatgatagcagcagcaaaacaaatggaccaagagaatgattggaatgaactcttcccaaataagcatcaagtttaagccaaagaccatgacaacgataacaatctctatgtagcaaagcttaataatggatttaactcaggatcaggcagtagttctacaaaattaaaaatccagctaaaacggggatgaggaaaatagggggtcttatacag

SEQ ID NO: 5645 - DNA, 413 bp, Homo sapiens
  SIMILAR (1)..(144): 1001254mologous to Mus musculus putative,accession number AK002848,Smith-Waterman Score=263.
  misc_feature (1)...(413): n = a,t,c or g
ctaggagaatgggtaggcctttgtaaaattgacagagaggggaaaccccgtaaagtggttggttgcagttgtgtagtagttaaggactatggcaaggagtctcaggccaaggatgtcattgaagagtatttcaaatgcaagaaatgaagaaataaatctttggctcacnnnnnnnnnnnnnnnnnnnnggggggcccgtttaaaagaacccttggggggcccaaattttacccggcattgcaaggcataacttttttccttatggggggccattttaaaccttacttgggaattttggaaaagaacctttttttttggggggggacaaattgggacaacctccctccaaaatttaaaggttctagggaaaataaaaaattttaaggggaaaagggggtaaacctaccgccttt

SEQ ID NO: 5646 - DNA, 485 bp, Homo sapiens
  SIMILAR (321)..(476): 651254mologous to Drosophila melanogaster 40S ribosomal protein S12,accession number X89659,Smith-Waterman Score=170.
cgccgagtcgcgcggaggcggaggcttgggtgcgttcaagattcagcttcacccgtaacccaccgccatggccgaggaaggcattgctgctggaggtgtaatggacgttaatactgctttacaagaggttctgaagactgccctcatccacgatggcctagcacgtggaattcgcgaagctgccaaagccttagacaagtacgtgtatcagtctcaatactgtgggttcttgcaaccggaacaaaactgccacccaagggaagaaggcatggagttcatggtgttagcgcaaaagttctgaatggcatccgtcctaccggaaacctaggaaaaggcgccaagcccatctttgtgtgcttgcatccaactgtgatgagcctatgtatgtcaagttggtggaggccctttgtgctgaacaccaaatcaacctaattaaggttgatgacaacaagaaactaggagaatgggtaggccttttgtaaatt

SEQ ID NO: 5647 - DNA, 532 bp, Homo sapiens
  SIMILAR (269)..(376): 971254mologous to Mus musculus putative,accession number AK002848,Smith-Waterman Score=186.
gttttggccagaagttttaaaaatgacttacaccaattcagtgtgtcagggacagaggttttactgaagaccagttgtaggttaattgaagatgtatatgctccctagcaggttcttcagactcaagcaattttgtacgcatttatgtgttcagtggattggctgcttatgtttcgcaagtgttagtgcaaagataaccctcctaaaatgcaagaatgatggatttggatctgagttttagctccattttcattgtaatttgaatttcaggcgccaagcccatctttgtgtgcttgcatccaactgtgatgagcctatgtatgtcaagttggtggaggccctttgtgctgaacaccaaatcaacctaattaaggtaaggctgctaaggattgtgttgggactaatgttcagtgatgcttgtatatgggggtaaattctgtgaagtctcaagctgttcattttgtgcaggtgtaaacattacgtgcacctgatactgtcggccattttaaagatgattgtaggtagaagcatt

SEQ ID NO: 5648 - DNA, 552 bp, Homo sapiens
  SIMILAR (74)..(136): 951254mologous to Mus musculus putative,accession number AK002848,Smith-Waterman Score=97.
  misc_feature (1)...(552): n = a,t,c or g
cggacgcgtggggtcgcgcggaggcggaggcttggttgcgttcaatattcagcttcacccgtaacccaccgccatggtcgaggaaggcattgctgctggaggtgtaatggacgttaatactgctttacaagaggtgtctgaagactgccctcatccacgatggcctagcacgtggaattcgcgaagctgccaaagccttagacaagcgccaagcccatctttgtgtgcttgcattcaactgtgatgagcctatgtatgtcaagttggtggaggccctttgtgctgaacaccaaatcaacctaattaaggttgatgacaacaagaaactaggagaatgggtaggcctttgtaaaattgacagagaggggaaaccccgtaaagtggttggttgcagttgtgtagtagttaaggactatggcaaggagtctcaggccaaggatgtcattgaagagtatttcaaatgcaagaaatgaagaaataaatctttggttcacnnnnnnnnnnnnnnnnnnnnngggggggctctttaaaggaacccaattatactaccct

SEQ ID NO: 5649 - DNA, 371 bp, Homo sapiens
caacaataacagcaacaacgaaccttggggattctgatttctgaggtgccacattatatgatttaaaatatccaggtgaatacaaaatgctataaggcatacaacaaaacacggatgtagactcatgcacagtggaaaaaagcaatcaattacaactatcacctgatgaaatgcagatgctagatttactactcagagatgacatactgactatatacctaatggtcctagaactaatgaacctacggctcatgaattgataggataacactgatgaccatctcacttccgaacctgagtagagcaatataacattaatgcagatctgaagtcttaatatcagcatagtatggaccgtatgttatctggaa

SEQ ID NO: 5650 - DNA, 688 bp, Homo sapiens
gggtgaagctgtggccagctcagccacgtgacaccttgtacttgcttccctccttgcctgcctcgcttccattttccttccctctgttggccttgggcagtgtgacctcgtagggtctcagaaaacaataccccgaaatgaaggcctccctcggaagcaaacatttctctctgaccttctcctgccctcctgtctctggttcccttattctcccccaaggctagctataaaaactacaatccctcttcaccaaaagcctgccctaaaacctaaaaatattactctaactttcctctttctttctgtgtaaaattgggccatagggaaattatttggacctttgtctggattgtagggtcaggaaggacccccattccagagagagtcctgcgccatatgaggaaggaaggaatgctgcgcaaagaggccgaaaagaatcttgacagacaggcctcgctgggttccccactcagtctatcagcattagatcaggctcttttgtccacccgtatttttacccggccatccatactttgttgaactgaagcctaaaaatggccagtttttcctgtatctttgggtgttcattttgaaggttcttgtatctcataaaaccatggtcaaataaatttgtgtatttgtttgccttttttcctaaaaaaaaaaaaaaaaaaaaaaaaaaaaaaaa

SEQ ID NO: 5651 - DNA, 541 bp, Homo sapiens
  SIMILAR (12)..(98): 551254mologous to Homo sapiens Human secreted protein, SEQ ID NO: 7867,accession number AAG03786,Smith-Waterman Score=74.
  misc_feature (1)...(541): n = a,t,c or g
ttttttttttttttgacatagggtcttgctttttcgcctaggctggagtgcagtggcatgatcatggctcactgcagccccaacctccagggctcaagtgacatgatattcccaccacagcgtcctgagtagctgggactacaggtgcgcaccaccatgcctagctaattttttgactttctgtaaagatggggtcctcccctttggttgccccaggctggtccatgaagtcctggactcaagcgaatccttccctgcttcagcctccccaaagtgcctgggattacaggtgtgagccaccatgccttgtgagaaatacttttgagtatgtttgaaacaacttggggcatggtgatcctactttttccaaacataagttttataaaatcaagcatacccttgctttattgggactttgactttattatgccctcacagatattgcagggttttttttttttaaaggaattaaagggttttgggccacctctgagtngggagccaagtgtttcagcaccattttttccaaccagcatgtgct

SEQ ID NO: 5652 - DNA, 918 bp, Homo sapiens
ggttctaggtatttggagagtccctggcgggtcagggaaaatggagaagagggagagtgagaaacaaatcttgccaagacccattggatgcatctgggaaagaggcaagagcccaggcgaggctccctctgcactgcccatgccttggagtaacccacctccaggaacttgcacaccctcctgccccacatacaggtgcacacctctcccccgatgaactgatgccccttctagacacacccatttagctcctaggaatggtgagactatatttgcatgatgtggccactacacacatcaccagagactgtggtccaggttcgaagagtgaagcctgggtaactggcagggagacacgcgcacatctcccacctagagcagccagaatgggacatcaccccacaggctttagggcgctgggaagagaagggtgatctgggaggaggcacgaggagaccagaaggcagaaggagggttaggatgatggagtcagcaacataggctggccatcccctcagcccctcattgttcttgatagcagtgcatccaggagctcgaggtggggttggggcttgggccgctctgcaggaagtgtggatggatgcatctctgctttccatctcagtgtaaggaggacagctggcttcctcggtgccctcagcccctgttctgtgtgggtctgaggacttgggccctctgaggtccttctgtgtctggggtgggctctgtggctcacctgattctctccacaccccgctgtgaaatgagtgctgttctcttctgccctacatccccaagagtccctggagcgatctactgcccatcttctccaaaaacacacaaggagagccctgccccagtccaagctgcaattctgcaagagctttccggggcctggggcacctcgacccgggagat

SEQ ID NO: 5653 - DNA, 534 bp, Homo sapiens
  misc_feature (1)...(534): n = a,t,c or g
atgtggggttggaaagaaaagattaaaataaacacatttgtatactgttggtgggaatttaaattggtgcaaaatttttggagtacaacttggcaacatattttaaaattttaaatgtcctttgatgcactactaggaatttatcctaaatatatacttacaaatgtaacctaagatggacagtattgtaaaaattgaaaataacctgagtattcatcaattttatcattaaataaagttatttattgctaccgnnnnnnnnnnnnnnnnnnnnnnnnnnnnnntnnnnnnnnnnnnnnnnnnnnnnnnncaataaaatataaaaaactacaaaaaagaaggataaaacaaaaaaatccctcccctttgggacgccccaggcggggggattacaacgccccaaaatnnnnnnnnnnnnnnnnnnnnnnnnnnnnnnnnnnnnnnnnnnnnnngcgcctctttttttccaagaagagggggcgttcccctttaaagcgagctaattgtgaagctgggcgtgcgggctgtaaaaac

SEQ ID NO: 5654 - DNA, 402 bp, Homo sapiens
  SIMILAR (45)..(401): 1001254mologous to Homo sapiens tumor protein (AA 1 - 172),accession number X16064,Smith-Waterman Score=617.
cccttcagtcgccatcatgattatctaccgggacctcatcagccatggtcagtaggacagaaggtaacattgatgactcgctcattggtggaaatgcctccgctgaaggccccgagggcgaaggtaccgaaagcacagtaatcactggtgtcgatattgtcatgaaccatcacctgcaggaaacaagtttcacaaaagaagcctacaagaagtacatcaaagattacatgaaatcaatcaaagggaaacttgaagaacagagaccagaaagagtaaaaccttttatgacaggggctgcagaacaaatcaagcacatccttgctaatttcaaaaactaccagttctttattggtgaaaacatgaatccagatggcatggttgctctattggactaccgtgagg

SEQ ID NO: 5655 - DNA, 411 bp, Homo sapiens; identical to SEQ ID NO: 5468
  SIMILAR (99)..(203): 1001254mologous to Oryctolagus cuniculus translationally controlled tumor protein,accession number AJ225898,Smith-Waterman Score=181.

SEQ ID NO: 5656 - DNA, 748 bp, Homo sapiens
  SIMILAR (90)..(314): 1001254mologous to Homo sapiens tumor protein (AA 1 - 172),accession number X16064,Smith-Waterman Score=380.
ccgagcgccgctccggctgcaccgcgctcgctccgagtttcaggctcgtgctaagctagcgccgtcgtcgtctcccttcagtcgccatcatgattatctaccgggacctcatcagccacgatgagatgttctccgacatctacaagatccgggagatcgcggacgggttgtgcctggaggtggaggggaagatggtcagtaggacagaaggtaacattgatgactcgctcattggtggaaatgcctccgctgaaggccccgagggcgaaggtaccgaaagcacagtaatcactggtgtcgatattgtcatgaacacatgacctgcaggaaacatgtttcacaaaagaagcctacaagaagtacatcaaagattacatgaaatcaatcaaagggaaacttgaagaacagagaccagaaagagttaagcctttttatgacaggggctgcagaacaaatcaagcacatccttgctaatttcaaaaactaccagttctttattggtgaaaacatgaatccagatggcatggttgctctattggactaccgtgaggatggtgtgaccccatatatgattttctttaaggatggtttagaaatggaaaaatgtgtaagtacaaggaagtgggttaaaataaataatgtaaaaaagacattttagatgtgatttgcaattgttttgtgacactgagaatgagttttacagcgttctgaaacatggttttagttttctctttggggatcaagagaa

SEQ ID NO: 5657 - DNA, 552 bp, Homo sapiens; identical to SEQ ID NO: 1090
  SIMILAR (540)..(4): 701254mologous to Homo sapiens dJ475N16.3 (novel protein similar to RPL7A (60S ribosomal protein L7A)),accession number AL035587,Smith-Waterman Score=612.

SEQ ID NO: 5658 - DNA, 507 bp, Homo sapiens
  SIMILAR (507)..(154): 921254mologous to Homo sapiens dJ475N16.3 (novel protein similar to RPL7A (60S ribosomal protein L7A)),accession number AL035587,Smith-Waterman Score=533.
ctagttaagctggcggatgagctgattgatgcgttcaccccgatagccaggtgtgcccatctccttgaggaagcccactctagttttggtagcatgacgggccactgagaagtggaaagggcgcaagaaccatgagctctcctggaaatgcttcccactaaaaattttctttaggcgaagtcttgcaatggttctctgcaccagtaaactcaggccatcggtcctttcgatgcgtacaacaaaggccagggaatgtttgtctggcagttccaatgcatgaggtttcacttctagtcgtctgagacacagcttgtcacgtttctgccgccaggaatcatgtaggaatgattccagtcgcttaaacctgagcccttttcctttcctctgctccttctttgccaaaaatgcctgctttgcctgggtggctttgcgggcttgataagccttcctctttttcaggagattttctggaaccaaagggatttttctttgctcttgctccaccat

SEQ ID NO: 5659 - DNA, 654 bp, Homo sapiens; identical to SEQ ID NO: 1091
  SIMILAR (190)..(651): 721254mologous to Mus musculus putative,accession number AK007884,Smith-Waterman Score=572.

SEQ ID NO: 5660 - DNA, 355 bp, Homo sapiens
  SIMILAR (36)..(353): 961254mologous to Homo sapiens mTERF,accession number Y09615,Smith-Waterman Score=537.
tccagagatagctgttctccagcctttctggagggatgcagagcctttccttaggacaaacaggcatttcagaaggtttgaactagctaaccagtatggcaccaggaaacctctggcatatgagaaataactttctctttggttcaagatgttggatgactcgattttcagcagaaaacatcttcaaatcagtttcatttaggctttttggtgtgaagtgtcataatacagacagtgagcctttgaaaaatgaggacctactgaaaaacttacttactatgggagtagatattgacatggcaaggaaacgacagcctggagtttttcataggatgattaccaatgagcaggacct

SEQ ID NO: 5661 - DNA, 906 bp, Homo sapiens; identical to SEQ ID NO: 3433

SEQ ID NO: 5662 - DNA, 1642 bp, Homo sapiens
  SIMILAR (1258)..(1061): 861254mologous to Homo sapiens dJ475N16.3 (novel protein similar to RPL7A (60S ribosomal protein L7A)),accession number AL035587,Smith-Waterman Score=301.
tttccgagatggagtctcgctctgtcgcccagctggagtgcactggtgaatcttggctcactgcaatctctgcctcctgggtgacaaagcaagactctggctcaggaagaaaaaacaacaacaacaaaacttcaagtgctttttttgtaaggtgttctgcactgaagattacatttaaaaaaccttattagtggttacatatgccctaacaatatctataaatctgtatatttaatagtcttttagcttcccatataaaataatgttttacgtgtgccacatttctattattaaaagtgatatctaaatatataggcacacagttgacatctgccttgtattttctaaattcttggagatctagagcatacctgaattataatactaatcattagattgattgattgatttgagatttatttatttatttatttacttgcgatgaggtcttcgtcttgtcccctaggctggagtgcactggtgcaatcttggctcactgcaatctctgcctcctgggttcaagcgattttcctgccttagcctctcgagtagctgggactacaggcacgcgccaccacacccagctcatttttgtatttttagtagagatgcagtttctccgtgctggtcaggctgatctcaaactcccgacctcaggtgatccacccgcctcggcctccccaaagtgctgggattacagccgtgagccaccgcgccccggccagcaatacagtttttcagttactcgaacatctttaagccctataactcttaggctatgcatagccccatgtcctaatcaggcattcactgatcccagcaggtctccatctatttgtaccagcctcctctattcctcccaatctcaaggttactcttaaatactagtaaatgcaaaaagaacttgtaaagtggcaaggcatggcctatcaaaagtcagcccaaggggcagttttcagccctgcctcacctgggtctagttcagctgacggatgagctgattgatgcgttcaccccgatagccaggtgtgcccatctccttgaggaagcccactcttatttttggtagcatgatgggccagccatcaatcctttcgatgcgtacaacaaaggccaaggaatgtttatctggcaattccaaggcatgaggtttcacttctagtcgtctgagacgcaccttgtcacgtttctgccgccaggaatcatgtaggaatgattccagtcgcttaaacctgagcccttttcctttcttctgtcttgctctgccatctttatggcaactcaagagtccacactccatccctgagtcactgggagaggcaacacaggcttcatcacgataggagagtaatcccatttcctgctttggggcgactttgctcttaacatgcagaggagccagaggcgggagccggtagcgatttgaggaatcatttaacctgtctgcctccactttctgcatccataaaatggggatataacttaaagaaacctgggtgcaggtctcacgtacacggaatactaccttcccaacagtatcctggcatgccgtagacatggtaactgcttgctgaactcgcatgaacccaggccgatcaccagcaaacatgctttctccaggttgttctccttgttgcaccat

SEQ ID NO: 5663 - DNA, 2800 bp, Homo sapiens
  SIMILAR (1942)..(2532): 921254mologous to Homo sapiens dJ475N16.3 (novel protein similar to RPL7A (60S ribosomal protein L7A)),accession number AL035587,Smith-Waterman Score=922.
atgtttggccgctcgcggagctgggtgggcgggggccatggcaagacttcccgcaacatccactccttggaccacctcaagtatctgtaccacgttttgaccaaaaacaccacagtcacagaacagaaccggaacctgctagtggagaccatccgttccatcactgagatcctgatctggggagatcaaaatgacagctctgtatttgacttcttcctggagaagaatatgtttgttttcttcttgaacatcttgcggcaaaagtcgggccgttacgtgtgcgttcagctgctgcagaccttgaacatcctctttgagaacatcagtcacgagacctcactttattatttgctctcaaataactacgtaaattctatcatcgttcataaatttgacttttctgatgaggagattatggcctattatatatcgttcctgaaaacactttcgttaaaactcaacaaccacactgtccatttcttttataatgagcacaccaatgactttgccctgtacacagaagccatcaagtttttcaaccaccctgaaagcatggttagaattgctgtaagaaccataactttgaatgtctataaagtggataaccaggccatgctgcactacatccgagataaaactgctgttccttacttctccaatttggtctggttcattgggagccatgtgatcgaactcgatgactgcgtgcagactgatgaggagcatcggaatcggggtaaactgagtgatctggtggcagagcacctagaccacctgcactatctcaatgacatcctgatcatcaactgtgagttcctcaacgatgtgctcactgaccacctgctcaacaggctcttcctgcccctctacgtgtactcactggagaaccaggacaaggtcttcttaattatacatcatgcaccgctggtgaactcgttagctgaagtcattctgaatggtgatctgtctgagatgtacgctaagactgaacaggatattcagagaagttctgtcttacccactctaagctccttatggcagggatctcacctgtcactgaatcagctgcagtctgggctgcacaaatgctcatctcacttatgcggagcccaggctgcagctgattcagtgacaggtgagatccctgccataaggagcttagagtggctaatcagtgctggttccaaggcgcgcacattcttcttcctgaaaatgctaataggcttctgggagaaggttgattgtgaatatcaaaggcgtcaagtgctgagcacgcggctgcaagaggccttgccgtcaaatcgcctcactgatgttgcagctgtgcattcttcatgcatgttgggctttggttccacagctccacgcggctcctggattggcgatccagcggctgtgcatctgcccctacctggggagctggccgagcaccttgggtccaagggtaccaccactgtcaccaagcaccagccccaggccaagcccagcattcggtgcttcattaaacccaccgagacactcgagcggtcccttgagatgaacaagcacaagggcaagaggcgggtgcaaaagagacccaactacaaaaacgttggggaagaagaagatgaggagaaagggcccaccgaggatgcccaagaagacgccgagaaggctaaaggtacagagggtggttcaaaaggcatcaagacgagtggggagagtgaagagatcgagatggtgatcatggagcgtagcaagctctcagagctggccgccagcacctccgtgcaggagcagaacaccacggacgaggagaaaagcgccgccgccacctgctctgagagcacgcaatggagcagacccttcctggatatggtgtaccacgcgctggacagcccggatgatgattaccatgccctgttcgtgctctgcctcctctatgccatgtctcataataaagaaaatctcctgaaaaagaggaaggcttatcaggcactcaaagccacccaggcaaagcaggaacttttggcaaagaaggagcagaagaaaggaaaagggctcaggtttaagctactggaatcattcctacatgattactggcagcagaaacctgacaaggtgcatctcagacgactagaagtgaaacctcatgccgtggaattgccagataaacattccttggcctttgttgtacgcatcgaaaggattgatggcgtgagtttactggtgcagagaaccattgcaagactttgcctaaagaaaatttttagtggtgtctttgtaaaagtcaccccccagaatctacaaatgctgcgtatagtggaaacttatgtgacctggggatttccaaatctgaagtctgtccgagaactcattttgaaacgtggacaagccaaggtcaagagtaagaccatccctctgacagacaacacagtgattgaggagcacctggggaagtttggcatcatttgcttggaagacctcattcatgaaattgcattcccagggaagcatttccaggagatctcatggttcttgcgccctttccactttctcagtggcctgtcacgctaccaaaaatagagtgggcttcctcaaggagataggcacacctggctatcggggtgaacgcatcaatcagctcatccgccagctgaactagacccaggtgccaaactgcggtaaattttttatcagtgaagtggaagcatgtgttttgttgttttgggaatttttatcaagtgtcttcagagaagattatttcctgctctgtcttcaaaaactggaaaggaagggtcaaagaaaagacagtagctgg

SEQ ID NO: 5664 - DNA, 372 bp, Homo sapiens
  misc_feature (1)...(372): n = a,t,c or g
gcctgcagtagttgcttccacgcaggactagagcatgtcagggttcggggctcctgtcatagcggagtggctgcggcccgcaggtcagaggcacccgacctcttctgctaacccccttccctgcctgtcccgtccactcctttctctccatcacctgcccctgccatgaaccaggccaccagtgaccccacccacacctgtccgaccaggctccccacgtgccctaatgcagccccgtaggctgggcccacggctgacaccccttcctgagggatccccgacctgccagccgttgtccttaagacgccacagcatcttgacctccccgtctgcagcctctgtgggcctccactgggacccactgagacatgn

SEQ ID NO: 5665 - DNA, 884 bp, Homo sapiens
  SIMILAR (3)..(158): 611254mologous to Homo sapiens PRO1902,accession number AF118082,Smith-Waterman Score=167.
tggagacaaggtcttactctgtcacccaggctggagcagaatggcatgatcaccgctcactgtagccttgacctccagggctcaggtaatcatctcacttcagccttccaagtaattgggactacagatgtgtgccaccacactcggctaattttttggtaatttttgtagagatagtgtttcaccatgttgcccaggctggtctcgaactcctgggctcaagcgatctgcccacctaggcctcccaaagtactgggattacaggcgtgaaccactgcccggctgagaaggaggttcttccgcgagagaaggctatgcagaggggaggatctcaggcctgaagggtctagaagcccactggaaggtcttccagacacttgggacatctagctcctgaagagtagaaagaggagctgctgccgaagaggtaagacacgagagaggggcacaggatgtggacgtccgcccctctgtcctcaagggagtttctttggaagagagaagagaatgaaggctgggctcagaaggaagttcctcccactccgtggaagctcaaactagtccagtggtggcagctgccctggctggaataaagcatcgacccacagtggcctcacatctctgaggcctttgcaggttaaagagtctcctgccatgataacccaccacagtggaaacccgttgttgggccagcgtgttctcagggactgggacacgggccaaatactacagccaccaaggccatagcctgtgctctctctgagccgagggaagaacaccctctccggccctgtagttccatttttgtttctttgtttcatttcctctgctgtcttctccagagctctgcgctgcagctgagagactggatatctcctagaaat

SEQ ID NO: 5666 - DNA, 298 bp, Homo sapiens
cggtggaattccaataatgaggaatgaatgaaagagggaacatcactaaagaaataaaaaagataatatgggaatactatgaataactgggcaccagccagttagacaccctagactaaacaaattcccagaaagatacaaactaccagaaccaactcacaaagtatagaaaatatggattagaacctataacaagtgattatatcagtaactttaaacgtctcccaaagaaaagcccaggcctagatggtttcactggtgaattcatttaacaaactgaccctagccaggcagtgca

SEQ ID NO: 5667 - DNA, 4120 bp, Homo sapiens
  SIMILAR (2)..(2251): 981254mologous to Homo sapiens archvillin,accession number AF109135,Smith-Waterman Score=3843.
gttcggggagcccacttccgagcagacggggacagctgctgggaaaactattgctcaaaccacagcccccgtgtcctggaagccccaggattcttcggaacagccacaggagaagctctgcaagaatccatgtgcgatgtttgctgctggagagatcaaaacgccgacaggggagggccttcttgactcacccagcaaaaccatgtctattaaagaaagattggcactgttgaagaaaagcggggaggaagattggagaaacagactcagcaggaggcaggagggcggcaaggcgccggccagcagcctgcacacccaggaagcagggcggtccctcatcaagaagcgggtcacagaaagtcgagagagccaaatgacgattgaggagaggaagcagctcatcactgtgagagaggaggcctggaagacgagaggcagaggagcggccaacgactcgacccagttcactgtggctggcaggatggtgaagaaaggtttggcgtcacctactgccataaccccagtagcctcagccatttgcggtaaaacaagaggcaccacacccgtttccaaacccctggaagatatcgaagccagaccagatatgcagttagaatcggacctgaagctggacaggctggaaacctttctaagaaggctgaataacaaagttggcgggatgcacgaaacggtgctcactgtcaccggcaaatctgtgaaggaggtgatgaagccagatgatgatgaaacctttgccaaattttaccgcagcgtggattataatatgccaagaagtcctgtggagatggatgaggacttcgatgtcattttcgatccttatgcacccaaattgacgtcttccgtggccgagcacaagcgggcagttaggcccaagcgccgggttcaggcctccaaaaaccccctgaaaatgctggcggcaagagaagatctccttcaggaatacactgagcagagattaaacgttgccttcatggagtcaaagcggatgaaagtagaaaagatgtcttccaactccaacttctcagaagtcaccctggcgggtttagccagtaaagaaaacttcagcaacgtcagcctgcggagcgtcaacctgacggaacagaactctaacaacagcgccgtgccctacaagaggctgatgctgttgcagattaaaggaagaagacatgtgcagaccaggctggtggaacctcgagcttcggcgctcaacagtggggactgcttcctcctgctctctccccactgctgcttcctgtgggtaggagagtttgcaaacgtcatagaaaaggcgaaggcctcagaacttgcaactttaattcagacaaagagggaacttggttgtagagctacttatatccaaaccattgaagaaggaattaatacacacactcatgcagccaaagacttctggaagcttctgggtggccaaaccagttaccaatctgctggagacccaaaagaagatgaactctatgaagcagccataatagaaactaactgcatttaccgtctcatggatgacaaacttgttcctgatgacgactactgggggaaaattccgaagtgctcccttctgcaacccaaagaggtactggtgtttgattttggtagtgaagtttacgtatggcatgggaaagaagtcacattagcacaacgaaaaatagcatttcagctggcaaagcacttatggaatggaacctttgactatgagaactgtgacatcaatcccctggatcctggagaatgcaatccgcttatccccagaaaaggacaggggcggcccgactgggcgatatttgggagacttactgaacacaatgagacgattttgttcaaagagaagtttctggattggacggaactgaagagatcgaatgagaagaaccccggggaacttgcccagcacaaggaagaccccaggactgatgtcaaggcatacgatgtgacacggatggtgtccatgccccagacgacagcaggcaccatcctggacggagtgaacgtcggccgtggctatggcctggtggaaggacacgacaggaggcagtttgagatcaccagcgtttccgtggatgtctggcacatcctggaattcgactatagcaggctccccaaacaaagcatcgggcagttccatgagggggatgcctatgtggtcaagtggaagttcatggtgagcacggctgtactgcgtgcgtggagaggtgcccgtggaagggaatttgctggaagtggcctgtcactgtagcagcctgaggtccagaacttccatggtggtgcttaacgtcaacaaggccctcatctacctgtggcacggatgcaaagcccaggcccacacgaaggaggtcggaaggaccgctgcgaacaagatcaaggaacaatgtcccctggaagcaggactgcatagtagcagcaaagtcacaatacacgagtgtgatgaaggctccgagccactcggattctgggatgccttaggaaggagagacaggaaagcctacgattgcatgcttcaagatcctggaagttttaacttcgcgccccgcctgttcgtcctcagcagctcctctggggattttgcagccacggagtttgtgtaccctgcccgagccccctctgtggtcagttccatgcccttcctgcaggaagatctgtacagcgcgccccagccagcacttttccttgttgacaatcaccacgaggtgtacctctggcaaggctggtggcccatcgagaacaagatcactggttccgcccgcatccgctgggcctccgaccggaagagtgcgatggagactgtgctccagtactgcaaaggaaaaaatctcaagaaaccagcccccaagtcttaccttatccacgctggtctggagcccctgacattcaccaatatgtttcccagctgggagcacagagaggacatcgctgagatcacagagatggacacggaagtttccaatcagatcaccctcgtggaagacgtcttagccaagctctgtaaaaccatttacccgctggccgacctcctggccaggccactcccagagggggtcgatcctctgaagcttgagatctatctcaccgacgaagacttcgagtttgcactagacatgacgagggatgaatacaacgccctgcccgcctggaagcaggtgaacctgaagaaagcaaaaggcctgttctgagtggggagacgccagaggagcctcacggtcacgtccaacaacaccactgcaccagggaaatggatatatatttttggactggtgtttttcacaaagtatttttcaatcagagttttcagaacctgacattgttaaagatactgcttgtcccggagttgtgtattttgtaaatgttcaagggaactgtttggaaacttctttccaccattcaggaggttatcagaattaataaaagtatctgttatgtgcacttaagccgcagctgctatagatagcactgccttcttgttccagctaggcaatgccttttttttttttttgaagcagttctctttataaagtgttattttgatagtttgtggattctaaaatatatatatatttatataaacaccatataagtcaaatatgtatttaacaaagcaatatgtattcattcactttcaagatttgttttggtgtcaaaataacatgaaaaggtagatggagttgcttctgttgaattagctctgccaccaatatgtatcttcatacacgtttggaaatgtttcctgcagcattaggtatgacttgttctgagtactgcttccggtgctaaaatgaacaaagaatttgtacttaatggcatggactctggagaatctatgcgaatcaacctttctaccttaatatctccccaaaaatgtatagtgccttgtttttatgtacagtttatatacagaaaagtttgctctgcatttttgatgatggtttggaacattatctacaattttactctcaaatagtcaaaataaaaacatctcaatttctaataccggttgtaaacaaacagtacacatgtcattttgtgatataggactcccaaataaaagtatcagaataaacacaacaattaactggtaaaaaaaaaaaaaaaa

SEQ ID NO: 5668 - DNA, 6719 bp, Homo sapiens
  SIMILAR (451)..(5814): 1001254mologous to Homo sapiens supervillin,accession number AF051850,Smith-Waterman Score=9280.
tcggcgggaagcggcgatcctgccaccgggaggtgtggaagagccgggtagattctggctacattggagattggttgctttctaaaactgaaggagaagcccatgaagagatggtggattctcactgagttttgactagcggaagaaaagagagagttcaagtggatggccttgaggacttgaaaagctgagatatgatgattttgaagtcatttcacatcgaagccatgatttaaatatcggcgttaagatttcaacaagaaaaacttaagcttccttggattcccacgtcaaaggaaagtttcaagctttcagaaggagttctcactcgaagataaagaacagctcgctaaccacgaaagaggaatcgatgctcagcttttagttgcacttcctaaagttgcagaattaagacaaatctttgaaccaaagaagaaagaattcttagaaatgaaaagaaaagaaagaattgccaggcgcctggaagggattgaaaatgacactcagcccatcctcttgcagagctgcacaggattggtgactcaccgcctgctggaggaagacacccctcgatacatgagagccagcgaccctgccagcccccacatcggccgatcaaatgaagaggaggaaacttctgattcttctctagaaaagcaaactcgatccaaatactgcacagaaacctccggtgtccacggtgactcaccctatggttcgggtaccatggacacccacagtctggagtccaaagccgaaagaattgcaaggtacaaagcagaaagaaggcgacagctggcagagaagtatgggctgactctggatcccgaggccgactccgagtatttatcccgctataccaagtccaggaaggagcctgatgctgtcgagaagcggggaggaaaaagtgacaaacaggaagagtcaagcagagatgcgagttctctgtaccccgggaccgagacgatggggctcaggacctgtgccggtgaatccaaggactatgccctccatgcgggtgacggctcttccgacccggaggtgctgctgaacatagaaaaccaaagacgaggtcaagagctgagtgccacccggcaggcccatgacctgtccccagcagccgagagttcctcgaccttctctttctctgggcgagactcctccttcactgaagtgccacggtcccccaagcacgcccacagctcctccctgcagcaggcagcctcccggagcccctcctttggtgacccacagctatcccctgaggcccgacccaggtgcacttcacattcagaaacgccaactgtcgatgatgaagaaaaggtggatgaacgagccaagctgagcgtcgccgccaagaggttgcttttcagggagatggaaaaatcttttgatgaacaaaatgttccaaagcgacgctcaagaaacacagctgtggagcagaggctacgccgtctgcaggacaggtccctcacccagcccatcaccactgaagaggtggtcatcgcagccacattgcaggcctctgctcaccaaaaggccttagccaaggaccagacaaatgagggcaaagagcttgctgagcaaggagaacctgattcctccactctaagcttggccgaaaagttggccttgtttaacaaattgtcccagccagtctcaaaagcgatttctacccggaacagaatagacacgagacagaggagaatgaacgctcgctatcaaactcagccagtcacactgggagaggtggagcaggtgcagagtggaaagctcattcctttctcacctgccgtgaacacatcagtgtctaccgtagcatccacggttgctccaatgtatgccggagatcttcgcacaaagccacctcttgaccacaatgcaagtgccactgactataagttttcttcttcaatagaaaattcggactctccagttagaagcattctgaaatcgcaagcttggcagcctttggtagagggtagcgagaacaagggaatgttgagagaatatggagagacagaaagcaagagagctttgacaggtcgagacagtgggatggagaagtatgggtcctttgaggaagcagaagcatcctaccccatcctgaacagagccagggaaggagacagccataaggaatctaaatatgctgttcccagaagaggaagcctggaacgggcgaaccctcccatcacccacctcggggatgaaccgaaggaattttccatggctaaaatgaatgcacaaggaaacttggacttgagggacaggctgccctttgaagagaaggtggaggtggagaatgttatgaaaaggaagttttcactaagagcggcagagttcggggagcccacttccgagcagacggggacagctgctgggaaaactattgctcaaaccacagcccccgtgtcctggaagccccaggattcttcggaacagccacaggagaagctctgcaagaatccatgtgcgatgtttgctgctggagagatcaaaacgccgacaggggagggccttcttgactcacccagcaaaaccatgtctattaaagaaagattggcactgttgaagaaaagcggggaggaagattggagaaacagactcagcaggaggcaggagggcggcaaggcgccggccagcagcctgcacacccaggaagcagggcggtccctcatcaagaagcgggtcacagaaagtcgagagagccaaatgacgattgaggagaggaagcagctcatcactgtgagagaggaggcctggaagacgagaggcagaggagcggccaacgactcgacccagttcactgtggctggcaggatggtgaagaaaggtttggcgtcacctactgccataaccccagtagcctcagccatttgcggtaaaacaagaggcaccacacccgtttccaaacccctggaagatatcgaagccagaccagatatgcagttagaatcggacctgaagttggacaggctggaaacctttctaagaaggctgaataacaaagttggcgggatgcacgaaacggtgctcactgtcaccggcaaatctgtgaaggaggtgatgaagccagatgatgatgaaacctttgccaaattttaccgcagcgtggattataatatgccaagaagtcctgtggagatggatgaggacttcgatgtcattttcgatccttatgcacccaaattgacgtcttccgtggccgagcacaagcgggcagttaggcccaagcgccgggttcaggcctccaaaaaccccctgaaaatgctggcggcaagagaagatctccttcaggaatacactgagcagagattaaacgttgccttcatggagtcaaagcggatgaaagtagaaaagatgtcttccaactccaacttctcagaagtcaccctggcgggtttagccagtaaagaaaacttcagcaacgtcagcctgcggagcgtcaacctgacggaacagaactctaacaacagcgccgtgccctacaagaggctgatgctgttgcagattaaaggaagaagacatgtgcagaccaggctggtggaacctcgagcttcggcgctcaacagtggggactgcttcctcctgctctctccccactgctgcttcctgtgggtaggagagtttgcaaacgtcatagaaaaggcgaaggcctcagaacttgcaactttaattcagacaaagagggaacttggttgtagagctacttatatccaaaccattgaagaaggaattaatacacacactcatgcagccaaagacttctggaagcttctgggtggccaaaccagttaccaatctgctggagacccaaaagaagatgaactctatgaagcagccataatagaaactaactgcatttaccgtctcatggatgacaaacttgttcctgatgacgactactgggggaaaattccgaagtgctcccttctgcaacccaaagaggtactggtgtttgattttggtagtgaagtttacgtatggcatgggaaagaagtcacattagcacaacgaaaaatagcatttcagctggcaaagcacttatggaatggaacctttgactatgagaactgtgacatcaatcccctggatcctggagaatgcaatccgcttatccccagaaaaggacaggggcggcccgactgggcgatatttgggagacttactgaacacaatgagacgattttgttcaaagagaagtttctggattggacggaactgaagagatcgaatgagaagaaccccggggaacttgcccagcacaaggaagaccccaggactgatgtcaaggcatacgatgtgacacggatggtgtccatgccccagacgacagcaggcaccatcctggacggagtgaacgtcggccgtggctatggcctggtggaaggacacgacaggaggcagtttgagatcaccagcgtttccgtggatgtctggcacatcctggaattcgactatagcaggctccccaaacaaagcatcgggcagttccatgagggggatgcctatgtggtcaagtggaagttcatggtgagcacggcagtgggaagtcgccagaagggagagcactcggtgagggcagccggcaaagagaagtgcgtctacttcttctggcaaggccggcactccaccgtgagtgagaagggcacgtcggcgctgatgacggtggagctggacgaggaaaggggggcccaggtccaggttctccagggaaaggagcccccctgtttcctgcagtgtttccagggggggatggtggtgcactcggggaggcgggaagaggaagaagaaaatgtgcaaagtgagtggcggctgtactgcgtgcgtggagaggtgcccgtggaagggaatttgctggaagtggcctgtcactgtagcagcctgaggtccagaacttccatggtggtgcttaacgtcaacaaggccctcatctacctgtggcacggatgcaaagcccaggcccacacgaaggaggtcggaaggaccgctgcgaacaagatcaaggaacaatgtcccctggaagcaggactgcatagtagcagcaaagtcacaatacacgagtgtgatgaaggctccgagccactcggattctgggatgccttaggaaggagagacaggaaagcctacgattgcatgcttcaagatcctggaagttttaacttcgcgccccgcctgttcatcctcagcagctcctctggggattttgcagccacagagtttgtgtaccctgcccgagccccctctgtggtcagttccatgcccttcctgcaggaagatctgtacagcgcgccccagccagcacttttccttgttgacaatcaccacgaggtgtacctctggcaaggctggtggcccatcgagaacaagatcactggttccgcccgcatccgctgggcctccgaccggaagagtgcgatggagactgtgctccagtactgcaaaggaaaaaatctcaagaaaccagcccccaagtcttaccttatccacgctggtctggagcccctgacattcaccaatatgtttcccagctgggagcacagagaggacatcgctgagatcacagagatggacacggaagtttccaatcagatcaccctcgtggaagacgtcttagccaagctctgtaaaaccatttacccgctggccgacctcctggccaggccactcccggagggggtcgatcctctgaagcttgagatctatctcaccgacgaagacttcgagtttgcactagacatgacgagggatgaatacaacgccctgcccgcctggaagcaggtgaacctgaagaaagcaaaaggcctgttctgagtggggagacgccagaggagcctcacggtcacgtccaacaacaccactgcaccagggaaatggatatatatttttggactggtgtttttcacaaagtatttttcaatcagagttttcagaacctgacattgttaaagatactgcttgtcccggagttgtgtattttgtaaatgttcaagggaactgtttggaaacttctttccaccattcaggaggttatcagaattaataaaagtatctgttatgtgcacttaagccgcagctgctatagatagcactgccttcttgttccagctaggcaatgcctttttttttttttttgaagcagttctctttataaagtgttattttgatagtttgtggattctaaaatatatatatatttatataaacaccatataagtcaaatatgtatttaacaaagcaatatgtattcattcactttcaagatttgttttggtgtcaaaataacatgaaaaggtagatggagttgcttctgttgaattagctctgccaccaatatgtatcttcatacacgtttggaaatgtttcctgcagcattaggtatgacttgttctgagtactgcttccggtgctaaaatgaacaaagaatttgtacttaatggcatggactctggagaatctatgcgaatcaacctttctaccttaatatctccccaaaaatgtatagtgccttgtttttatgtacagtttatatacagaaaagtttgctctgcatttttgatgatggtttggaacattatctacaattttactctcaaatagtcaaaataaaaacatctcaatttctaataccggttgtaaacaaacagtacacatgtcattttgtgatataggactcccaaataaaagtatcagaataaacacaacaattaactggt

SEQ ID NO: 5669 - DNA, 7587 bp, Homo sapiens
  SIMILAR (3052)..(7176): 991254mologous to Homo sapiens supervillin,accession number AF051851,Smith-Waterman Score=7110.
cactgctctgactgcgtcctccccaggctgaagtgtcctcaggtttcatgtggatttgcccagtaatggatggctccaccgaggccaggttggggaagttcagcctcgaggacactaggggacgaaaaacttcaaaaagaagactctttttattaatattttggcgttctttttggagaggaacttttgggatgtagcctttacctgtttcctgaatttgacatccaaaaagccttttggaaaacaccattctaaatttatcctgttctgaatcatcatcgcttctgatagatgcagttgcttgctgacatcgtgatctttgattttgtacaacgctatttgggctaacttttgggattttactttgtgcttagaatttgaaagtagtattcattggaaagagactccaagaaaatactcgaagacatcaaaagctggattcgagggtataacgtgttttgttttgttttttaaattagaaaaataaggaattgcagtgtgattttctttccccctttaacttagaggaacgaggattatacagaaatttgaaatttcaacaagaaaaacttaagcttccttggattcccacgtcaaaggaaagtttcaagctttcagaaggagttctcactcgaagataaagaacagctcgctaaccacgaaagaggaatcgatgctcagcttttagttgcacttcctaaagttgcagaattaagacaaatctttgaaccaaagaagaaagaattcttagaaatgaaaagaaaagaaagaattgccaggcgcctggaaggaattgaaaatgacactcagcccatcctcttgcagagctgcacaggattggtgactcaccgcctgctggaggaagacacccctcgatacatgagagccagcgaccctgccagcccccacatcggccgatcaaatgaagaggaggaaacttccgattcttctctagaaaagcaaactcgatccaaatactgcacagaaacctccggtgtccacggtgactcaccctatggttcgggtaccatggacacccacagtctggagtccaaagccgaaagaattgcaaggtacaaagcagaaagaaggcgacagctggcagagaagtatgggctgactctggatcccgaggccgactccgagtatttatcccgctataccaagtccaggaaggagcctgatgctgtcgagaagcggggaggaaaaagtgacaaacaggaagagtcaagcagagatgcgagttctctgtaccccgggaccgagacgatggggctcaggacctgtgccggtgaatccaaggactatgccctccatgcgggtgacggctcttccgacccggaggtgctgctgaacatagaaaaccaaagacgaggtcaagagctgagtgccacccggcaggcccatgacctgtccccagcagccgagagttcctcgaccttctctttctctgggcgagactcctccttcactgaagtgccacggtcccccaagcacgcccacagctcctccctgcagcaggcagcctcccggagcccctcctttggtgacccacagctatcccctgaggcccgacccagtacagggaaacccaaacatgagtggtttctccagaaagattccgaaggggacacaccttcacttatcaactggccttccagagttaaagttagagaaaaattggtgaaagaggaaagtgctcgaaacagccctgaactcgcctcagagtccgtaactcagaggagacaccagccagcgccagtccattacgtgtcatttcagtctgagcactcagcctttgatagggtccccagcaaggcagcaggctctacacgacagccaatccgtggctatgtccaacccgcagataccggtcacaccgccaagctggtgacgccagaaaccccagaaaatgcatctgagtgtagctgggtagcatcagccacccagaatgtccccaaacctcccagcttgacggttctagaaggtgacggaagggatagcccagttctccatatctgcgagtcaaaagcagaagaagaagaaggggaaggagaaggagaagaaaaagaagaagatgtgtgcttcactgaagctctcgagcaaagcaagaaaaccctactggctttggagggtgatgggctagtgagaagcccagaagatccctctagaaatgaggactttggtaagcctgctgtgagcacagtcaccttagagcatcagaaggaactggaaaacgtggcacaaccccctcaagctccgcaccagcccactgagaggacaggcaggagcgagatggttctctacattcaaagtgagcctgtgtcccaagacgccaaaccaactggtcacaacagggaagcctcgaaaaagcgcaaggtccgtacccgctctctgtcagatttcacaggcccccctcagctccaggccttgaagtataaggacccagcttccaggagagagctggagctgcccagctccaagaccgaagggccttatggggagatcagcatgctggacacaaaggtctctgtcgcccagctccgaagtgcgttcctggcatctgccaacgcctgcaggagacctgaactcaaatcacgggtagagaggtcggctgaaggacctggcttgcccaccggtgtggaacgggagagagggtcccggaaaccaagacgctatttttctcctggtgaaagtagaaaaacttccgagagatttagaacccaacctataacttcagcagaacgaaaggaatcggataggtgcacttcacattcagaaacgccaactgtcgatgatgaagaaaaggtggatgaacgagccaagctgagcgtcgccgccaagaggttgcttttcagggagatggaaaaatcttttgatgaacaaaatgttccaaagcgacgctcaagaaacacagctgtggagcagaggctacgccgtctgcaggacaggtccctcacccagcccatcaccactgaagaggtggtcatcgcagccactgaacctatccccgcttcgtgttctgggggcacccaccctgtaatggcgagacttcctagccccactgtagctaggagcgctgtgcagcctgccagattgcaggcctctgctcaccaaaaggccttagccaaggaccagacaaatgagggcaaagagcttgctgagcaaggagaacctgattcctccactctaagcttggccgaaaagttggccttgtttaacaaattgtcccagccagtctcaaaagcgatttctacccggaacagaatagacacgagacagaggagaatgaacgctcgctatcaaactcagccagtcacactgggagaggtggagcaggtgcagagtggaaagctcattcctttctcacctgccgtgaacacatcagtgtctaccgtagcatccacggttgctccaatgtatgccggagatcttcgcacaaagccacctcttgaccacaatgcaagtgccactgactataagttttcttcttcaatagaaaattcggactctccagttagaagcattctgaaatcgcaagcttggcagcctttggtagagggtagcgagaacaagggaatgttgagagaatatggagagacagaaagcaagagagctttgacaggtcgagacagtgggatggagaagtatgggtcctttgaggaagcagaagcatcctaccccatcctgaaccgagccagggaaggagacagccataaggaatctaaatatgctgttcccagaagaggaagcctggaacgggcgaaccctcccatcacccacctcggggatgaaccgaaggaattttccatggctaaaatgaatgcacaaggaaacttggacttgagggacaggctgccctttgaagagaaggtggaggtggagaatgttatgaaaaggaagttttcactaagagcggcagagttcggggagcccacttccgagcagacggggacagctgctgggaaaactattgctcaaaccacagcccccgtgtcctggaagccccaggattcttcggaacagccacaggagaagctctgcaagaatccatgtgcgatgtttgctgctggagagatcaaaacgccgacaggggagggccttcttgactcacccagcaaaaccatgtctattaaagaaagattggcactgttgaagaaaagcggggaggaagattggagaaacagactcagcaggaggcaggagggcggcaaggcgccggccagcagcctgcacacccaggaagcagggcggtccctcatcaagaagcgggtcacagaaagtcgagagagccaaatgacgattgaggagaggaagcagctcatcactgtgagagaggaggcctggaagacgagaggcagaggagcggccaacgactcgacccagttcactgtggctggcaggatggtgaagaaaggtttggcgtcacctactgccataaccccagtagcctcagccatttgcggtaaaacaagaggcaccacacccgtttccaaacccctggaagatatcgaagccagaccagatatgcagttagaatcggacctgaagttggacaggctggaaacctttctaagaaggctgaataacaaagttggcgggatgcacgaaacggtgctcactgtcaccggcaaatctgtgaaggaggtgatgaagccagatgatgatgaaacctttgccaaattttaccgcagcgtggattataatatgccaagaagtcctgtggagatggatgaggacttcgatgtcattttcgatccttatgcacccaaattgacgtcttccgtggccgagcacaagcgggcagttaggcccaagcgccgggttcaggcctccaaaaaccccctgaaaatgctggcggcaagagaagatctccttcaggaatacactgagcagagattaaacgttgccttcatggagtcaaagcggatgaaagtagaaaagatgtcttccaactccaacttctcagaagtcaccctggcgggtttagccagtaaagaaaacttcagcaacgtcagcctgcggagcgtcaacctgacggaacagaactctaacaacagcgccgtgccctacaagaggctgatgctgttgcagattaaaggaagaagacatgtgcagaccaggctggtggaacctcgagcttcggcgctcaacagtggggactgcttcctcctgctctctccccactgctgcttcctgtgggtaggagagtttgcaaacgtcatagaaaaggcgaaggcctcagaacttgcaactttaattcagacaaagagggaacttggttgtagagctacttatatccaaaccattgaagaaggaattaatacacacactcatgcagccaaagacttctggaagcttctgggtggccaaaccagttaccaatctgctggagacccaaaagaagatgaactctatgaagcagccataatagaaactaactgcatttaccgtctcatggatgacaaacttgttcctgatgacgactactgggggaaaattccgaagtgctcccttctgcaacccaaagaggtactggtgtttgattttggtagtgaagtttacgtatggcatgggaaagaagtcacattagcacaacgaaaaatagcatttcagctggcaaagcacttatggaatggaacctttgactatgagaactgtgacatcaatcccctggatcctggagaatgcaatccgcttatccccagaaaaggacaggggcggcccgactgggcgatatttgggagacttactgaacacaatgagacgattttgttcaaagagaagtttctggattggacggaactgaagagatcgaatgagaagaaccccggggaacttgcccagcacaaggaagaccccaggactgatgtcaaggcatacgatgtgacacggatggtgtccatgccccagacgacagcaggcaccatcctggacggagtgaacgtcggccgtggctatggcctggtggaaggacacgacaggaggcagtttgagatcaccagcgtttccgtggatgtctggcacatcctggaattcgactatagcaggctccccaaacaaagcatcgggcagttccatgagggggatgcctatgtggtcaagtggaagttcatggtgagcacggcagtgggaagtcgccagaagggagagcactcggtgagggcagccggcaaagagaagtgcgtctacttcttctggcaaggccggcactccaccgtgagtgagaagggcacgtcggcgctgatgacggtggagctggacgaggaaaggggggcccaggtccaggttctccagggaaaggagcccccctgtttcctgcagtgtttccagggggggatggtggtgcactcggggaggcgggaagaggaagaagaaaatgtgcaaagtgagtggcggctgtactgcgtgcgtggagaggtgcccgtggaagggaatttgctggaagtggcctgtcactgtagcagcctgaggtccagaacttccatggtggtgcttaacgtcaacaaggccctcatctacctgtggcacggatgcaaagcccaggcccacacgaaggaggtcggaaggaccgctgcgaacaagatcaaggaacaatgtcccctggaagcaggactgcatagtagcagcaaagtcacaatacacgagtgtgatgaaggctccgagccactcggattctgggatgccttaggaaggagagacaggaaagcctacgattgcatgcttcaagatcctggaagttttaacttcgcgccccgcctgttcatcctcagcagctcctctggggattttgcagccacagagtttgtgtaccctgcccgagccccctctgtggtcagttccatgcccttcctgcaggaagatctgtacagcgcgccccagccagcacttttccttgttgacaatcaccacgaggtgtacctctggcaaggctggtggcccatcgagaacaagatcactggttccgcccgcatccgctgggcctccgaccggaagagtgcgatggagactgtgctccagtactgcaaaggaaaaaatctcaagaaaccagcccccaagtcttaccttatccacgctggtctggagcccctgacattcaccaatatgtttcccagctgggagcacagagaggacatcgctgagatcacagagatggacacggaagtttccaatcaggatcaccctcgtggaagacgtcttagccaagctctgtaaaaccatttacccgctggccgacctcctggccaggccactcccggagggggtcgatcctctgaagcttgagatctatctcaccgacgaagacttcgagtttgcactagacatgacgagggatgaatacaacgccctgcccgcctggaagcaggtgaacctgaagaaagcaaaaggcctgttctgagtggggagacgccagaggagcctcacggtcacgtccaacaacaccactgcaccagggaaatggatatatatttttggactggtgtttttcacaaagtatttttcaatcagagttttcagaacctgacattgttaaagatactgcttgtcccggagttgtgtattttgtaaatgttcaagggaactgtt

SEQ ID NO: 5670 - DNA, 1751 bp, Homo sapiens
  SIMILAR (635)..(811): 881254mologous to Homo sapiens bA534G20.4 (supervillin),accession number AL158167,Smith-Waterman Score=282.
tttttttttttttttttgtagagatagggtctcatcatgtggcccaggctggtcttcaacctccgggctcaagcagtccttcctcctcagcctcccaaagcactgggattacaggcatgagccaccactcccggtggcagttttgctttttaaggcccatttctctgtaagagagccatgagctcacctcactgctaagcaatcgcgtgcagggcaggaacgccactgtacctgtctgcagtgaggatgtgcgctccagtgttgattgtgctctttggagatatgcggtgctaacagccccttgagtgggcacatgcattatcccttccacttcttaggcacagccctgccagtatccagaaggggccaggggctttgagctggggcaaagggaggaggacctggaggacgaggaatgaaaaagaccaactccttgacaccacttctctctgcctacaggcttctccccgttgaactgtcaaagggctggggtatcctgggtttctctgtttgcccctttgcccctggtttgatggccaagggggtttccccctgtgacactgcagtcaagagggacaacatccactaggttgggggaggagtgagctagaagtgtccgtgaaggagctcctgatggtctggccctgtccctgccctcacagcacttttccttgttgacaatcaccacgaggtgtacctctggcaaggctggtggcccatcgagaacaagatcactggttccgcccgcatccgctgggcctccgaccggaagagtgcgatggagactgtgctccagtactgcaaaggtgaggctccctctaacatgcctgcagcacggaacagatggggaagcccctcaggcatgcgcagccaggagacccccttccccttctgtgcatgtcagccagcatccatccataaagcctggcaggtggtggatgaaaacccaattttttccccccttaaaccttttgaagatgtaattaagtttttagattaagcgcattcctcagctgcccagccatgaaagaaagaactagtttttcctctcctgatattaatgaaggcctaacttgttaacccctcaaggataaaggctgtattgtggaaatgcccccaggcagattaaaaaccccgctgtactcggggttgatcatgctgagagacaagttggcctctgccctgtacattatctgcaagcactaccacgctgttggagaatggaggtctcccccaaacagtgaacggccattgccaacctttttattattcattattatttttagtattatatccaaagagaaactccccatagtaagttcatggttctttactataaacaagaaatttgtagtcttttactataaaatgaaaatgccagtaattaatatcttatttaatttttatggtttcattgacacaactagtttaatgtcactgagtatgtgcaatggattctcttcctgaaaaactctttagcaataaataacatatgaacccttccactcaatgttatagtgaatgtggatgtataagatgctgtcgttcgccgtcagtcattatgggagttaatcctgtgctaggaaatgagacggatgcctctacaggtgaattcaggaggaagaaaatgctccacccagaagctgcagacagagcctctctctcccttccaggaatacacagcgttttgttaggttcaagaagtatagactcaggttgattataggtccctatggtagtcacaggccgcc

SEQ ID NO: 5671 - DNA, 2588 bp, Homo sapiens
  SIMILAR (1445)..(1750): 971254mologous to Homo sapiens Human secreted protein clone rb789_14 protein sequence SEQ ID NO:72,accession number AAY94933,Smith-Waterman Score=518.
agaggtagttttctatataacatctttaatgagtggcttcctgtgctaagaatggtccaggtgtgaactgctgctccctgctcctcccttcctccttcacactcctagtttaggattgatgtgtccgagctcatagggaagaaagagctgcagctggagcctgaccctcccttgaacacggagaggctggcccgtgtcactgcctctgtcacccagctatcctcgcactcaaagccatccaacctcagcaggccttctcgggccctgccacctgaataggtctgaccccagtccccactccctttcaggctgggccacagggagttgctggctggccacttgacaccctccccctgggagctgatgtctgtgactacagggagattagcacttcgtctagtgaaactcctttcatctctgtcctatgggccccaccccaccattccctctagggcccagaccatcatcatggccctggccattgatgtgtatgggctttctttccctcatgcagccccttcttccccaggctggatgttgtgggtagggaggggtgtgtgtgtgtgtatttggtttgctgtccttttttaaaggattccaagccatgtgaaacttcccttctggatgtgattctgggtcgcaagtccttatttatatgtgaggctggggaatgggctgggggtattggcagtccttttgcaaggcagtgtgtgtggtggggtgacaccgctgtggcttatcccaagacactcccagaggaaaacactgcagaaggaactggtttgcagactgtggaaggatctgcagttttgtttttgaccaaaaaaaataataataagttagctctgaagggcagagggaatacccaagcccctgatgcctatgagaagtccctggacttcaaccctcctgttgtttggccttagcccagagggagctgctcacctgagcaccctttggggtgggcagagaggcagggtgggattttagagttagtgtctgtgcgggggcagccctgagcctggagttgagactttggggtctcttagtttggaggtgttgagtgcatttgtgcccctgcctggttgagagcttcttggtacctcttgccaccccttcttcacttgccctgacccaaccccactgggaccttgatgcttgcgaggaagtggtgtcctgacggacttcagtcactcccgcctgatgtattgggatcatagggagagcacttgctctcctgcctctgccaggagagggcttgttcctccaactctaggaggccaaggcaagcatggacaggaagccaagggagcagggtcattaactttttcttctttgcaaaagtgggcacttgccatcagggtcccaatcaccagaaagcaccaaaagcccctggcaccccacccactccatcctacccagggaccccaagtaggcaactgttatggcagtgggtccagcccaggccagcactgccagcctcctctccctgcagtaggcaccagctctacctcccccggcaggcaatgtcctggcttctcagcccagcaccatctgttcccctagacttctcaggggccagcccagtctgggccaccctttgtttccctcatcctcggctcccacacaggtgacagacccagcagatagcttctctctgggaaaggttggatgctgccttacatccccttctagccctcctcccatccacacacacaggcacccacccacaccaggtcggcttgtttctccacatgtagggagagaggggagaccaacccctttgtgtcttttgaaatacgaagaaaaatgtgtgttccaggagcatgactccagtgctgcgctcttgggcctagttcagtctgtcttgtctcaaatctaggcatttttgcttcaattttattttttttaagaatacaaaaacagaaattctgcactaatttacctggtttcgtaggaaaacttttttttattttttacattttttggtgtccgtttgtattgaataatttgctacatttgtaaaatgtaagaggtatataatatatgtatatttctaacgtaaaaaacataatttttttccttttacaagattttttccttaaaaagatgagagaaacatattttttcaggaaaaacaaactttaaaaaaaaaagaggggaaataaaaccttttctcccctttccccatcctctatctatccctctttcccaggaccaaatcaaaaggtggattatcttctgaagaatggaaactgttagtccagaatgatgtctttttctcaatgcagtgagttatagattctctagttttctccctagggatgggaagggggcattgaggcaagcctggagaggagcccggggagcagggtcatgaacttttttctttagtgaaggaggaatacaatcaagggttttgtattcagaatgttgtgcaatattttggaatgggacattggtgtgtttagagattttagtttaaaaacaaaacaaaaagattgatcaaatctgtacagtttctattgttccagatttttttaagtttgtattaaaagcatgatacataataaaaaaaaaaaaaaaaa

SEQ ID NO: 5672 - DNA, 361 bp, Homo sapiens
  misc_feature (1)...(361): n = a,t,c or g
ctgggactacagatgtgagcctccgtgctaggccgatttgcaaaagnnncnnnnnnnnnnnnnnnnnnnnnnnnnagaaaaaggggtcccctttttttcccaaggttggagggcaggggggaaatttgggtttattggaacctttgcctccaaaattaaaaaaatttttttgttttaaacccccaaagaggggggattacnnnnnnnnnnnnnnnnnnnnnnnaaannnnnnnnnnnnnaaaaaaaaaggggtttcccctttttggcccgggggggtttgaacccccgcccccggggggacccccccccttccccccccaaaggggggggatttcggggttggnnnnnnnnnnnnntctcc

SEQ ID NO: 5673 - DNA, 476 bp, Homo sapiens
acgggattgagccactccactccgggccatacgtcttttctaaatgctcccaaaccactgtttaacaacatcctaaagactttctaggccatgagaggtatcatgttctggaattcgcctttttgaaaatcagtgtcttcactgttctcacacgtctactataaataaaggggagtaatttaattcctattatatgtatgtgtatgtatatgtacatatatgtgtatttttatatgtgtgtatatgtatctataggtatatatatttatgtatagcagtaattacctgtttaatgaatgaatggtgatgatttaaatgtaaagggaatgatgccagaggttatgaaaaaaagctgccttcaaaatatgaaatagagaaagaatagagaaatgcatgccaagctctaaataatttattgtaatttacttggttcttggttttctaaaatggaaataaagagataatattgaaaaaaa

SEQ ID NO: 5674 - DNA, 268 bp, Homo sapiens
  misc_feature (1)...(268): n = a,t,c or g
cctgnnnnnnnnnnnnnnnnnnnnnnnnnnnnnnnnnnnnnnnnnnnnnnnnnnnnnnnntaaacaggtgaataaagaaaaaaacctgaacctgaaaagacttgctttgacaacatcactgggaacacttacccatgcttgagcacttatgagcatgattctgactgatattatgttaaccgaacctagttatgcgcagaaagataaatacttcatcttctcactcaaatgcagggacttataaaatgagctcatgtcgacgcggccg

SEQ ID NO: 5675 - DNA, 1076 bp, Homo sapiens
  SIMILAR (3)..(371): 961254mologous to Homo sapiens FLJ00092 protein,accession number AK024490,Smith-Waterman Score=636.
ccacagctacagccacagccacggccactgtggcagccctgcaggagacacagaacaaggatataaaccagtatggccggtctgttctctctttccagatgggtcccacccaggcgtataacagccaattcatgaaccagcccgggccgcgggggcctgcctccatggggggcagcatgaaccccgcgagcatggcggctggcatgacgccctcggggatgagcggccctcccatgggcatgaaccagccccggccgcccggcatcagcccctttggcacacacgggcagcggatgccccagcagacctacccgggcccccggccccagtcccttcctattcagaacataaagaggccataccctggagaggcatttgtgcccagcagagcagggaccaaccgtgggtgtgaccagaagtttccacttggcaccatctctgccacccttcccatcatcctgactctccccctctttgcctccacggaccactacttcctgcacgcgggccattctgaccccctcttcatgacagaaacttttgtatcctccttcaaggccttgttgtcctcctggtgcgaagagctcggccgcctgctgctgctccgacatcagaagagccgccagagcgatccccctgggaaactccccatgcagccccctctcagctccatgagctccatgaaacccactctgtcgcacagaaatcagacctgcttccagcaccagaagccatgtgacctgggtctgtgtcttcccgtttcctcctctattaatgggcatgctgataagagcgccagttgcctttcccacggcactgaaacagagggagaagctggggagaaaggattaacaaaagagttagatgacatcactgattccagaagcctaaattcagtaactcttggggtcatcgggcctggctgggactcctcgctactccttagacagcctcgaaacctcctgaaccagagctctctcgagaagcaggccctctcgggggtctgcagtcacccagtcgatactcctggcccccaccttctcctggaggtgggcaagaaggagggtctggactga

SEQ ID NO: 5676 - DNA, 1436 bp, Homo sapiens
  SIMILAR (70)..(747): 991254mologous to Homo sapiens FLJ00092 protein,accession number AK024490,Smith-Waterman Score=1191.
cggccgccgccggccgggccccaagcccccgagggcgccagggcgggatcgcgaccggtgcaacttctagccttgttgtcctcctggtgcgaagagctcggccgcctgctgctgctccgacatcagaagagccgccagagcgatccccctgggaaactccccatgcagccccctctcagctccatgagctccatgaaacccactctgtcgcacagtgatgggtcgttcccctatgactctgtcccttggcagcagaacaccaaccagcctcccggctccctttccgtggtcaccacggtttggggagtaaccaacacatcccagagccaggtccttgggaaccctatggccaatgccaacaaccccatgaatccaggcggcaaccccatggcgtcgggcatgaccaccagcaacccaggcctcaactccccacagtttgcggggcagcagcagcagttctcagccaaggctggccccgctcagacctacatccagcagagcatgtatggccggcccaactaccccggcagcgggggctttggggccagttaccctgggggtcctaacgcccccgcaggcatgggcatccctccgcacaccaggccgcctgctgacttcactcagcccgcggcagccgctgcagcagcggcagtggcagcagcagcagccacagctacagccacagccacggccactgtggcagccctgcaggagacacagaacaaggatataaaccagtatggaccggccccagtgctgctccctgaccttctgaaggatgggttaggggatgaggagaggggagcccccataggaatgcagaacaggagagcagaacacacacctagtgttcagttctgggccatcgacaacctgccacctgtgcaggaggtgggagagccagccttccagaccagctggaggccacagtccaagccaggtgggctagggcggccactccagggagggagcctgccggtgcccctgcagcacatgctgaggggatcacagagtcctgcaagcatcggctgtttgacctcagcgaatccactctactctctgggctttggccttgatcaacggagcagcccaacagggaatggggagctgctggtaggtttaaaggccgctgagcgcctggtcacagatgctgctccagttgtccgggtctcagtgtctgtccttccttcccagtcgtctcagcatattgggttatttctagctgtgattcatcatgtgctaaacgccgtgctgggtgccagggttgtagaagtgaagcccccaaatccgatcgtggccccaggggctcatgctgtcgctacggagcaccatggcattcccctgggtagtgtggcccaagattcgtgtctgcatccatcaagcaactgccatctaccaggccctgtgcagcctctggggatacagattggaaagag

SEQ ID NO: 5677 - DNA, 340 bp, Homo sapiens
  SIMILAR (2)..(307): 681254mologous to Homo sapiens Human TRAF6 binding protein (T6BP) SEQ ID NO:1,accession number AAB36365,Smith-Waterman Score= 331.
ctgcaccactgcgatccctacgcctgaggaaatgacacgattgagaagcatgaacagacaactccagataaatgttgactgtgcactgacagaagttgacctccttcaatctagaggaaactttgatccaaaagccatgaataatttttatgacaacatataacctgggccagatgtaccacccaagccatctaaaaaaggacctacagactctgaacctaagacctcttcaggaccttgcagtaacattggctgcctcctcagctgtaagttctttcatgcatgttctaggttccagaatcctcctatctgcattcatcagtccactcttgctgcctaa

SEQ ID NO: 5678 - DNA, 409 bp, Homo sapiens
  SIMILAR (111)..(296): 851254mologous to Homo sapiens Mr 110,000 antigen,accession number D64154,Smith-Waterman Score=257.
  misc_feature (1)...(409): n = a,t,c or g
cccacgcgtccgcccacgcgttcgcggacgcgtgggcggcatgcgccgaggaggaagagcgagcccgggcggcgcctttctaacgagtgggggcgcgaggcaagatgacagccttggcctcggggcagctgggccccctcatgtgccagttcggtctgcctgcataggctgtggaggccgccaacaagggcgatgtggaagcgtttgccaaagccatgcagaacatctccaagcccgagcagatatagggcgacacgaaggacaagactgactaaaaggaggacttgagcctggactgagccacgcgccgtcctccgaggaactgggcgctagcagtgcgttgcacaccctcacctcccacccactgattattagaaaagtcgtttctttgacctgcaaaaataaaagn

SEQ ID NO: 5679 - DNA, 781 bp, Homo sapiens
  SIMILAR (30)..(86): 891254mologous to Homo sapiens Mr 110,000 antigen,accession number D64154,Smith-Waterman Score=85.
ctgcttccctatttgccatctggggagttcttgccagaaccgcggatgagatccagaatacccttacctcgccccagttccagcaggtagagccgggcccaggttgtcctccactgtgtgctccgggagtgggcaggggggaggaggagccctgccccaccttcaccatggccagtgcttcatgtgcctgacccgcagagctggcagctgagcagtgtggctctggggtgcagcccgggttggagctcagccctcgcctggctcttcttgcaggccctgggcatgttcagcgcagccttggcctcggggcagctgggccccctcatgtgccagttcggtctgcctgcagaggctgtggaggccgccaacaagggcggtaaagtggctgcgcctggaactccaaggccagagccaggggcagggtccattcctgtccccctggatctgcagaagtggggctgagggggtaaaggtcacagcccttctgcccttgatcccatcgctttgatccccagttttggggcaagggttagacaccaccttgtgtctttaacgtgttctagatgtggaagcgtttgccaaagccatgcagaacaacgccaagcccgagcagaaagagggcgacacgaaggacaagaaggacgaagaggaggacatgagcctggactgagccacgcgccgtcctccgaggaactgggcgcttgcagtgcgttgcacaccctcacctcccacccactgattattaataaagtcttttcttttacctgccaaaaaaaaaaaa

SEQ ID NO: 5680 - DNA, 686 bp, Homo sapiens
  SIMILAR (128)..(412): 561254mologous to Homo sapiens Mr 110,000 antigen,accession number D64154,Smith-Waterman Score=224.
  misc_feature (1)...(686): n = a,t,c or g
ttacagcccgggccagcaggcgcccagcaagtggacctggcccagttgtttgacccccggaaataatggctcccattccttgccaacgcggatgtccaggagcgcctgcttccctacttgccatctggggagttcgctgccgcagaccgcggatgagatcccagaataccctgaccctcgccccaagttcccagcaggccctgggcatgttcaagcgcagcctttggcttcggggcaagttggggcccccttcatgtgccagttcggtctgcctgcagaggcttgtggaggcccgccaacaagggcgatgtggaagcgtttgccaaagccatgcagaacaacgccaaagcccgagcagaaagagggcgacacgaaggacaagaaggacgaagaggaggacatgagcctggactgagccacgcgccgtcctccgaggaactgggcgcttgcagtgcgttgcacaccctcacctcccacccactgattattaataaagtcttttcttttacctgccnnnnnnnnnnnnnggggggggccgttttaaaggatcaaattttacgtccgggggcgggcaaagaaatagtttttttatggggccaccaaaattaaattccggggccggggtttaacaacgtggggaggggaaaaacccgggggtaaccaaattaaatggctttgaaaaacat

SEQ ID NO: 5681 - DNA, 1378 bp, Homo sapiens
atcctgccaaggccccgttgcctgggcccagccagtagcctgttgctgttggcgaaaagcctgggccttggagcctcctggccgtgaaggtccagcgcccaatgcagggaaggaaggaaggctccgccgcaaactaggagcagctcccagaatttccatggaaagctggaacaacgcccgctgacggcaactttctaacagtaactttcccgacccagacaccacaaagctagcacaacgggagctcagatgcagggtaggactcggtccatgcgtcaggagccagagaaagccatcctcacactccgtggatccagggaacccacgcccagggccccccagcttgttccctcagtgcccagctcttggctatttctttcacttcattccatcgctcagacaccattaccacatacacattccacccatacccccaggtctcagcctgccctaccttcccaggctccagtccctgttcctcagcatcccccaccacatcctgagtaagctttgtccccagataacctcttcagcatgatccttaaatctccctaagcctcagtttctcccctgtggaatgggggtaagaatctctttctctgaatgcccctgtgttaggaaaataatttagaatactttggaaactggaaaagctctgttcacacctaagcaatcagggcagtggcctcggctctgccaggaactttggctttttatctggatcctctctttccaggcctctcaattaattccccaggtccttaacctttgggaaattagaaattaggaagagtgtcccacttctgacactgtgttccctcttggaacctgaccgtcaatgctagaagaacccttggaaaacatgctggcccagccctctagttttacaaaataagggagtgcacagccctgagaggttacatggcctgcccaagatcacgcagtcaatggcagagtaaagagcatagcctaggcctccccactcctctagtaatgctctttcatcttctccaacctgggctctaagccttgtccatcctgagccccatatcttaggcccaacctagtccctggaaaaacaaggaagtgggcccttaggaaatctcttttccagttcccactattcagagggccaactgctgtcttccagtctccttcagcctgtgctcctctccctccctgactgacaggcagaaggtactgtgcctctggatatccccacagtgccctgagctgcatctcttgctgactgctttaatacatcacagtgacattgtgtgtgtctctgccaccagactattgctccttgatgctctgggtcacctgcatctagcatggcatatatctagtgctcaataaatgtgtattgtacagaaaa

SEQ ID NO: 5682 - DNA, 370 bp, Homo sapiens
  SIMILAR (16)..(369): 741254mologous to Homo sapiens Pop1,accession number X99302,Smith-Waterman Score=464.
cagcgtctggcagaaatgtcaaatgctatagagagaaaacacgccacgaaaatgacataccagcctaccaatgggactctgacctctggctatgtggctgacagacgtgtaaagcaccacagcggaggagaagaacctttccaagctcaaaagcaagagcctcatcctggaacttcacgacagtgacaaaccagagtcaacctccattctctgcctgaccctgaaatgcatgagcagacttacttcagagggatgtatagaaaactgggaggatggaaagcaggtcccgagggcacgttttacgatatacccaggtatgtaactgcttatacttttgctcatacacgacctgctgatatcagagctatga

SEQ ID NO: 5683 - DNA, 429 bp, Homo sapiens
  SIMILAR (7)..(204): 631254mologous to Homo sapiens Human secreted protein, SEQ ID NO: 7871,accession number AAG03790,Smith-Waterman Score=205.
aatcttttttctttgttttgagacggagtcttgctgtcgcccaagctgaagtgcagtagcgcaatctcggctcgctgcaacctccgcctcctgagttcaagcgattctcctgcttcagcctcccaagtggctgggattacaggcgcccgccaccgcgcccagctaattttttgtatttttagtagagaggggtttccaccatgtggggccagggctggtctcgaactcctgacctcaggggtgatcttgcccacctcgggtcccccaaagtgctgggcatgacagggcgtgagccaccatgcctggggcctcttaatgggctaactttcttacccgagatttcttagggggaaggataggcagagacctcttccaatcaggaatgcttccttcttttggggagagcctacccgcctgggggggggttca

SEQ ID NO: 5684 - DNA, 406 bp, Homo sapiens
  SIMILAR (218)..(283): 811254mologous to Homo sapiens PRO0898,accession number AF130051,Smith-Waterman Score=99.
tctggcccatagaaaggactctggataaactgaagctgtcaccaaacgtaggcctaaattcaatgcataggaactcagaggcagcatctacaaaagctgagggtgcacaggtttctaagtgggttctaagagggttctaagaggacccagtaatgcactgatatccaaggttatccagggtctcgctctgtcgcccaggctggagtgcagtggcacaatcttctgcctcagcctcccaagtagctgggactacaggcgcccactgccacgcccagctaattttttgtatttttaggagagacggggtttcaccgtgttagccaggatggtctcaatctcctgaccttgtgatccgcccgcctcagcctcccaaggtgctgggattacaggcgtgagccaccgcacc

SEQ ID NO: 5685 - DNA, 1787 bp, Homo sapiens; identical to SEQ ID NO: 3161
  SIMILAR (312)..(1199): 1001254mologous to Homo sapiens mdm2-A,accession number U33199,Smith-Waterman Score=1582.

SEQ ID NO: 5686 - DNA, 1553 bp, Homo sapiens; identical to SEQ ID NO: 3162
  SIMILAR (312)..(965): 1001254mologous to Homo sapiens mdm2-B,accession number U33200,Smith-Waterman Score=1184.

SEQ ID NO: 5687 - DNA, 1862 bp, Homo sapiens; identical to SEQ ID NO: 3163
  SIMILAR (312)..(1274): 991254mologous to Homo sapiens mdm2-C,accession number U33201,Smith-Waterman Score=1697.

SEQ ID NO: 5688 - DNA, 1295 bp, Homo sapiens
  SIMILAR (312)..(707): 1001254mologous to Homo sapiens mdm2-D,accession number U33202,Smith-Waterman Score=699.
gcaccgcgcgagcttggctgcttctggggcctgtgtggccctgtgtgtcggaaagatggagcaagaagccgagcccgaggggcggccgcgacccctctgaccgagatcctgctgctttcgcagccaggagcaccgtccctccccggattagtgcgtacgagcgcccagtgccctggcccggagagtggaatgatccccgaggcccagggcgtcgtgcttccgcagtagtcagtccccgtgaaggaaactggggagtcttgagggacccccgactccaagcgcgaaaaccccggatggtgaggagcaggcaaatgtgcaataccaacatgtctgtacctactgatggtgctgtaaccacctcacagattccagcttcggaacaagagaccctggttagacaagaaagtgaagactattctcagccatcaacttctagtagcattatttatagcagccaagaagatgtgaaagagtttgaaagggaagaaacccaagacaaagaagagagtgtggaatctagtttgccccttaatgccattgaaccttgtgtgatttgtcaaggtcgacctaaaaatggttgcattgtccatggcaaaacaggacatcttatggcctgctttacatgtgcaaagaagctaaagaaaaggaataagccctgcccagtatgtagacaaccaattcaaatgattgtgctaacttatttcccctagttgacctgtctataagagaattatatatttctaactatataaccctaggaatttagacaacctgaaatttattcacatatatcaaagtgagaaaatgcctcaattcacatagatttcttctctttagtataattgacctactttggtagtggaatagtgaatacttactataatttgacttgaatatgtagctcatcctttacaccaactcctaattttaaataatttctactctgtcttaaatgagaagtacttggttttttttttcttaaatatgtatatgacatttaaatgtaacttattattttttttgagaccgagtcttgctctgttacccaggctggagtgcagtgggtgatcttggctcactgcaagctctgccctccccgggttcgcaccattctcctgcctcagcctcccaattagcttggcctacagtcatctgccaccacacctggctaattttttgtacttttagtagagacagggtttcaccgtgttagccaggatggtctcgatctcctgacctcgtgatccgcccacctcggcctcccaaagtgctgggattacaggcatgagccaccg

SEQ ID NO: 5689 - DNA, 1149 bp, Homo sapiens
  SIMILAR (312)..(617): 1001254mologous to Homo sapiens mdm2-E,accession number U33203,Smith-Waterman Score=521.
gcaccgcgcgagcttggctgcttctggggcctgtgtggccctgtgtgtcggaaagatggagcaagaagccgagcccgaggggcggccgcgacccctctgaccgagatcctgctgctttcgcagccaggagcaccgtccctccccggattagtgcgtacgagcgcccagtgccctggcccggagagtggaatgatccccgaggcccagggcgtcgtgcttccgcagtagtcagtccccgtgaaggaaactggggagtcttgagggacccccgactccaagcgcgaaaaccccggatggtgaggagcaggcaaatgtgcaataccaacatgtctgtacctactgatggtgctgtaaccacctcacagattccagcttcggaacaagagaccctggttagaccaaagccattgcttttgaagttattaaagtctgttggtgcacaaaaagacacttatactatgaaagaggttcttttttatcttggccagtatattatgactaaacgattatatgatgagaagcaacaacatattgtaaatgattgtgctaacttatttcccctagttgacctgtctataagagaattatatatttctaactatataaccctaggaatttagacaacctgaaatttattcacatatatcaaagtgagaaaatgcctcaattcacatagatttcttctctttagtataattgacctactttggtagtggaatagtgaatacttactataatttgacttgaatatgtagctcatcctttacaccaactcctaattttaaataatttctactctgtcttaaatgagaagtacttggttttttttttcttaaatatgtatatgacatttaaatgtaacttattattttttttgagaccgagtcttgctctgttacccaggctggagtgcagtgggtgatcttggctcactgcaagctctgccctccccgggttcgcaccattctcctgcctcagcctcccaattagcttggcctacagtcatctgccaccacacctggctaattttttgtacttttagtagagacagggtttcaccgtgttagccaggatggtctcgatctcctgacctcgtgatccgcccacctcggcctcccaaagtgctgggattacaggcatgagccaccg

SEQ ID NO: 5690 - DNA, 744 bp, Homo sapiens; identical to SEQ ID NO: 2212
  SIMILAR (558)..(334): 901254mologous to Homo sapiens glucose transporter-like protein,accession number M20681,Smith-Waterman Score=359.

SEQ ID NO: 5691 - DNA, 1624 bp, Homo sapiens
  SIMILAR (1458)..(658): 1001254mologous to Homo sapiens C33 antigen=type III integral membrane protein,accession number S48196,Smith-Waterman Score= 1413.
tttttttttttttttttgagacggagtctctttctgtcccccaggctggagtgcagtagcacgatctcagctcactgcaacctccgctcccgggttcacaccattctcctgcctcagcctcccaagtagctgggactacaggtgcccgccaccgcgcccggctaaattttttttgtatttttagtagagacggggtttcaccatgttagccaggatggtctcgatctcctgacctcgtgatccacccgcctcggcctcccaaagtgctgggattacaggcgtgagccaccgcgcccggccccctcctccccaatttttcatacagttgcccctatacaatatacacacccttgagggcaggtagaagtccagcccacctgcgccagggacgctgtggggagcatttttctctgagttgctaagagaaccctgatgggcggtgagcagaggaaccacagaacagccagggctcaaggctggcagcggataggccaggagagatcgctaggccccagaaagccccctactttcagtcagggtgggcaagagggtcttcgcagtgaagtgggaggcaggcctggaggagggagccagggagacccctgggagccctgaggttgggggccaggcagggagatggggatagcagctgcctcagtacttggggaccttgctgtagtcttcggaatgcacgtgccggcacaagcagatggacaggaccatccccaggagctcgaccatggccacacccacgcccacgccgaggatgatgcccaggttctcctgcagccacgcctgcaccttctccatgcagccctcctggtacacaggccagtcctcagggtggttgccactctgggtcctgttgccgggggcctcgcagaagcccttcctcacagaaaggctgttgtcctcttcccccttgacttcgcaggaacaggggtaggtgacctcagggcgattcatgagctcagcgttgtctgtccagttgtagaagctgacccagccgcagcacttcacctgagcctgcacgtagtcccaggcatcctgcaggctgtcctcgcgactgctgttgtagtctcgaatgagctcagtcacgatgccacccatctcctgcttcagcttgcccatgttgaagtagaagagggccccggccgtcacctgggcaatgaggatcaggagcaggaaagcaaagtacagccccagcaggcagcggacctcgttgacggcgccgatgcagcccaggaagcccatgagcatagtgactgcccccacgccgatgaagacataggcccccatcctaagcgagctggaggaggtttgcaggacagagatgaaactgctcttgtcggccaggatccacaccccgaagcccaggatcactgcgcccaggataaagaagatcaagttgaagaggaagagaaagtatttggtgactttgatacaggctgagcccatcccgccagtcctggagcttccttccacgaaaccagtgcagctggtcacagggcccacttctgcctgtgcccacgtgtcgtccacacagcagcagggaggactctgcgggttctgctttctgctccgcgctgcaggcccagcgtcacccgctcgtgcctcagtcggc

SEQ ID NO: 5692 - DNA, 2372 bp, Homo sapiens
  SIMILAR (312)..(1784): 1001254mologous to Homo sapiens Human MDM2,accession number AX057138,Smith-Waterman Score=2574.
gcaccgcgcgagcttggctgcttctggggcctgtgtggccctgtgtgtcggaaagatggagcaagaagccgagcccgaggggcggccgcgacccctctgaccgagatcctgctgctttcgcagccaggagcaccgtccctccccggattagtgcgtacgagcgcccagtgccctggcccggagagtggaatgatccccgaggcccagggcgtcgtgcttccgcagtagtcagtccccgtgaaggaaactggggagtcttgagggacccccgactccaagcgcgaaaaccccggatggtgaggagcaggcaaatgtgcaataccaacatgtctgtacctactgatggtgctgtaaccacctcacagattccagcttcggaacaagagaccctggttagaccaaagccattgcttttgaagttattaaagtctgttggtgcacaaaaagacacttatactatgaaagaggttcttttttatcttggccagtatattatgactaaacgattatatgatgagaagcaacaacatattgtatattgttcaaatgatcttctaggagatttgtttggcgtgccaagcttctctgtgaaagagcacaggaaaatatataccatgatctacaggaacttggtagtagtcaatcagcaggaatcatcggactcaggtacatctgtgagtgagaacaggtgtcaccttgaaggtgggagtgatcaaaaggaccttgtacaagagcttcaggaagagaaaccttcatcttcacatttggtttctagaccatctacctcatctagaaggagagcaattagtgagacagaagaaaattcagatgaattatctggtgaacgacaaagaaaacgccacaaatctgatagtatttccctttcctttgatgaaagcctggctctgtgtgtaataagggagatatgttgtgaaagaagcagtagcagtgaatctacagggacgccatcgaatccggatcttgatgctggtgtaagtgaacattcaggtgattggttggatcaggattcagtttcagatcagtttagtgtagaatttgaagttgaatctctcgactcagaagattatagccttagtgaagaaggacaagaactctcagatgaagatgatgaggtatatcaagttactgtgtatcaggcaggggagagtgatacagattcatttgaagaagatcctgaaatttccttagctgactattggaaatgcacttcatgcaatgaaatgaatcccccccttccatcacattgcaacagatgttgggcccttcgtgagaattggcttcctgaagataaagggaaagataaaggggaaatctctgagaaagccaaactggaaaactcaacacaagctgaagagggctttgatgttcctgattgtaaaaaaactatagtgaatgattccagagagtcatgtgttgaggaaaatgatgataaaattacacaagcttcacaatcacaagaaagtgaagactattctcagccatcaacttctagtagcattatttatagcagccaagaagatgtgaaagagtttgaaagggaagaaacccaagacaaagaagagagtgtggaatctagtttgccccttaatgccattgaaccttgtgtgatttgtcaaggtcgacctaaaaatggttgcattgtccatggcaaaacaggacatcttatggcctgctttacatgtgcaaagaagctaaagaaaaggaataagccctgcccagtatgtagacaaccaattcaaatgattgtgctaacttatttcccctagttgacctgtctataagagaattatatatttctaactatataaccctaggaatttagacaacctgaaatttattcacatatatcaaagtgagaaaatgcctcaattcacatagatttcttctctttagtataattgacctactttggtagtggaatagtgaatacttactataatttgacttgaatatgtagctcatcctttacaccaactcctaattttaaataatttctactctgtcttaaatgagaagtacttggttttttttttcttaaatatgtatatgacatttaaatgtaacttattattttttttgagaccgagtcttgctctgttacccaggctggagtgcagtgggtgatcttggctcactgcaagctctgccctccccgggttcgcaccattctcctgcctcagcctcccaattagcttggcctacagtcatctgccaccacacctggctaattttttgtacttttagtagagacagggtttcaccgtgttagccaggatggtctcgatctcctgacctcgtgatccgcccacctcggcctcccaaagtgctgggattacaggcatgagccaccg

SEQ ID NO: 5693 - DNA, 2173 bp, Homo sapiens
  SIMILAR (178)..(621): 911254mologous to Homo sapiens pregnancy specific beta-1- glycoprotein 3,accession number BC005924,Smith-Waterman Score=718.
atgacccagttccctatggataaacgtcagggtcgttcccgatctgtggccatcaccaacactgccgtgactagtctagaatgggtgccatttcatgcatttgcaattcccagaagtacactggttagtcagcagaggctcagcacagaaagaggaaggacagcacagctgacagccgtgctcagagagtttctggatcctaggcttatctccacagaggagaacacacaagcagcagagaccatgggaaccctctcagcccctccctgcacacagcgcatcaaatggaaggggctcctgctcacagcatcacttttaaacttctggaacctgcccaccactgcccaagtcacgattgaagccgagccaaccaaagtttccgaggggaaggatgttcttctacttgtccacaatttgccccagaatcttaccggctacatctggtacaaagggcaaatgagggacctctaccattacattacatcatatgtagtagacggtgaaataattatatatgggcctgcatatagtggacgagaaacagcatattccaatgcatccctgctgatccagaatgtcacccgggaggacgcaggatcctacaccttacacatcataaaagcgaggtgataggactagaggagtaactggatatttcaccttcaacttatacctggagactcccaagccctccatctccagcagcaacttataccccagggaggacatggaggctgtgagcttaacctgtgatcctgagactccggacgcaagctacctgtggtggatgaatggtcagagcctccctatgactcacagcttgcagttgtccaaaaacaaaaggaccctctttctattgggtgtcacaaagtatactgcaggaccctatgaatgtgaaatacggaacccagtgagtgccagccgcagtgacccagtcaccctgaatctcctcccgaagctgcccaagccctacatcaccatcaacaacttaaaccccagggagaataaggatgtcttaaacttcacctgtgaacctaagagtgagaactacacctacatttggtggctaaatggtcagagcctcccggtcagtcccagggtaaagcgacccattgaaaacaggatcctcattctacccagtgtcacgagaaatgaaacaggaccctatcaatgtgaaatacgggaccgatatggtggcatccgcagtgacccagtcaccctgaatgtcctctatggtccagacctccccagaatttacccttcattcacctattaccgttcaggagaagtcctctacttgtcctgcttctgcggactctaacccaccggcacagtattcttggacaattaatgaaaagtttcagctaccaggacaaaagctctttatccgccatattactacaaagcatagcgggctctatgtttgctctgttcgtaactcagccactggcaaggaaagctccaaatccatgacagtcgaagtctctgactggacagttccctgaattctactagtacctccaattccattttctcccatggaatcactaagagcaagacccactctgttccagaagccctataagctggaggtggacaactcaatgtaaatttcatgggaaaacccttgtacgtgaagcatgagccactcagaactcaccaaaatattcgacaccataacaacagatgctcaaactgtaaaccaggacaacaagtggatgacttcacactgtggacagtttttcccaagatgtcagaacacgactccccatcatgatgaggctctcccccctcttaactgtccttgctcatgcctgcctctttcacttggcaggataatgcagtcattagaatttcacatgtagtagcttctgagagtaacaacagagtgtcagatatgtcatctcaacctcaaacttttacataacatctcagggggaaatgtggctctctccaccttgcatacagggctcccaatagaaatgaacacagagatattgcctgtgtgtttgcagagaagatggtttgtatgaagacgtaggaaagctgaaattataatagagtcccctttaaatccacattgtgtggatggctcttgccgtttcctaagagatacattgtaaaacgtgacagtaagacattctagcagaataaaacatgtacctcctttgct

SEQ ID NO: 5694 - DNA, 480 bp, Homo sapiens
  SIMILAR (19)..(174): 1001254mologous to Mus musculus putative,accession number AK002353,Smith-Waterman Score=272.
  misc_feature (1)...(480): n = a,t,c or g
catctccttctcggcatcatggccgccctcagaccccttgtgaagcccaagatcgtcaaaaagagaaccaagaagttcatccggcaccagtcagaccgatatgtcaaaattaagcgtaactggcggaaacccagaggcattgacaacagggttcgtagaagattcaagggccagtgcgcagtgaagaaaatgagtaggcagctcatgtgcacgttttctgtttaaataaatgtaaaaactgccccnnnnnnnnnnnnnnnnnnnnnnnnnnnnnnnnnnnnnnnnnnnnnnnnnnnnnnnnnnnnnnnnncctttttaaaaatttcttgggggggcccaatttttccggggggggaaaaaaaannnnnnnnnnnnnnnggggggggttttaaaaacccccggggggttttttgaaaaaaaccctttttttnnnnnnnnnncttttgggnnnnnnnnnnnnnaaaaaatttaacggtttgg

SEQ ID NO: 5695 - DNA, 368 bp, Homo sapiens
  misc_feature (1)...(368): n = a,t,c or g
tctggatttcactgattttcttgcttaataagttttttaaaaccacgatgctgcaattttttccctctcaagcttcttgaaaatgtgtgatttacccttttttatctattactctaggcaaagctaaatatgannnnnnnnnnnnnnnagaaaaggagttggctttttttccccagggtgaaatgcagggggggaatctcggttaattgaaacccccccctctaaggtaaagggatttttcttgcctggccctcccaaggggtgggaatggcaggggggcccccccctccccaactaattttggttttttggggggaaacggggtttaccccagtgggccaggggggtttgaaactccggacctaaaa

SEQ ID NO: 5696 - DNA, 372 bp, Homo sapiens
  SIMILAR (204)..(341): 1001254mologous to Homo sapiens dJ852M4.1.3 (HBV associated factor (isoform 3)),accession number AL121747,Smith-Waterman Score= 229.
cggacgcgtgggcgctccccttgcgaagaactggggcctcccgggaggagagagggctttgccttgaaacccgggacgccaggggcgctcccgcaagtgggggtcctccgggacttggaacgccccggctgggtggtgtccgggcgtcctttccccgcttcttcccacgccagatggacgagaagaccaagaaagcagaggaaatggccctgagcctcacccgagcagtggcgggcggggatgaacaggtggcaatgaagtgtgccatctggctggcagagcaacgggtgcccctgagtgtgcaactgaagcctgaggtctccccaacgcaggacatcagattcctcatggtgcaaaatggccattccagct

SEQ ID NO: 5697 - DNA, 2543 bp, Homo sapiens
  SIMILAR (576)..(1979): 1001254mologous to Homo sapiens HBV associated factor,accession number U67322,Smith-Waterman Score=2599.
gaattccgggcgccgggaccgctgggaccccgcactcggcgtccggcccgccgggtagccggcagtggaggtcccggatgaggcgacaatttttccggccccccctcccagtcccgccccacttccggggccgccactttcactttctcttccgccgaagccgctccccttgcgaagaactggggcctcccgggaggagagagggctttgccttgaaacccgggacgccaggggcgctcccgcaagtgggggtcctccgggacttggaacgccccggctgggtggtgtccgggcgtcctttccccgcttcttcccacctcggctggtcccgtttcctcctgcgcccagtgcggacctgtctcggcgcccgctgccctctcaccgccccacgcaggatcccggcctggtcatcgggcagtgtgatgcttcccgactgccgcggggacagcgaggcacacacagggcttgggccgcgccggaggccacacggcctggctgagttgctcctggtctcccgcctctcccaggcgacccggaggtagcatttcccaggaggcacggtcccccccagggggatgggcacagccacgccagatggacgagaagaccaagaaaggctgtgggtgagcgtggaggatgctcagatgcacaccgtcaccatctggctcacagtgcgccctgatatgacagtggcgtctctcaaggacatggtttttctggactatggcttcccaccagtcttgcagcagtgggtgattgggcagcggctggcacgagaccaggagaccctgcactcccatggggtgcggcagaatggggacagtgcctacctctatctgctgtcagcccgcaacacctccctcaaccctcaggagctgcagcgggagcggcagctgcggatgctggaagatctgggcttcaaggacctcacgctgcagccgcggggccctctggagccaggccccccaaagcccggggtcccccaggaacccggacgggggcagccagatgcagtgcctgagcccccaccggtgggctggcagtgccccgggtgcaccttcatcaacaagcccacgcggcctggctgtgagatgtgctgccgggcgcgccccgaggcctaccaggtccccgcctcataccagcccgacgaggaggagcgagcgcgcctggcgggcgaggaggaggcgctgcgtcagtaccagcagcggaagcagcagcagcaggaggggaactacctgcagcacgtccagctggaccagaggagcctggtgctgaacacggagcccgccgagtgccccgtgtgctactcggtgctggcgcccggcgaggccgtggtgctgcgtgagtgtctgcacaccttctgcagggagtgcctgcagggcaccatccgcaacagccaggaggcggaggtctcctgccccttcattgacaacacctactcgtgctcgggcaagctgctggagagggagatcaaggcgctcctgacccctgaggattaccagcgatttctagacctgggcatctccattgctgaaaaccgcagtgccttcagctaccattgcaagaccccagattgcaagggatggtgcttctttgaggatgatgtcaatgagttcacctgccctgtgtgtttccacgtcaactgcctgctctgcaaggccatccatgagcagatgaactgcaaggagtatcaggaggacctggccctgcgggctcagaacgatgtggctgcccggcagacgacagagatgctgaaggtgatgctgcagcagggcgaggccatgcgctgcccccagtgccagatcgtggtacagaagaaggacggctgcgactggatccgctgcaccgtctgccacaccgagatctgctgggtcaccaagggcccacgctggggccctgggggcccaggagacaccagcgggggctgccgctgcagggtaaatgggattccttgccacccaagctgtcagaactgccactgagctaaagatggtggggccacatgctgacccagccccacatccacattctgttagaatgtagctcagggagcttcgtggacggccttgcttgctgtagcgttgtaggggccctgcctgcactgcggttgtccacggtcacatctgccccagtgcctttgtccttcccttggggcttgccggccagacttctctcccctgcggctcccacctctgcctgaccccagccttaaacatagcccctggccagaggccttgctgggtggagcctctgtgtgactccatactcctcccaccacaacactcatctgtcaaacaccaagcactctcagcctccccgccttcagctgtcagctttctggggctaacttctctgcctttgtggttggaggcctgaggcctcttggaactcttgctaacctgttcagagccaggaaggagactgcacagttttgaaagcacagcccgtcaggtccggctctgcgtctccctctctgcagcctgtgtaagctattataattaaaatggttttcggccacgaaggccggccttcgtggcctcgag

SEQ ID NO: 5698 - DNA, 1894 bp, Homo sapiens
  SIMILAR (782)..(1891): 891254mologous to Homo sapiens dJ852M4.2 (Novel protein similar to Drosophila CG17883),accession number AL121747,Smith- Waterman Score=1658.
gcgacccggaggtagcatttcccaggaggcacggtcccccccagggggatgggcacagccacgccagatggacgagaagaccaagaaagctcctgaaaataaaccctgtgctaactggctcctgctgtactggctttcagcagaggaaatggccctgagcctcacccgagcagtggcgggcggggatgaacaggtggcaatgaagtgtgccatctggctggcagagcaacgggtgcccctgagtgtgcaactgaagcctgaggtctccccaacgcaggacatcaggctgtgggtgagcgtggaggatgctcagatgcacaccgtcaccatctggctcacagtgcgccctgatatgacagtggcgtctctcaaggacatggtttttctggactatggcttcccaccagtcttgcagcagtgggtgattgggcagcggctggcacgagaccaggagaccctgcactcccatggggtgcggcagaatggggacagtgcctacctctatctgctgtcagcccgcaacacctccctcaaccctcaggagctgcagcgggagcggcagctgcggatgctggaagatctgggcttcaaggacctcacgctgcagccgcggggccctctggagccaggccccccaaagcccggggtcccccaggaacccggacgggggcagccagatgcagtgcctgagcccccaccggtgggctggcagtgccccgggtgcaccttcatcaacaagcccacgcggcctggctgtgagatgtgctgccgggcgcgccccgaggcctaccaggtccccgcctcataccagcccgacgaggaggagcgagcgcgcctggcgggcgaggaggaggcgctgcgtcagtaccagcagaatgttttgcttctggtctggcttctcaggcattcctgcaataacgtgccttttccttcaatagggaagaacctacggcagatgagcaaggactaccaacaagtgttgctggacgtccggcggtcattgcggcggttccctcctggcatgccagaggaacagagagaagggctccaggaagaactgattgacatcatcctcctcatcttggagcgcaaccctcagctgcactactaccagggctaccatgacattgtggtcacatttctgctggtggtaggcgagaggctggcaacatccctggtagaaaaattatctacccaccacctcagggattttatggatccaacaatggacaacaccaagcatatattaaactatctgatgcccatcattgaccaggtgaatccagagctccatgacttcatgcagagtgctgaggtagggaccatctttgccctcagctggctcatcacctggtttgggcatgtcctgtctgacttcaggcacgtcgtgcggttatatgacttcttcctggcctgccacccactgatgccgatttactttgcagccgtgattgtgttgtatcgcgagcaggaagtcctggactgtgactgtgacatggcctcggtccaccacctgttgtcccagatccctcaggacttgccctatgagacactgatcagcagagcaggagacctttttgttcagtttcccccatccgaacttgctcgggaggccgctgcccaacagcaagctgagaggacggcagcctctactttcaaagactttgagctggcatcagcccagcagaggcctgatatggtgctgcggcagcggtttcggggacttctgcggcctgaagatcgaacaaaagatgtcctgaccaagccaaggaccaaccgctttgtgaaattggcagtgatggggctgacagtggcacttggagcggctgcactggctgtggtgaaaagtgccctggaatgggcccctaagtttcagctgcagctgtttccctga

SEQ ID NO: 5699 - DNA, 1111 bp, Homo sapiens
  misc_feature (1)...(1111): n = a,t,c or g
tgggcgganatctgtacggtccgacngcnagacnannggtggaacacgcgaccgcggaccaggtttcactatcttttgcgccgaattcgatttccttgcgaagaactggggcctcccgggaggagattaggtctttgccttgaaacccggaacgccaggggcgctcccgcaagtgggggtcctccgggacttggaacgccccggctgggtggtgtccgggcgtcctttccccgcttcttcccacctcggcctggttccgtttcctcctgcgcccaagtgcggaaccctgtctcggcgcccgctgccctctcaccgccccacgcaggatcccggcctggtcaccgggcagttgtgatgcttcccgactgccgcggggacagcgacggcacacacagggcttgggccgcgccggaagccacaccggccttggctgagttgctcctggtctccccgcctcttcccaggcgacccggaggtaagcattttcccaaggaaggcacggtcccccccaggggaatggggcacagccacgccagatggacgagaagaccaagaaagcagaggaaatggcccttagccttcaaccgaagcagtggcgggcggggatgaaccaggtggcaatgaagtgtgccatctggctggcagagcaacggtgtgcccctgagtgtgcaactgaagcctgaggtctccccaaacgcaggacatcagattcctcatggtgcaaaattggccattccagctccatccaagccatcacatcacaaggaggaagggaagaaagacaccccctccacactcttctaaagaagcatagcttcaaaaatttgtatacactttcttccgttaaattccttgtggaccaagaacttgattcccacagctacagttcagcttgaggggagactgtataagccaagatattcagctagaattcaggggttcgcttggtaagggaagggaagagaaatggatactgtcggttctgtgctccaggggactttaaactcaatgctggaaacacttgtgcacaatagcctggcgctgttcatgcatctcaatatataaaccattaagtgtctatcgttaaaaaaaaaaaaaaaaaaaaatgtcg

SEQ ID NO: 5700 - DNA, 293 bp, Homo sapiens
  SIMILAR (8)..(289): 791254mologous to Homo sapiens Human secreted protein clone pe584_2 protein sequence,accession number AAY29332,Smith-Waterman Score=392.
  misc_feature (1)...(293): n = a,t,c or g
gcacgagccgcaattgaattctaacaacgttgccctgcacggagctgtcatcccaggcccgccatttttatttggggcatgtataaaccttatgaattttatggttgccttattcattcctgaatacaagatagccaggggagttcaaaaacacacctacaagcacaacgggagcctgaccaacaccccataacggggcagtgatgaggacattgagccactactgcgagacagcaccatatgggaactcttttcatttgaggaacctgggaatcaatgccctgagctgtaan

SEQ ID NO: 5701 - DNA, 312 bp, Homo sapiens
  SIMILAR (1)..(237): 651254mologous to Homo sapiens Human myelin oligodendrocyte glycoprotein gene,accession number AAZ29204,Smith-Waterman Score= 244.
cccaggttcaagctattcccctgcctcagcctactgagtagctaggattatagataggtgcctgccatcacacctggctaatttttgtattttttttaagtaaagacagggtttcaccatgttggccagactggtctcgaactcctgacctcaggcgatccacccacctcagcctcccaaagtgctgggattacaggcatgagccactgcacctggcctatttcattcttatatttgtggcatacaggtggcaagaagaaagaatgttagaaagggtgaataggtgaaaaatatttaaaagttttataggtt

SEQ ID NO: 5702 - DNA, 375 bp, Homo sapiens
catgagtggatgggtacaagagtaggtgagtggatggatgaatggaaggagggatggaaaatggatggtaaggtggataagtagatgaatggatggatggaaggatgcttataccaatggttaaatactgaaattctctgtcaagaactcattccctatacgtgtctatgtctgttttctggctggatatatatttttaaacagtccatcctggattaggacaaatgaatgaactagctgcaaagcccactagctctttgactaagggtcaaatgcaggccactactgaactatcgccttcccaaggagaggcaaacaaatgctagcaactgtacactccataattgcccatttaacaaacacatggctcgtgcc

SEQ ID NO: 5703 - DNA, 356 bp, Homo sapiens
ggcacgaggactgacagaaacgtgaagccacagtggacgcctggatgagacacagatcaccttccaaatctgagtgtggccttgggaccaaccaggcagccagggagaaggcagagaccagagggaacccagtggctgcaggctccaggcgccactttccttgagtctatgttctttccaagcatcctgcagctccagaagctctggagccgccagcactgagagaagcgatggagctgcatgcagggaaactttgttgacagcggtgtctggatggaccaacagagggcactctcacccacggggaaaatcgtgcgcccggcctcgtccaccgccagaagacgccgctacacaat

SEQ ID NO: 5704 - DNA, 656 bp, Homo sapiens
gcggcacgaggtgaagccacagtggacgcctggatgagacacagatcaccttccaaatctgagtgtggccttgggaccaaccaggcagccagggagaaggcagagaccagagggaacccaggtgccctcaatcccagcctcctctatcccagcctcccaatcccagcctccccaatcccagcctcctaatcccagcctcctccatcccaggacccccactcccagcctcccgatcccagcttctctgatcccagcctcccctaaaacccagactctatgaatcccagcctctgaggtgggaactgttagtaaccccactccatggacaagaaagctggggcctggcgaggctaacagactatccttgatggtgtgagggagggatcgggcctctggagggctgcttccacccattcttcaccagtggctgcaggctccaggcgccactttccttgagtctatgttctttccaagcatcctgcagctccagaagctctggagccgccagcactgagagaagcgatggagctgcatgcagggtgagtgtaggaccgggcggagctgctctgtggctggcgggcacattctttgtcaacatgagcatctctcactgttcctagaccccctggctccccagcttccttggagccaggcgt

SEQ ID NO: 5705 - DNA, 1076 bp, Homo sapiens
  SIMILAR (153)..(341): 951254mologous to Ovis aries ribosomal protein L32,accession number AF190579,Smith-Waterman Score=319.
  misc_feature (1)...(1076): n = a,t,c or g
cgctgcctacggaggtggcagccatctccttctcgctggcgattggaaaacactctgcgacagtgttcagtccctgggcaggaaagcctccttccaggattcttcctcacctggggccacttcttccccaaaaggcatcatggccgcccttgagaccccttgtgaagcccaagttcgtcaaaaagagacccaagaagttcatccggcaccagtcagaccgatatgtcaaaattaagcgtaactggcggaaacccagaggcattgacaacagggttcgtagaagattcaagggccagatcttgatgcccaacattggttatggaagcaacaaaaaaaacaaagcacatgctgcccagtggcttccggaagttcctggtccacaacgtcaaggagcaaggagctggaagtgctgctgatgtgcaacaaatcttactgtgccgagatcgctcacaatgtttcctccaagaaccgcaaagccatcgtggaaagagcttgcccaactggccatcagagtcaccaaccccaatgccaggctgcgcagtgaagaaaatgagtaggcagctcatgtgcacgttttctgtttaaataaatgtaaaaactgcatgaaanaaaaaaggaacaaatgaaatattctgggggggtcgacggctgcgagaagacgacagaaggggttcctggtccacaacgtcaaggagctggaagtgctgctgatgtgcaacaaatcttactgtgccgagatcgctcacaatgtttcctccaagaaccgcaaagccatcgtggaaagagctgcccaactggccatcagagtcaccaaccccaatgccaggctgcgcagtgaagaaaatgagtaggcagctcatgtgcacgttttctgtttaaataaatgtaaaaactgcnnnnnnnnnnnnnggggggggccttttaagagccccaggttttactcccgggggggggcaggtttaaatttttttaagggggccccaaaatcaaattccggggccgggtttttaaaaggggggggagggaaaaacccggggggtccccaatttaaagcccttggggaaaaaaccctggcg

SEQ ID NO: 5706 - DNA, 359 bp, Homo sapiens
ggcacgagcggcgcgaggtgacagtgatccgccgggggggaaaacaccaacttagacttgttccaacacgctgtgcaggaaaaggactgctggggtaaagtatctgtttctggtcattctcactggggcatcattggagtgtttgttaaacatgaagctggaggggaaggctggggagacattggggaatattgggaattcccagtttgcatggaaactgcagaataatcctcgtggtaggaacgagactaccgctgtacaacccaagggagccccgcagtgtctactgggagcctctccacttcattcatgcactaagcatttgctttaaaagaatgaaagaacattgctgaaaaggt

SEQ ID NO: 5707 - DNA, 674 bp, Homo sapiens
tttttttttttcatgtttcatagttttattgagtctttttcagttttaactgtccatggtaagtacagttctagtgaccacaattatgaagctctgctcgtactaaaaatagcagatacaaagttggctgccatgccttacacacactaagacacacacacacacacacacacacacacacacacacaaggttttgcatactcttacatgcaaacagtactatgctattataggaaatgtactttccttttattaaaaatacaattacacacaattagtctgggttttgttaagctaccactgatttagataaacctgagaaagctcaaaatatcaagtaacactgtttccatactgctcattcaatggcactatcactcaaaaagaaatctagttcaatcatctatattaaaatcgcagataatataaaaataaacattttttgcaatagcactaaaacatgctataattcaaattcacaaattttgatatgtaacatatattcaccttcatattaatttgtgattatgtgtataatacaatgtacaacagaataaaaaactctaacagaattcagcagccaaataatatacaattatcgctatgaaacttggaattttagttgataacttaaattccaagttacatagtgataattgtatattaagttatca

SEQ ID NO: 5708 - DNA, 430 bp, Homo sapiens
actagttctagatcgcgatctagaacctagcccacgcgtccggggtcttttgatttttgttagcctcccaattttcagggctgctttcttagttgtttttaaaatactactttcagagcatcaggctctcatttcccacattgctttgagtaccagtgctatttctcccttgttggcttttattctaatcatagtcattagagatgacttcatgatgagtctggagatgataaaatggaaatctttcccttccatttaaagtattaggaattctttattttaacttttaaaaataacatctttatttacaggtacaacagaatatctcgggaatggactcagaagtatgccatgtgatgctaccttaaagtcagaataacctgcattatagctggaataaactttaaattactgttaaaaaaaaaaaaaa

SEQ ID NO: 5709 - DNA, 703 bp, Homo sapiens
  SIMILAR (8)..(205): 931254mologous to Mus musculus putative,accession number AK003163,Smith-Waterman Score=329.
cagaaagggcagcatttgtctcgatattctaagatcacagtggtcgcctgctttaacaatgtctaaagttcttttatccatttgttcactgctatgggatccaaacccagatgaccccctagtgccagagattgcacggatctataaatcagacagagataagtacaacagaatatgtcgggaatggactcaaaagtatgccatgtgatgctaccttaaagtcagaataacctgcattatagctggaataaactttaaatgactgttccttttttgattttgttatacggctgctcccctatcaaacctcatcttttttaattttattttttgtttacctccctccattcattcacatgctcatctgaggaagacttaaagttcttccagctttgggacaataactgcttttaggaaactgtaaagtaggttacaagaggaacagttgcccaaggactcaggaattttttaaaaaaaaaaatggggggcctgtggtattatgtgggccaatggtcttcactctaacttgggttatgaggactaaaacccattcctcactggctcttaacatggctggaaggaaattcatctgaggggggagggagatgggatgctcatgttgtcacatcaaagggatacagcattattctagcagcatccattctggtttaagccttccactgttagagatttgaggttacat

SEQ ID NO: 5710 - DNA, 623 bp, Homo sapiens
  SIMILAR (1)..(180): 651254mologous to Homo sapiens Human secreted protein, SEQ ID NO: 7871,accession number AAG03790,Smith-Waterman Score=188.
ttttttttttttttttttcctttatttaggcagtgtctcactctgtcacccaggctggagtacagtggcacgatctcagctcactgcagcctcagccagccgggctcaagtgatcctcccacctcagccctccgagtagctgagactacaggcacgcgccaccatgcctggctaatttttgtattttaagtagaaacggggcttcaccacgttgtcctggctggtcttgagctcatgggctcaagaaatcagcccacctcagcctcccaaagtgctgggattacaggtgtgaaccaccgtgcttggctgacatggtagtttttatcaagaaaaagagttactgactctccttgagataagaagctgagcaacacagtcaataaatatatgtgtatataatcatgaacattcccttcttggaagagtactggatgttctgaatatgaaagaacacttggatatataattctgttttccatgacactgaagttaagttagaataatcaaaggacttccctaaaattgtctcaggggcattgttgtaaaatttcaagctttatccagtgagtattttaaaaagatctaacaaacagatcacaatgaattaattagcttaaaaaaga

SEQ ID NO: 5711 - DNA, 887 bp, Homo sapiens
  misc_feature (1)...(887): n = a,t,c or g
aaaagaaaaaattttcccctccccgggttttaaacacccgcccccgccccccttttaaaaaacccccctaaaaggaaaaagaatatttttttcccccccccggaaaaattggcccccccaaagaatttttaaaaaggcccccccccnnnnnnnnnnnnnnnnnnnnnnnnnnnnnnnnnnngcgcagatatgaagctttaattcaccataggcatttctccaaccattctgtacattaaactttcatgtcttcacacatatacatcttttataagacagttttcttagcaatatggtactctgtaccataccaacattcccatttaacctagttaaggggtgtattatataacatgaacccactgakkkaaatataaatacagaagttgaatacatagggttaggaaagtttaaattttaaaaaaatttaaggaaagggcttaaataccatggaaaggtttacatggtatttctttaattctagacacccgtacaacagtggacaaccaattacaataaaatcacaattgcttttagatggacagtactttcagatttctaatacccaattacttttcattttccacaatgtcaacttcatggcggcattttcatttctatagagcagacaagcttccagactggcagaccaagtttcttgtgtaataatactactatcttgatcatgaccacaggaaaccaattttatattccctgtactatagagatgagacattatttggtgtatatgaaactcttcagtggtggtgttcaagaatattcaaatagtagctgaaaatagggtttgctagagcagtccacatatttcattaaaagaaaaatgcccagtcaaaacatttagaaataaatatatagtacagcctttc

SEQ ID NO: 5712 - DNA, 999 bp, Homo sapiens
  SIMILAR (722)..(961): 751254mologous to Homo sapiens PRO1722,accession number AF119851,Smith-Waterman Score=312.
tttttttttttttttttttcttccaaagataatatcctttattctgctcattttctaggcgttcacagattcccctcctattgtttgattacaaattctactagcaaatgacacctgccacagtggaactgcttagcatcctttactagtaggattatagctcacatttgtggagctctcgtatataccaggcaccatgctaagcagttcacattgataatcctatttcttctgctatgatataaatgggggttccactgtgtggcctaatacgggcagcaacaactctgatgacctggaagaactcagccctctcactcttgtctttaggtggcagcttggcaggccccagtgactttctctaaggaccctgaagcaagcttttctcctaaagtaattgtactcgttgatttttttatgtgctgcaaatattttcttccatatctgtcatttgtgttttaaccttgatgttttccatcacacagagactttcgatattttttggttgcgaaatctgcttatcttttcccttattatatcttttaagtctcatgttaaagtttagaaaagaccgtcccacaccagaggtataaaaatttttgagtaattttgtggtatatcttccctctggaactaatttgtatggacactgtgaggtagagatctaacttagtggttttttttttggctgtgtcacccaggctggagtgcagtggcatggtggcatgatctaagctcactgcaacctccgcctcccaggttgatgtgattctcctgcctcagcctcctaagtaactgggattacaggcgcgcgccaccattcctggctagttttgtatttttagtagacacagcgtttcgccatcttggccaggctggtctcgaactcctgacctcaagtgatccacccaccttggcctcccaaagtgccgggattacaggcgtgagccatcgcacccagctgagatctagctttgatagctagttgtctaaaagtgc

SEQ ID NO: 5713 - DNA, 336 bp, Homo sapiens; identical to SEQ ID NO: 2211

SEQ ID NO: 5714 - DNA, 951 bp, Homo sapiens
  SIMILAR (172)..(240): 561254mologous to Homo sapiens Human secreted protein sequence encoded by gene 112 SEQ ID NO:282,accession number AAB56188,Smith-Waterman Score=53.
tgtgcctgggcctcttagtaatttttgtatgtaattttcaaagtatccgggattacaggcgcccgccactacactagctaattttttttgtatttttagtagagatggggttttactatgttggctaggctggtctcgagctcctgacctcgtgatccgcccgcctcttagcctccctgagagctgggattacaggcgtgagccaccgcgcccggcctaggtcatttgtttttgggtttggatggcaagatcatggataagacagcaggctttgattatagagctctgagttcaaatcctggctctaccacttgtcagtggtgtaaacttggagaagatgcttagcctgagcctgttttatgttttgaagattgggtaattgtccttccttcagtgttcctgggtgaggagtaagtgaagtcatgtctataagagatgtagcacagtctccggcatgtagaaatggtcagtaactcctagttgtgtagcttagcctctgatgagatggtaaacttcaggaggctggccaccacggctgtgcttactcacggttcatgctggaagggaatgcaagaaactaaatgaatcccacagcctacttaactccatcttgcctctggcagggttccaccttaaaattgttgctaccaagcttcctgtggtcaaagagcccttgaggaagcaagctccacggccaccatagataacccattcctgaaaagtttttcataaacccccacttggtgcttttaaaattttataagcagcttacacatgtagaaaatgatcctacagcccaccaccacatagtaatcactgacactgtgaggtgtctcagctggggttctgctgtgtgtgtgtgtattttacaaaatatgtatggtttctgttcagctcttttcagttaacagatgaacttttgtatcattaaatatttttgaaaacatgaaa

SEQ ID NO: 5715 - DNA, 479 bp, Homo sapiens
  misc_feature (1)...(479): n = a,t,c or g
tcctcaaaaatgaaagccaaaccccctcccccgaagtatgtcagaaataaaaaaaagaaattcctttaaccctcaagccaggaaggttgatacaaatttatacnnnnnnnnnnnnnnnnnnnnnnnnnnnnnnnnnnnnnnnnnnnnnnnnnnnnnnnnnnnnnnnnnnnnnnnnnnnnnnnnnnnnnnnnnnnnnnnnnnnnnnnnnnnnnnnnnnnnnnnnnnnnnnnnnnnnnnnnnnnnnnnnnnnnnnnnnnnnnnnnnnnnnnnnnnnnnnnnnnnnnnnnnnnnnnnnnnnnnnatttttaaagaatggacaatgatgcagatgatttgtgagcattttgatgagaaagtggtgattagaaggatacagcataaatttaattgtaaacatgcttatctcggacgcgtgggcggacgcgtgggtcgncgcgggtttgccatgacgctcaatcgggcgtcatttnggggggccg

SEQ ID NO: 5716 - DNA, 395 bp, Homo sapiens
  SIMILAR (101)..(394): 921254mologous to Homo sapiens OPN-c,accession number D28761,Smith-Waterman Score=483.
cccacgcgtccgggcagagcacagcatagtcgggaccagactcgtgtcaggccagttgcagccttctcagccaagcgccgaccatggaaaactcactaccatgagaattgcagggatttgcttttgcctcctaggcatcacctgtgccataccagataaacaggctgattctggaagttctgaggaaaagcacaatgctgagtcctctgaagaaaccaatgactttatacaagagacccttccaagtaagtccaacgaaagccatgaccacatggatgatatggatgatgaagatgatgatgaccatgtggacagccaggactccattgactcgaacgactctgatgatgtagatgacactgatgatgctcaccagtctgatgaggctcaccatg

SEQ ID NO: 5717 - DNA, 380 bp, Homo sapiens
  misc_feature (1)...(380): n = a,t,c or g
tgtattcttctaatcaccactttctcatcaaaatgcttacaaatcatctgcatcattggccattctttaaaaatnnnnnnnnnnnnnnnnnnnnnnnnnnnnnnnnnnnnnnnnnnnnnnnnnnnnnnnnnnnnnnnnnnnnnnnnnnnnnnnnnnnnnnnnnnnnnnnnnnnnnnnnnnnnnnnnnnnnnnnnnnnnnnnnnnnnnnnnnnnnnnnnnnnnnnnnnnnnnnnnnnnnnnnnnnnnnnnnnnnnnnnnnnnnnnnnnnnnnnntgacccgttgtcctcgtatcacgaccttttttttgaggggttaaaaaaaannnnnnnnnnattttttgaaaaactttgggggggagggagttgttttcatttattgt

SEQ ID NO: 5718 - DNA, 964 bp, Homo sapiens
  SIMILAR (772)..(822): 411254mologous to Homo sapiens Human myelin oligodendrocyte glycoprotein gene,accession number AAZ29204,Smith-Waterman Score= 41.
cgtcgacttttttttttttttttgagatggagttttgctcttgttgcccaggctagagagcaatggtgcaatctcggctgactgcaacctccgtctccggggttcaagcaattcttctgcttcagcctcctgaacagctgggattacaggcgtgcgccatcatgcccagctaattttgtatttttagtagagatgggtttatacatttttaaagaatgggacaatgatggcaggatgatttgtgaggcattttgatgaggaaagtgggtgattaggaagggatacaggcataaatttaattggtaaacatggcttattctaggctaaccctaatctgtttcctgtaggaattactgggcatgggggaggattgggataggatggccctaaccctattctccaatttttaaggtaatgttgaggccaagtctttaaggtatacataatgataaaatggagaaacatgaccagatgatgatggtcatgtaggtaattagatggatttgtaggtggttgaaattgtatctaagcatagcaatctggcctctgtctaactctcccaacagaaatcaataaatcattcccacatccctctgctccaaccatactgaaattcatttgcagttctctaaaaacatcatattcttaaaccccagggcttttgcacatactattcctttgcctgaagcaatgttttcctgctcctttacctcattcttactcattctttggatatcagcttaaatttcgtaagttgaaaatgcacttaatacacctaccctactgaacattagagcttagtctaacctaccttcaacatgttcagaacacttacattagcctacagttagttgggcaaaattatataacacaaagcctataataaagaataagatattgaatatcttatattcaatatgtaatttcttgaatattatactgaaagtgaaaagcaatggttttg

SEQ ID NO: 5719 - DNA, 416 bp, Homo sapiens
  SIMILAR (4)..(354): 731254mologous to Homo sapiens Human secreted protein encoded by gene 13 clone HIBEU15,accession number AAB37996,Smith-Waterman Score=410.
gggcgtcctgcggttaagcagcgcgtgcccacaggcatgtccttcttcaacatctacaggaccctgagcggccttggccggctttacgactacaggcagcggtttgtgctgggcatggacacctccttcatcgagctttgtgagcgggagttccagagaggctccctcagggacagcaactacttcctggacacgcaatgtgacagcaacgtccgcaacaacggcaaacaggatggctatgtgcacttcgacgaggacagcaaggcttttgcttgctcctaccaccaattgcagtcctagatccaaaactctgaccccaatcgacccctgcagcgggggatgcagactcacgtgtaaggataacacaccgcggctggggacgggccagggaagacgtcaaggcacgttctgattgc

SEQ ID NO: 5720 - DNA, 608 bp, Homo sapiens
  SIMILAR (29)..(208): 551254mologous to Homo sapiens PRO1722,accession number AF119851,Smith-Waterman Score=156.
cacccacataggtctcccaaaatgctgagattacaagtgtgagccaccagtacaccggcaatttttgtaattttaagtagagacaaggtttcaccatattagtcaggctggtttcaaactcacgacctcaggtgatccgcctgccttggcatcacaaagtggtaggattacaggcgtgacgacgagaacccagcccttaaatggcttttataaggtaatgtagaaggaaaatttgcatttgacctagaagtcaactttatagtaagctgaaattatggaataactgatcatggaactattgcagatcacctttgagccaaaaatttggcctggattttggttatgcctactactatgtgcctctcatttgtatttatacctgggaattggcattattaactccttttcactcctgcctagaaaacttaaagtgtcaccagacccaagggcggagtgggtcctattaaaacaaactcgtaggcctgtctggaaggactaggctactaggctccttggctgttttggcatattcatcttgattatagctcttggtctttcatcatattagggatgtttatgatgttattaaagaaaatcttgtcaaatgc

SEQ ID NO: 5721 - DNA, 359 bp, Homo sapiens
  SIMILAR (197)..(120): 651254mologous to Homo sapiens Human myelin oligodendrocyte glycoprotein gene,accession number AAZ29204,Smith-Waterman Score= 78.
tgttgttgttgtcagtcaatatgctgctgaaaggccaagtgtggtggctcatgcctgcaatcccagcactttgggaggccgaggtaggtggctcacttgaggccagcaggtcgagaccagcctggcctcaggttatctgcccaccttggcctccccaaagtgctgggattacaggcgtgagccactgcgcctggcctgttttaatttttttgtagagacaagaaatcttctcactgtgctgcccatatctgttcagcaataactatagatgatgcatttaattattagccaatggatatttatcttctcaaatttctggactcaagtaatcttcgtacccctcgtgccaagctaggcgt

SEQ ID NO: 5722 - DNA, 415 bp, Homo sapiens
gggggatcaggaggtgggaggtggatggttcttattctgtggagaagaagggcgggaagaacttcctttcaggaggaagctggaacttactgactgccctctagtgtgcaattgggtgttgcctcagtttcctcccagctcagttttattagatcaaagctgttgttgggcaccaggttggccacctcaatcaccagccaagatggttgctttgtccaccagaggtcaagttcacctctctggtgctgtagttcccagctccttcctgatttttctaatcgctccttctggggaacaggaagttgatattgccatggtggcgggatatgccgtcacctcagtagttttactgtaaaagggaaatttgaacaacaaaaaccaaaaaaaataaaaataaaaaacttcaaaagttgac

SEQ ID NO: 5723 - DNA, 1708 bp, Homo sapiens
aggtgtggggggcgtgggccgcgggatgctgccgcccgctccgcctcgagctccagctccgggttttccctccaccatcctctggccctccccgcctctcctttaactcccccctcctgggctcgggactggtttcctcccgtttggccatgggtgcccccctctgtctcagagtccctggatcctttttccttggggaggggcacaggctcagcctcctctctgaccatgacccaggcatccttgtccccctcacccacgccagagttatgggcggcaactgcccaccttttggttggcaccgccttctttctgcctctcactggttttctcttctctatctcttattctttccctctcttccgtctctaggtctgttcttcttccctagcatcctcctccccacatctcctttcaccctcttggcttcttatcctgagcctctcccatctccggggtggggggcatcaaagcatttcttccccttaggtttcagccccccttctgacctctcataccaaccactcccctcagtctgccaaaaatgggggccttatggggaaggctctgacactccaccccagctcaggccatgggcagcagggctccattctctggcctggcccaggcctctacatacttactccagccatttggggtggttgggtcatgacagctaccatgagaagaagtgtcccgttttgtccagcggccaatagcacgatatgaaccggtcgggacatgtatggacttggtctgatgctgaatgggccacttgggaccggaagagacttgctccaaacaagaggggaccaggctcggacagaaatggcctgggaagtatcagaagcagtgcagcacgaactggaagtgccttcatccaggacaggaagtatcacttctgaaacaggaaggggcctggctggaactccaagtggcttagtctgggggatcatgaggtgggaggtggatggctcttattctgtggagaacaagggcgggaagaacttcctttcaggaggaagctggaacttactgactgtaacaggttaaaggtggaccgagaaggactttttccagtcttcagtggcacttcccaagaactcccttcccttgtgctctgagctgattttaggacagctaatatgactgtcatgcgctgtggcaggcctaatttgtcttgttctttcctttccatatcccagtataatctctgttaatcaacaggactaccccaagaacccatgtgctctcccgagtaacccagatggctgtcttgttcattccatcctacatttctgactcctttcagactcaacacagttcccttcttagtgaccaaaatggtggcctactggctggtctagctgacagtggtacttagcaaaggccactgtttccatagtgaccagctgatacctcttcctgccctctagtgtgcaattgggtgttgcctcagtttcctcccagctcagttttattagatcaaagctgttgttgggcaccaggttggccacctcaatcaccagccaagatggttgctttgtccaccagaggtcaagttcacctctctggtgctgtagttcccagctccttcctgatttttctaatcgctccttctggggaacaggaagttgatattgccatggtggcggggtatgccgtcacctcagtagttttactgtaaaagggaaatttgaaggaattc

SEQ ID NO: 5724 - DNA, 514 bp, Homo sapiens
ctgctgggaaatttccgttaagatcgggccacttcccctgcttcctaacggttgagtctgtttgctctgggccttttaagcccagcgtgatccctctgagtccctgcggtgcatctgcgccatctccacgcttcctgttgagccccagcccgggcttggtgcgggcagtgctgcactgcaccctcctggttgcctcctgagcacctccacccgcttccccaccaggcgtggctgtgttttcacccccagtgtccatctggcacccttctcgattgccaggtagttacggtctgtgtgggcaacacctgagggacccaaccaaaccaaggtccaggacacacttccgggcaggggtaccgcctctggttagctgctcactccccagcccaaatcttccgctgatgacttctggggtgcagaggccacctaagggtctagaaaacagtctcctccagttggctgatttaaacaaatagcctacctgcctacgttggggttacggccgaattccacc

SEQ ID NO: 5725 - DNA, 414 bp, Homo sapiens
  SIMILAR (1)..(375): 931254mologous to Homo sapiens Protein sequence of the di- alpha haemoglobin gene contained in pSS1,accession number AAW54282,Smith-Waterman Score=610.
gtcaaggccgcctggggtaaggtcggcgcgcaggctggggagtatggagcggaggccctggagaggatgttcctgtccttccccaccaccaagacctacttcccgcacttcgacctgagccacggctctgcccaggttaagggccacggcaagaaggtggccgacgcgctgaccaacgccgaggcgcacgtggacgacatgcccaacgcgctgaccgccctgagcgacctgcacgcgcacaagcttcgggtggacccggtcaacttcaagctcctaagccactgcctgctggtgatcctggccgaccacctccccgccgagttcacccctgcggagcacgcctccatggacaagttcatggcttctgtgagcactggtgcttgacttctaatacctgttggcttgagcctttgt

SEQ ID NO: 5726 - DNA, 4944 bp, Homo sapiens
  SIMILAR (3895)..(4911): 941254mologous to Leishmania major probable incb protein,accession number AL160371,Smith-Waterman Score=1598.
atgtcattcttttctacgttaaaaacagctttgtctttgaaggagaaacttgctgctactggtgttcttgttctgatttgcgcacttgttggtgctgggtttgcatgggaacgtcatcagctaaagcaagccatagagaaaattggcagtcttgatcaggctgttaaggaacgtgataagtcaataatggatcttaaccagaccattgagacgatgaacaaagcagagcaacattttcacagccaggaagtgaaaaatgaatcagaacaagccaagtatgctgacaggcaaatggaacgaaaagctgaagttcagaaacaactggttgcggcgggtaatgttcgccagcgtattcctgctgacactcagcggttgctccgggagtcgatcagcgaatttaacgccgacgccgacaaagggatttttatgtctgataaagtaacagtaaagcaaactatcaacaaagcgacttcaatctacaaaattgagcaaatcactgttggcaagccaggatctgaacaataccgtcgtgctttcgagcttgccgatcagcttggtttaaaacacccggattgcattgagcatgtatttccgacctatgctgatgagcaatgtactcatgttcttaccgaagaggattttttcagcactgaagaacgagaaggcgttgatcgctgcattggtgtgatttgttcttcggtaagtgatgagttattccctaatgtgcctgaatatggtggtattggataccaattcctgtacgagggcgatgagcttaaatgctatgaacatgacattgaaagtaaggcaaaagaactaacagttaattcaaacaacactgtgcagcctgtagcgttgatgcgcttgggggtattcgtgccgaagccatcaaagagcaaaggagaaagtaaagagattgatgccaccaaagcgttttcccagctggagatagctaaagccgagggttacgatgatattaaaatcaccggtcctcgactcgatatggatactgatttcaaaacgtggatcggtgtcatctacgcgttcagcaaatacggcttgtcctcaaacaccatccagttatcgtttcaggaattcgctaaagcctgtggtttcccctcaaaacgtctggatgcgaaactgcgtttaaccattcatgaatcacttggacgcttgcgtaacaagggtatcgcttttaagcgcggaaaagatgctaaaggcggctatcagactggtctgctgaagagctggagggctgattcgaagttgtgggagctgttccagcttgattatcgcgttctgttgcaacaccacgccttgcgtgcccttccgaagaaagaagctgcacaagccatttacactttcatcgaaagccttccgcagaacccgttgccgctatcgttcgcgcgaatccgtgagcgcctggctttgcagtcagctgttggcgagcaaaaccgtatcattaagaaagcgatagaacagcttaaaacaatcggctatctcgactgttctattgagaagaaaggccgggaaagttttgtaatccacacatatttgataccagcgatccctccacagcacataattcaatgcgacttccctctatcgcacatcttagacttttattctccctccagcacacatcgaagctgccgggcaagccgttctcaccagttgatagagagtgaagcttggctgcccattgaagcaggaaatcaccaaaatgattcaggctacaacctgaacgtagaagaaatccgcgtcctttatgcgtggaggatgccaaagcatgttgtgacacacttggcaaaggaccagcttcacaaggttgctcaaagagcaaacagaatgctcaatgttctgactgaacaagtacagttgcaaaaggatgagctacacgcgaacgagttttaccaggtctatgcgaaagcggcactggcaaaattgcctctactgactcgagcgaacgttgactatgccaacatcattgacatatatgaacatcgcggagtgccaaaataccgggatcgctacagcgaacgcggtgtgtcaaaaactgtatcgacggtttctctggcgcatgcaatgcgtgctcaccctcatcttcttatggaggatttaaggattctggttattgaccttgatccgcaatcttcagcaacgatgtttttaagccataaacactctattggtatcgtaaacgcaacatctgcacaggctatgttgcagaatgtaagccgtgaagagctgttagaggagtttattgttccttctgttgtacctggggttgacgttatgcctgcgtcgattgacgatgcctttattgcatccgattggagagagctgtgcaatgagcatctaccgggtcagaacatccatgctgtcctgaaagaaaatgtgattgataagctgaagagcgattatgactttatcctcgttgatagtggtcctcaccttgacgccttcctgaaaaatgctttggcctcggccaatatactgtttacacctctgccgccagcaactgtcgatttccactcatcgcttaaatacgttgcccgccttcctgagttggtgaactcatttcggatgaaggctgcgagtgccagcttgcgactaacattgaaaaacagaccaacaattgggcgaacccttaatccttcaatattaagcggatttgatagttcttcagcctctggcgatcgagtcgagcaggtattcaagttatcaactggtcgccaggccacatttattgaagaggtaatacctccgaaccaggtagaaagcgatacctttgttgatcagcataacaacgggcgtgaccaggcatctcttacgccaaaatcattaaaaagtatccgaagcactattaagcatcagcaattttaccctgcaataggtgttagacgggctacagggaaaattgaaattttggatggttcccggcgtcgagcttctgccatcttagagaacgtagggttgcgggttttagtcacggaccaggagatcagcgttcaggaagcgcaaaatttagcgaaagacgttcagacagcattgcagcacagcattcgagaaataggtctgcgtttgatgcgaatgaaaaatgatgggatgagtcagaaggatattgcagccaaagaagggctgtctcaggcgaaggtcacgcgtgctctccaggcagcgagtgctccggaagaattagtcgcccttttccctgtgcagtcggaattaaccttttcggactacaaaacgctttgtgctgttggcgacgaaatggggtacaagaatttagagtttgatcagcttattcaaaacatatccccggaaataaacgacatcttatccattgaagaaatggccgaagatgaagttaaaaataaaatcctgcgcttgataacaaaggaagcctcactactcacggataaaggttctaaagataagtccgtagttactgaattatggaaatttgaggacaaggatcgctttgcaaggaagcgcgtgaaaggccgtgcattttcttatgagtttaatcgactctcaaaagagaagagtaaattgagtaacttacgcgaataccagaatcgtattgcagatatcgcaaaacgctctaaagctgtgcttggctgggcaagcactgcgcagttcggtactgataaccaattcattaaagatgatgccgcgcgtgccgcatctatccttgaagctgcacgtaaagacccggtttttgcgggtatctctgataatgccaccgctcaaatcgctacagcgtgggcaagtgcactggctgactacgccgcagcacataaatctatgccgcgtccggaaattctggcctcctgccaccagacgctggaaaactgcctgatagagtccacccgcaatagcatggatgccactaataaagcgatgctggaatctgtcgcagcagagatgatgagcgtttctgacggtgttatgcgtctgcctttattcctcgcgatgatcctgcctgttcagttgggggcagctaccgctgatgcgtgtaccttcattccggttacgcgtgaccagtccgacatctatgaagtctttaacgtggcaggttcatcttttggttcttatgctgctggtgatgttctggacatgcaatccgtcggtgtgtacagccagttacgtcgccgctatgtgctggtggcaagctccgatggcaccagcaaaaccgcaaccttcaagatggaagacttcgaaggccagaatgtaccaatccgaaaaggtcgcactaacatctacgttaaccgtattaagtctgttgttgataacggttccggcagcctacttcactcgtttactaatgctgctggtgagcaaatcactgttacctgctctctgaactacaacattggtcagattgccctgtcgttctccaaagcgccggataaaggcactgagatcgcaattgagacggaaatcaatattgaagccgctcctgagctgatcccgctgatcaaccacgaaatgaagaaatacaccctgttcccaagtcagttcgttatcgcggctgagcacacggtacaggcggcgtatgaagcacagcgtgaatttggtctggacctgggttccctacagttccgcaccctgaaggaatacctgtctcatgaacaggatatgctgcgtcttcgcatcatgatctggcgcactcttgcgaccgacacctttgacatcgctctgccggttaaccagtcctttgatgtatgggcaaccatcattcgtggcaaattccagactgtatatcgcgacattattgagcgcgttaaatcttctggtgcgatggggatgtttgctggtgctgatgcagcatctttcttcaaacagttgccgaaggatttcttccagccagccgaagactatatccagactccgtatgttcactacatcggtaccccatttaggaccacccacagcacctaa

SEQ ID NO: 5727 - DNA, 1491 bp, Homo sapiens
  SIMILAR (130)..(201): 951254mologous to Homo sapiens DNA encoding a human Eta- 1/osteopontin-c protein,accession number AAC62290,Smith-Waterman Score=121.
actgattgccgggtcgacccacgcgtgcgcccacgcgtccgggtagagcacagcatcgtcgggaccagactcgtctcatgccagttgcagccttctcagccaaacgccgaccaaggaaaactcactaccatgagaattgcagtgatttgcttttgcctcctaggcatcacctgtgccataccagttaaacaggctgaatcctggaagttctgaagaaaagcagctttacaacaaatacccagatgcttgtggccacatggctaaaccctgacccatctcagtaaggcagaatctcctaggccccacaggaccctttccaagtaaggtccaacggaaaggccatggaccacatgggatgatatgggatggatggaaggttgatgatgacccatgtgggacagccaggactccattggactcggaacgactctggatgatgtagatgacactgatggattctcaccagtctgatgagtctcaccattctgatgaatctgatgaactggtccctggattttcccacggacctgccagcaaccgaagttttcactccagttgtccccacagtagacacatatgatggccgaggtgatagtgtggtttatggactgaggtcaaaatctaagaagtttcgcagacctgacatccagtaccctgatgctacagacgaggacatcacctcacacatggaaagcgaggagttgaatggtgcatacaaggccatccccgttgcccaggacctgaacgcgccttctgattgggacagccgtgggaaggacagttatgaaacgagtcagctggatgaccagagtgctgaaacccacagccacaagcagtccagattatataagcggaaagccaatgatgagagcaatgagcattccgatgtgattgatagtcaggaactttccaaagtcagccgtgaattccacagccatgaatttcacagccatgaagatatgctggttgtagaccccaaaagtaaggaagaagataaacacctgaaatttcgtatttctcatgaattagatagtgcatcttctgaggtcaattaaaaggagaaaaaatacaatttctcactttgcatttagtcaaaagaaaaaatgctttatagcaaaatgaaagagaacatgaaatgcttctttctcagtttattggttgaatgtgtatctatttgagtctggaaataactaatgtgtttgataattagtttagtttgtggcttcatggaaactccctgtaaactaaaagcttcagggttatgtctatgttcattctatagaagaaatgcaaactatcactgtattttaatatttgttattctctcatgaatagaaatttatgtagaagcaaacaaaatacttttacccacttaaaaagagaatataacattttatgtcactataatcttttgttttttaagttagtgtatattttgttgtgattatctttttgtggtgtgaataaatcttttatcttgaatgtaataag

SEQ ID NO: 5728 - DNA, 1752 bp, Homo sapiens
  SIMILAR (1063)..(1677): 861254mologous to Leishmania major probable incb protein,accession number AL160371,Smith-Waterman Score=896.
  misc_feature (1)...(1752): n = a,t,c or g
atgcctgcgtcgattgacgatgcctttattgcatccgattggagagagctgtgcaatgagcatctaccgggtcagaacatccatgctgtcctgaaagaaaatgtgattgataagctgaagagcgattatgactttatcctcgttgatagtgcaactgtcgatttccactcatcgcttaaatacgttgcccgccttcctgagttggtgaaactcatttcggatgaaggctgcgagtgccagcttgcgactaacattggttttatgtccaagttgagtaacaaggcagaccataagtattgccatagcctggctaaagaagtgttcggtggggatatgcttgatgtcttcctccctcgccttgacggttttgaacgctgcggcgagtcttttgacactgttatttcagctaacccggcaacgtatgttggtagtgctgatgcattgaagaacgcgcgaattgccgcggaagattttgctaaagcagtttttgacctcgagcaggtattcaagttatcaactggtcgccaggccacatttattgaagaggtaatacctccgaaccaggtagaaagcgatacctttgttgatcagcataacaacgggcgtgaccaggcatctcttacgccaaaatcattaaaaagtatccgaagcactattaagcatcagcaattttaccctgcaataggtgttagacgggctacagggaaaattgaaattttggatggttcccggcgtcgagcttctgccatcttagagaacgtagggttgcgggttttagtcacggaccaggagatcagcgttcaggaagcgcaaaatttagcgaaagacgttcagacagcattgcagcacagcattcgagaaataggtctgcgtttgatgcgaatgaaaaatgatgggatgagtcagaaggatattgcagccaaagaagggctgtctcaggcgaagcngtgggcaagtgcactggctgactacgccgcagcacataaatctatgccgcgtccggaaattctggcctcctgccaccagacgctggaaaactgcctgatagagtccacccgcaatagcatggatgccactaataaagcgatgctggaatctgtcgcagcagagatgatgagcgtttctgacggtcgcactaacatctacgttaaccgtattaagtctgttgttgataacggttccggcagcctacttcactcgtttactaatgctgctggtgagcaaatcactgttacctgctctctgaactacaacattggtcagattgccctgtcgttctccaaagcgccggataaaggcactgagatcgcaattgagacggaaatcaatattgaagccgctcctgagctgatcccgctgatcaaccacgaaatgaagaaatacaccctgttcccaagtcagttcgttatcgcggctgagcacacggtacaggcggcgtatgaagcacagcgtgaatttggtctggacctgggttccctacagttccgcaccctgaaggaatacctgtctcatgaacaggatatgctgcgtcttcgcatcatgatctggcgcactcttgcgaccgacacctttgacatcgctctgccggttaaccagtcctttgatgtatgggcaaccatcattcgtggcaaattccagactgtatatcgcgacattattgagcgcgttaaatcttctgacttgttcaacaggccagccattacgctcgtcatcaaaatcactcgcatcaaccaaaccgttattcattcgtga

SEQ ID NO: 5729 - DNA, 4371 bp, Homo sapiens
  SIMILAR (1)..(888): 1001254mologous to Plasmid F Protein A,accession number M12987,Smith-Waterman Score=1548.
atgaaactcatggaaacacttaaccagtgcataaacgctggtcatgaaatgacgaaggctatcgccattgcacagtttaatgatgacagcccggaagcgaggaaaataacccggcgctggagaataggtgaagcagcggatttagttggggtttcttctcaggctatcagagatgccgagaaagcagggcgactaccgcacccggatatggaaattcgaggacgggttgagcaacgtgttggttatacaattgaacaaattaatcatatgcgtgatgtgtttggtacgcgattgcgacgtgctgaagacgtatttccaccggtgatcggggttgctgcccataaaggtggcgtttacaaaacctcagtttctgttcatcttgctcaggatctggctctgaaggggctacgtgttttgctcgtggaaggtaacgacccccagggaacagcctcaatgtatcacggatgggtaccagatcttcatattcatgcagaagacactctcctgcctttctatcttggggaaaaggacgatgtcacttatgcaataaagcccacttgctggccggggcttgacattattccttcctgtctggctctgcaccgtattgaaactgagttaatgggcaaatttgatgaaggtaaactgcccaccgatccacacctgatgctccgactggccattgaaactgttgctcatgactatgatgtcatagttattgacagcgcgcctaacctgggtatcggcacgattaatgtcgtatgtgctgctgatgtgctgattgttcccacgcctgctgagttgtttgactacacctccgcactgcagtttttcgatatgcttcgtgatctgctcaagaacgttgatcttaaagggttcgagcctgatgatttagccatattgttccatgtgactgcagttcatatgttttcactggaaggtattgaaaaccttccctttgaattacagagaaactttcagctcatgagggacctagaccaaagaacagagggtgttaaacgggctaccaggaaaaatgaaaattttggatgttccccggcgtcgagcttctcccatcttagagaacgtagggatccgggttttagtcacgacccaggagatcagcgtcaagaagcgcaaaatttagcgaaagccgttcagacagcattgcagcacagcattcgagaaataggtctgcgtttgatgcgatcgaaaaatgatgggatgagtcagaaggatatcgcagccaaagaagggctgtctcaggcgaaggtcacgcgtgctctccaggcagcgagtgctccggaagaattagtcgcccttttccctgtgcagtcggaattaaccttttcggactacaaaacgctttgtgctgttggcgacgaaatggggaacaagaatttagagtttgatcagcttattcaaaacatatccccggaaataaacgacatcttatccattgaagaaatggccgaagatgaagttaaaaataaaatcctgcgcttgataacaaaggaagcctcactactcacggataaaggttctaaagataagtccgtagttactgaattatggaaatttgaggacaaggatcgctttgcaaggaagcgcgtgaaaggccgtgcattttcttatgagtttaatcgactctcaaaagagaagagtaaattgagtaacttacgcgaataccagaatcgtattgcaggtatcgcaaaacgctctaaagctgtgcttggctgggcaagcactgcgcagttcggtactgataaccaattcattaaagatgatgccgcgcgtgccgcatctatccttgaagctgcacgtaaagacccggtttttgcgggtatctctgataatgccaccgctcaaatcgctacagcgtgggcaagtgcactggctgactacgccgcagcacataaatctatgccgcgtccggaaattctggcctcctgccaccagacgctggaaaactgcctgatagagtccacccgcaatagcatggatgccactaataaagcgatgctggaatctgtcgcagcagagatgatgagcgtttctgacggtgttatgcgtctgcctttattcctcgcgatgatcctgcctgttcagttgggggcagctaccgctgatgcgtgtaccttcattccggttacgcgtgaccagtccgacatctatgaagtctttaacgtggcaggttcatcttttggttcttatgctgctggtgatgttctggacatgcaatccgtcggtgtgtacagccagttacgtcgccgctatgtgctggtggcaagctccgatggcaccagcaaaaccgcaaccttcaagatggaagacttcgaaggccagaatgtaccaatccgaaaaggtcgcactaacatctacgttaaccgtattaagtctgttgttgataacggttccggcagcctacttcactcgtttactaatgctgctggtgagcaaatcactgttacctgctctctgaactacaacattggtcagattgccctgtcgttctccaaagcgccggataaaggcactgagatcgcaattgagacggaaatcaatattgaagccgctcctgagctgatcccgctgatcaaccacgaaatgaagaaatacaccctgttcccaagtcagttcgttatcgcggctgagcacacgttccgcaccctgaaggaatacctgtctcatgaacaggatatgctgcgtcttcgcatcatgatctggcgcactcttgcgaccgacacctttgacatcgctctgccggttaaccagtcctttgatgtatgggcaaccatcattcgtggcaaattccagactgtatatcgcgacattattgagcgcgttaaatcttctggtgcgatggggatgtttgctggtgctgatgcagcatctttctttcaacagttgccgaagatttcttccagccagccgaagactatatccagactccatctgctcttcttgcctaattttcttaagctgaccgatactttcctggaaacgattgaggaaaatggtgtggtcctgggtattcatgacactgcccacaagggctcactggcctggctggcatttctactagcgtgtttcttgggggaagggtcctcctttgctaaaacagcgcgttatgaaactgtaggcaaagggttactattactgctcgtgactgccggagaagtcagaattgtaagtgagcacaccttctctgcagcagctacaagctcccacctgatgtgtcttttcaacctttgtcaagtatctcaaggcaagaatgtcctgaagcccttcccccaaatagaagctttggtccgagcccccaacccgcaggagcatcaagaggaggccaaggagacagacaccgcagactctctctgcaaacttgacctgggcatcgcacggactcgcgttcgcatccgaagaccccacacgtcccccgcactgtccccacagcatcccacgcccgcggtgcacgctcacctgccggtagacgagccacacgcctcggcggtccagacttccgtgtcgacctccgtgggcgagcctacgcgctgggtgcccggcgcgccctcaggagtggctgggaccgcgggctggcgccgggcagggcggttgaaggccgtggcgacggaactgttgcccatgaatggctcgctgtggagcacgcaggctcgtatctctcccgcgttcctgctgaaggtaaaccagacattaatggactatcgaaccggaagagtacaacctgctattccgcagagtctccctgaagctctccgtttggctgccgacctggcagagcaaaagcaacggctggagcaaaaaatgcttatggatgcacctaaagtcgaattcgctgaacgcgttgctaccgccagcggggttctaatcggcaactatgccaaagtgctcggcctgggccaaaactatctcttcacctggttgcgtgataacggaattctgatcgcaaccggtgaacgcaggaacgtccccaaacaggattccatatctcacgccgggcatatcctgtcgcaatgtgcaaatctcgcggcaacaaccagtgaatacttcattcacaagcctcaccgcctgatcgcggcagaaactggttatagccaatcaaccgtcgttcgtgcattccgtgaagctgtaaacaaaggaattctgtctgtagagattgttatcggcgatcaccgtgaacgtcgcgctaacctgtaccggtttacaccatcctttttggccttcgcacaacaagccaaaaatgcgctgatagaaagcaaattaaagatctcttcagcggcaaccaagagcaaagtgaccgcctgggaagccagagctagagggcactactatcacaaaggggactcaagataa

SEQ ID NO: 5730 - DNA, 2012 bp, Homo sapiens
  SIMILAR (1557)..(1994): 961254mologous to Leishmania major probable incb protein,accession number AL160371,Smith-Waterman Score=708.
cgtgggcaagtgcactggctgactacgccgcagcacataaatctatgccgcgtccggaaattctggcctcctgccaccagacgctggaaaactgcctgatagagtccacccgcaatagcatggatgccactaataaaacgatggtggaatctgtcccaacaaaaatgattagcgttttcgacggttgttcttcttttggttctaatgctgctggtaatgttctgaacatgcaatcggtcggtgtgtacagccagttacgtcgccgctatgtgctggtgccaagctccgatggcaccagcaaaaccgcaaccttcaagatggaagacttcgaaggccagaatgtaccaatccgaaaaggtcgcactaacatctacgttaaccgtattaagtctgttgttgataacggttccggcagcctacttcactcgtttactaatgctgctggtgagcaaatcactgttacctgctctctgaactacaacattggtcagattgccctgtcgttctccaaagcgccggataaaggcactgagatcgcaattgagaggggagcaaatggtgatgttctggacatgcaatccgtcggtgtgtacagccagttacgtcgccgctatgtgctggtggcaagctccgatggcaccagcaaaaccgcaaccttcaagatggaagacttcgaaggccagaatgtaccaatccgaaaaggtcgcactaacatttacgttagccgtattaagtctgttgttgataacggttccggcagcctacttcactcgtttactaatgctgctggtgagcaaatcactgttacctgctctctgaactacaacattggtcagattgccctgtcgttctccaaagcgccggataaaggcactgagatcgcaattgagagggctaccgatgatgcgtgtaccttcattccggttacgcgtgaccagtccgacatttatgaagtctttaacgtggcaggttcatcttttggttcttatgctgctggtgatgttctggacatgcaatccgtcggtgtgtacagccagttacgtcgccgctatgtgctggtggcaagctccgatggcaccagcaaaaccgcaaccttcaagatggaagacttcgaaggccagaatgtaccaatcccaaaaggtcgcaaaaacatctacgttaaccgtattaagtctgttgttgataacggttccggcagcctacttcactcgtttactaatgctgctgctaccgctgatgcgtgtaccttcattccggttacgcgtgaccagtccgacatctatgaagtctttaacgtggcaggttcatcttttggttcttatgctgctggtgatgttctggacatgcaatccgtcggtgtgtacagccagttacgtcgccgctatgtgctggtggcaagctccgatggcaccagcaaaaccgcaaccttcaagatggaagacttcgaaggccagaatgtaccaatccgaaaaggtcgcaataacatctacgttaaccgtattaagtctgttgttgataacggttccggcagcctacttcactcgtttactaatgctgctgctaccgctgatgcgtgtaccttcattccggttacgcgtgaccagtccgacatctatgaagtctttaacgtggcaggttcatcttttggttcttatgctgctggtgatgttctggacatgcaatccgtcggtgtgtacagccagttacgtcgccgctatgtgctggtggcaagctccgatggcaccagcaaaaccgcaaccttcaagatggaagacttcgaaggccagaatgtaccaatccgaaaaggtcgcactaacatctacgttaaccgtattaagtctgttgttgataacggttccggcagcctacttcactcgtttactaatgctgctggtgagcaaatcactgttacctgctctctgaactacaacattggtcagattgccctgtcgttctccaaagcgccggataaaggcactgagatcgcaattgagagggggtcttctacataa

SEQ ID NO: 5731 - DNA, 3042 bp, Homo sapiens
  SIMILAR (1993)..(3009): 941254mologous to Leishmania major probable incb protein,accession number AL160371,Smith-Waterman Score=1598.
atgctcaatgttctgactgaacaagtacagttgcaaaaggatgagctacacgcgaacgagttttaccaggtctatgcgaaagcggcactggcaaaattgcctctactgactcgagcgaacgttgactatgccgtaagtgaaatggaagaaaagggttatgttttcgataaacgccctgctggctcttcaatgaaatatgcgatgtcaattcagaacatcattgacatatatgaacatcgcggagtgccaaaataccgggatcgctacagcgaagcgtatgtgattttcatctccaatcttaaaggcggtgtgtcaaaaactgtatcgacggtttctctggcgcatgcaatgcgtgctcaccctcatcttcttatggaggatttaaggattctggttattgaccttgatccgcaatcttcagcaacgatgtttttaagccataaacactctattggtatcgtaaacgcaacatctgcacaggctatgttgcagaatgtaagccgtgaagagctgttagaggagtttattgttccttctgttgtacctggggttgacgttatgcctgcgtcgattgccgacgatgcctttattgcatccgattggaaagactgtgcaatgagcatctaccggttggtgaaactcatttcggatgaaggctgcgagtgccagcttgcgactaacattggttttatgtccaagttgagtaacaaggcagaccataagtattgccatagcctggctaaagaagtgttcggtggggatatgcttgatgtcttcctccctcgccttgacggttttgaacgctgcggcgagtcttttgacactgttatttcagctaacccggcaacgtatgttggtagtgctgatgcattgaagaacgcgcgaattgccgcggaagattttgctaaagcagtttttgaccgcatctcttacgccaaaatcattaaaaagttccgaagcactattaagcatcagcaattttaccctgcaataggtgttagacgggctacagggaaaattgaaattttggatggttcccggcgtcgagcttctgccatcttagagaacgtagggttgcgggttttagtcacggaccaggagatcagcgttcaggaagcgcaaaatttagcgaaagacgttcagacagcattgcagcacagcattcgagaaataggtctgcgtttgatgcgaatgaaaaatgatgggatgagtcagaaggatattgcagccaaagaagggctgtctcaggcgaaggtcacgcgtgctctccaggcagcgagtgctccggaagaattagtcgcccttttccctgtgcagtcggaattaaccttttcggactacaaaacgctttgtgctgttggcgacgaaatggggaacaagaatttagagtttgatcagcttattcaaaacatatccccggaaataaacgacatcttatccattgaagaaatggccgaagatgaagttaaaaataaaatcctgcgcttgataacaaaggaagcctcactactcacggataaaggttctaaagataagtccgtagttactgaattatggaaatttgaggacaaggatcgctttgcaaggaagcgcgtgaaaggccgtgcattttcttatgagtttaatcgactctcaaaagagaagagtaaattgagtaacttacgcgaataccagaatcgtattgcagatatcgcaaaacgctctaaagctgtgcttggctgggcaagcactgcgcagttcggtactgataaccaattcattaaagatgatgccgcgcgtgccgcatctatccttgaagctgcacgtaaagacccggtttttgcgggtatctctgataatgccaccgctcaaatcgctacagcgtgggcaagtgcactggctgactacgccgcagcacataaatctatgccgcgtccggaaattctggcctcctgccaccagacgctggaaaactgcctgatagagtccacccgcaatagcatggatgccactaataaagcgatgctggaatctgtcgcagcagagatgatgagcgtttctgacggtgttatgcgtctgcctttattcctcgcgatgatcctgcctgttcagttgggggcagctaccgctgatgcgtgtaccttcattccggttacgcgtgaccagtccgacatctatgaagtctttaacgtggcaggttcatcttttggttcttatgctgctggtgatgttctggacatgcaatccgtcggtgtgtacagccagttacgtcgccgctatgtgctggtggcaagctccgatggcaccagcaaaaccgcaaccttcaagatggaagacttcgaaggccagaatgtaccaatccgaaaaggtcgcactaacatctacgttaaccgtattaagtctgttgttgataacggttccggcagcctacttcactcgtttactaatgctgctggtgagcaaatcactgttacctgctctctgaactacaacattggtcagattgccctgtcgttctccaaagcgccggataaaggcactgagatcgcaattgagacggaaatcaatattgaagccgctcctgagctgatcccgctgatcaaccacgaaatgaagaaatacaccctgttcccaagtcagttcgttatcgcggctgagcacacggtacaggcggcgtatgaagcacagcgtgaatttggtctggacctgggttccctacagttccgcaccctgaaggaatacctgtctcatgaacaggatatgctgcgtcttcgcatcatgatctggcgcactcttgcgaccgacacctttgacatcgctctgccggttaaccagtcctttgatgtatgggcaaccatcattcgtggcaaattccagactgtatatcgcgacattattgagcgcgttaaatcttctggtgcgatggggatgtttgctggtgctgatgcagcatctttcttcaaacagttgccgaaggatttcttccagccagccgaagactatatccagactccgtatgttcactacatcggtaccccatttaggaccacccacagcacctaa

SEQ ID NO: 5732 - DNA, 2610 bp, Homo sapiens
  SIMILAR (2241)..(2261): 1001254mologous to Escherichia coli unidentified reading frame,accession number X02954,Smith-Waterman Score=56.
atgtcattcttttctacgttaaaaacagctttgtctttgaaggagaaacttgctgctactggtgttcttgttctgatttgcgcacttgttggtgctgggtttgcatgggaacgtcatcagctaaagcaagccatagagaaaattggcagtcttgatcaggctgttaaggaacgtgataagtcaataatggatcttaaccagaccattgagacgatgaacaaagcagagcaacattttcacagccaggaagtgaaaaatgaatcagaacaagccaagtatgctgacaggcaaatggaacgaaaagctgaagttcagaaacaactggttgcggcgggtaatgttcgccagcgtattcctgctgacactcagcggttgctccgggagtcgatcagcgaatttaacgccgacgccgacaaaggtacagtaaagcaaactatcaacaaagtgatttcaatctacaaaattgagcaggtcactgttggcaagccaggatctgaacaatgccgtcgggctttcgagcttgccgatcagcttggcttaaaacacccggattgcattgagcatgtatttccgacctatgctcaagagcaatgcgctcatgttcttaccgaagaggattgtttcagcaatgcagaacgagacggcgatgatcgctgcattggtgtgatttgctcttgggaattcgctaaagcctgtggtttcgcctcaaaacgtctggatgtgaaactgcgtttagccattcatgaatcccttggccgcctgcgtagcaagggtatcgcttttaagcgcggaaaagatgctaaaggcggctatcagcctggtctgctgaaggtcgagcgttttgatgctgcccttgcacacatatttgataccagcgatccctccacagcacataattcaatgcgacttcaccagttgatagagagtgaagcttggctgcccattgaagcaggaaatcaccaaaatgattcaggctacaacctgaacaatgtaagccgtgaagagctgttagaggagtttattgttccttctgttgtacctggggttgacgttatgcctgcgtcgattgacgatgcctttattgcatccgattggagagagctgtgcaatgagcatctaccgggtcagaacatccatgctgtcctgaaagaaaatgtgattgataagctgaagagcgattatgactttatcctcgttgatagtggtcctcaccttgacgccttcctgaaaaatgctttggcctcggccaatatactgtttacacctctgccgccagcaactgtcgatttccactcatcgcttaaatacgttgcccgccttcctgagttggcagcgagtgctccggaagaattagtcgcccttttccctgtgcagtcggaattaaccttttcggactacaaaacgctttgtgctgttggcgacgaaatggggtacaagaatttagagtttgatcagcttattcaaaacatatccccggaaataaacgacatcttatccattgaagaaatggccgaagatgaagttaaaaataaaatcctgcgcttgataacaaaggaagcctcactactcacggataaaggttctaaagataagtccgtagttactgaattatggaaatttgaggacaaggatcgctttgcaaggaagcgcgtgaaaggccgtgcattttcttatgagtttaatcgactctcaaaagagaagagtaaattgagtaacttacgcgaataccagaatcgtattgcagatatcgcaaaacgctctaaagctgtgcttggctgggcaagcactgcgcagttcggtactgataaccaattcattaaagatgatgccgcgcgtgccgcatctatccttgaagctgcacgtaaagacccggtttttgcgggtatctctgataatgccaccgctcaaatcgctacagcgtgggcaagtgcactggctgactacgccgcagcacataaatctatgccgcgtccggaaattctggcctcctgccaccagacgctggaaaactgcctgatagagtccacccgcaatagcatggatgccactaataaagcgatgctggaatctgtcgcagcagagatgatgagcgtttctgacggtgttatgcgtctgcctttattcctcgcgatgatcctgcctgttcagttgggggcagctaccgctgatgcgtgtaccttcattccggttacgcgtgaccagtccgacatctatgaagtctttaacgtggcaggttcatcttttggttcttatgctgctggtgatgttctggacatgcaatccgtcggtgtgtacagccagttacgtcgccgctatgtgctggtggcaagctccgatggcaccagcaaaaccgcaaccttcaagatggaagacttcgaaggccagaatgtaccaatccgaaaaggtcgcactaacatctacgttaaccgtattaagtctgttgttgataacggttccggcagcctacttcactcgtttactaatgctgctggtgagcaaatcactgttacctgctctctgaactacaacattggtaagattgccctgtggttctcgaaagagccggataaaggcactgagatcccatttgaaggagagaatcaattttaa

SEQ ID NO: 5733 - DNA, 4560 bp, Homo sapiens
  SIMILAR (3511)..(4527): 941254mologous to Leishmania major probable incb protein,accession number AL160371,Smith-Waterman Score=1598.
atgtcattcttttctacgttaaaaacagctttgtctttgaaggagaaacttgctgctactggtgttcttgttctgatttgcgcacttgttggtgctgggtttgcatgggaacgtcatcagctaaagcaagccatagagaaaattggcagtcttgatcaggctgttaaggaacgtgataagtcaataatggatcttaaccagaccattgagacgatgaacaaagcagagcaacattttcacagccaggaagtgaaaaatgaatcagaacaagccaagtatgctgacaggcaaatggaacgaaaagctgaagttcagaaacaactggttgcggcgggtaatgttcgccagcgtattcctgctgacactcagcggttgctccgggagtcgatcagcgaatttaacgccgacgccgacaaagggatttttatgtctgataaagtaacagtaaagcaaactatcaacaaagcgacttcaatctacaaaattgagcaaatcactgttggcaagccaggatctgaacaataccgtcgtgctttcgagcttgccgatcagcttggtttaaaacacccggattgcattgagcatgtatttccgacctatgctgatgagcaatgtactcatgttcttaccgaagaggattttttcagcactgaagaacgagaaggcgttgatcgctgcattggtgtgatttgttcttcggtaagtgatgagttattccctaatgtgcctgaatatggtggtattggataccaattcctgtacgagggcgatgagcttaaatgctatgaacatgacattgaaagtaaggcaaaagaactaacagttaattcaaacaacactgtgcagcctgtagcgttgatgcgcttgggggtattcgtgccgaagccatcaaagagcaaaggagaaagtaaagagattgatgccaccaaagcgttttcccagctggagatagctaaagccgagggttacgatgatattaaaatcaccggtcctcgactcgatatggatactgatttcaaaacgtggatcggtgtcatctacgcgttcagcaaatacggcttgtcctcaaacaccatccagttatcgtttcaggaattcgctaaagcctgtggtttcccctcaaaacgtctggatgcgaaactgcgtttaaccattcatgaatcacttggacgcttgcgtaacaagggtatcgcttttaagcgcggaaaagatgctaaaggcggctatcagactggtctgctgaaggtcgggcgttttgatgctgaccttgatctgatagagctggaggctgattcgaagttgtgggagctgttccagcttgattatcgcgttctgttgcaacaccacgccttgcgtgcccttccgaagaaagaagctgcacaagccatttacactttcatcgaaagccttccgcagaacccgttgccgctatcgttcgcgcgaatccgtgagcgcctggctttgcagtcagctgttggcgagcaaaaccgtatcattaagaaagcgatagaacagcttaaaacaatcggctatctcgactgttctattgagaagaaaggccgggaaagttttgtaatccacacatcgaaggtgcctgacaagcggtcttcgcagttgatagagagtgaagcttggctgcccattgaagcaggaaatcaccaaaatgattcaggctacagcctgaacgtagaagaaatccgcgtcctttatgcgtggaggatgccaaagcatgttgtgacacacttggcaaaggaccagcttcacaaggttgctcaaagagcaaacagaatgctcaatgttctgactgaacaagtacagttgcaaaaggatgagctacacgcgaacgagttttaccaggtctatgcgaaagcggcactggcaaaattgcctctactgactcgagcgaacgttgactatgccgtaagtgaaatggaagaaaagggttatgttttcgataaacgccctgctggctcttcaatgaaatatgcgatgtcaattcagaacatcattgacatatatgaacatcgcggagtgccaaaataccgggatcgctacagcgaagcgtatgtgattttcatctccaatcttaaaggcgttggtgaactcatttcggatgaaggctgcgagtgccagcttgcgactaacattggttttatgtccaagttgagtaacaaggcagaccataagtattgccatagcctggctaaagaagtgttcggtggggatatgcttgatgtcttcctccctcgccttgacggttttgaacgctgcggcgagtcttttgacactgttatttcagctaacccggcaacgtatgttggtagtgctgatgcattgaagaacgcgcgaattgccgcggaagattttgctaaagcagtttttgacccctctggcgatcgagtcgagcaggtattcaagttatcaactggtcgccaggccacatttattgaagaggtaatacctccgaaccaggtagaaagcgatacctttgttgatcagcataacaacgggcgtgaccaggcatctcttacgccaaaatcattaaaaagtatccgaagcactattaagcatcagcaattttaccctgcaataggtgttagacgggctacagggaaaattgaaattttggatggttcccggcgtcgagcttctgccatcttagagaacgtagggttgcgggttttagtcacggaccaggagatcagcgttcaggaagcgcaaaatttagcgaaagacgttcagacagcattgcagcacagcattcgagaaataggtctgcgtttgatgcgaatgaaaaatgatgggatgagtcagaaggatattgcagccaaagaagggctgtctcaggcgaaggtcacgcgtgctctccaggcagcgagtgctccggaagaattagtcgcccttttccctgtgcagtcggaattaaccttttcggactacaaaacgctttgtgctgttggcgacgaaatggggaacaagaatttagagtttgatcagcttattcaaaacatatccccggaaataaacgacatcttatccattgaagaaatggccgaagatgaagttaaaaataaaatcctgcgcttgataacaaaggaagcctcactactcacggataaaggttctaaagataagtccgtagttactgaattatggaaatttgagggcaaggatcgctttgcaaggaagaggaatcgtattgcagatatcgcaaaacgctctaaagctgtgcttggctgggcaagcactgcgcagttcggtactgataaccaattcattaaagatgatgccgcgcgtgccgcatctatccttgaagctgcacgtaaagacccggtttttgtgcatatctttgataatgccaccgttcaaagcgctacagcgtgggcaagtgcactggctgactacgccgcagcacataaatctatgccgcgtccggaaattctggcctcctgccaccagacgctggaaaactgcctgatagagtccacccgcaatagcatggatgccactaataaagcgatgctggaatctgtcgcagcagagatgatgagcgtttctgacggtgttatgcgtctgcctttattcctcgcgatgatcctgcctgttcagttgggggcagctaccgctgatgcgtgtaccttcattccggttacgcgtgaccagtccgacatctatgaagtctttaacgtggcaggttcatcttttggttcttatgctgctggtgatgttctggacatgcaatccgtcggtgtgtacagccagttacgtcgccgctatgtgctggtggcaagctccgatggcaccagcaaaaccgcaaccttcaagatggaagacttcgaaggccagaatgtaccaatccgaaaaggtcgcactaacatctacgttaaccgtattaagtctgttgttgataacggttccggcagcctacttcactcgtttactaatgctgctggtgagcaaatcactgttacctgctctctgaactacaacattggtcagattgccctgtcgttctccaaagcgccggataaaggcactgagatcgcaattgagacggaaatcaatattgaagccgctcctgagctgatcccgctgatcaaccacgaaatgaagaaatacaccctgttcccaagtcagttcgttatcgcggctgagcacacggtacaggcggcgtatgaagcacagcgtgaatttggtctggacctgggttccctacagttccgcaccctgaaggaatacctgtctcatgaacaggatatgctgcgtcttcgcatcatgatctggcgcactcttgcgaccgacacctttgacatcgctctgccggttaaccagtcctttgatgtatgggcaaccatcattcgtggcaaattccagactgtatatcgcgacattattgagcgcgttaaatcttctggtgcgatggggatgtttgctggtgctgatgcagcatctttcttcaaacagttgccgaaggatttcttccagccagccgaagactatatccagactccgtatgttcactacatcggtaccccatttaggaccacccacagcacctaa

SEQ ID NO: 5734 - DNA, 2850 bp, Homo sapiens
  SIMILAR (1801)..(2817): 941254mologous to Leishmania major probable incb protein,accession number AL160371,Smith-Waterman Score=1598.
atgagctacacgcatatgcgatgtcaattcagaacatcattgacatatatgaacatcgcggagtgccaaaataccgggatcgctctggcgcatgcaatgcgtgctcaccctcatcttcttatggaggatttaaggattctggttattgaccttgatccgcaatcttcagcaacgatgtttttaagccataaacactctattggtatcgtaaacgcaacatctgcacaggctatgttgcagaatgtaagccgtgaagagctgttagaggagtttattgttccttctgttgtacctggggttgacgttatgcctgcgtcgattgacgatgcctttattgcatccgattggagagagctgtgcaatgagcatctaccgggtcagaacatccatgctgtcctgaaagaaaatgtgattgataagctgaagagcgattatgactttatcctcgttgatagtggtcctcaccttgacgccttcctgaaaaatgctttggcctcggccaatatactgtttacacctctgccgccagcaactgtcgatttccactcatcgcttaaatacgtggcccgccttcatgagttggtgaaactcatttcgaatgaaggctgcgagtgccagcttgcgactaccattggttttatgtccaagttgagtaacaaggcagaccataagtattgccatagcctggctaaagaagtgttcggtggggatatgcttgatgtcttcctccctcgccttgacggttttgaacgctgcggcgagtcttttgacactgttatttcagctaacccggcaacgtatgttggtagtgctgatgcattgaagaacgcgcgaattgccgcggaagattttgctaaagcagtttttgaccagaacgtagggttgcgggttttagtcacggaccaggagatcagcgttcaggaagcgcaaaatttagcgaaagacgttcagacagcattgcagcacagcattcgagaaataggtctgcgtttgatgcgaatgaaaaatgatgggatgagtcagaaggatattgcagccaaagaagggctgtctcaggcgaaggtcacgcgtgctctccaggcagcgagtgctccggaagaattagtcgcccttttccctgtgcagtcggaattaaccttttcggactacaaaacgctttgtgctgttggcgacgaaatggggtacaagaatttagagtttgatcagcttattcaaaacatatccccggaaataaacgacatcttatccattgaagaaatggccgaagatgaagttaaaaataaaatcctgcgcttgataacaaaggaagcctcactactcacggataaaggttctaaagataagtccgtagttactgaattatggaaatttgaggacaaggatcgctttgcaaggaagggcgtgaaaggccgtgcattttcttatgagtttaatcgactctcaaaaaagaagagtaaattgagtaacttacgcgaataccagaatcgtattgcagatatcgcaaaacgctctaaagctgtgcttggctgggcaagcactgcgcagttcggtactgataaccaattcattaaagatgatgccgcgcgtgccgcatctatccttgaagctgcacgtaaagacccggtttttgcgggtatctctgataatgccaccgctcaaatcgctacagcgtgggcaagtgcactggctgactacgccgcagcacataaatctatgccgcgtccggaaattctggcctcctgccaccagacgctggaaaactgcctgatagagtccacccgcaatagcatggatgccactaataaagcgatgctggaatctgtcgcagcagagatgatgagcgtttctgacggtgttatgcgtctgcctttattcctcgcgatgatcctgcctgttcagttgggggcagctaccgctgatgcgtgtaccttcattccggatacgcgtgaccagtccgacatctatgaagtctttaacgtggcaggttcatcttttggttcttatgctgctggtgatgttctggacatgcaatccgtcggtgtgtacagccagttacgtcgccgctatgtgctggtggcaagctccgatggcaccagcaaaaccgcaaccttcaagatggaagacttcgaaggccagaatgtaccaatccgaaaaggtcgcactaacatctacgttaaccgtattaagtctgttgttgataacggttccggcagcctacttcactcgtttactaatgctgctggtgagcaaatcactgttacctgctctctgaactacaacattggtcagattgccctgtcgttctccaaagcgccggataaaggcactgagatcgcaattgagacggaaatcaatattgaagccgctcctgagctgatcccgctgatcaaccacgaaatgaagaaatacaccctgttcccaagtcagttcgttatcgcggctgagcacacggtacaggcggcgtatgaagcacagcgtgaatttggtctggacctgggttccctacagttccgcaccctgaaggaatacctgtctcatgaacaggatatgctgcgtcttcgcatcatgatctggcgcactcttgcgaccgacacctttgacatcgctctgccggttaaccagtcctttgatgtatgggcaaccatcattcgtggcaaattccagactgtatatcgcgacattattgagcgcgttaaatcttctggtgcgatggggatgtttgctggtgctgatgcagcatctttcttcaaacagttgccgaaggatttcttccagccggccgaagactatatccagactccgtatgttcactacatcggtaccccatttaggaccacccacagcacctaa

SEQ ID NO: 5735 - DNA, 4239 bp, Homo sapiens
  SIMILAR (3190)..(4206): 941254mologous to Leishmania major probable incb protein,accession number AL160371,Smith-Waterman Score=1598.
atgtcattcttttctacgttaaaaacagctttgtctttgaaggagaaacttgctgctactggtgttcttgttctgatttgcgcacttgttggtgctgggtttgcatgggaacgtcatcagctaaagcaagccatagagaaaattggcagtcttgatcaggctgttaaggaacgtgataagtcaataatggatcttaaccagaccattgagacgatgaacaaagcagagcaacattttcacagccaggaagtgaaaaatgaatcagaacaagccaagtatgctgacaggcaaatggaacgaaaagctgaagttcagaaacaactggttgcggcgggtaatgttcgccagcgtattcctgctgacactcagcggttgctccgggagtcgatcagcgaatttaacgccgacgccgacaaagggatttttatgtctgataaagtaacagtaaagcaaactatcaacaaagcgacttcaatctacaaaattgagcaaatcactgttggcaagccaggatctgaacaataccgtcgtgctttcgagcttgccgatcagcttggtttaaaacacccggattgcattgagcatgtatttccgacctatgctgatgagcaatgtactcatgttcttaccgaagaggattttttcagcactgaagaacgagaaggcgttgatcgctgcattggtgtgatttgttcttcggtaagtgatgagttattccctaatgtgcctgaatatggtggtattggataccaattcctgtacgagggcgatgagcttaaatgctatgaacatgacattgaaagtaaggcaaaagaactaacagttaattcaaacaacactgtgcagcctgtagcgttgatgcgcttgggggtattcgtgccgaagccatcaaagagcaaaggagaaagtaaagagattgatgccaccaaagcgttttcccagctggagatagctaaagccgagggttacgatgatattaaaatcaccggtcctcgactcgatatggatactgatttcaaaacgtggatcggtgtcatctacgcgttcagcaaatacggcttgtcctcaaacaccatccagttatcgtttcaggaattcgctaaagcctgtggtttcccctcaaaacgtctggatgcgaaactgcgtttaaccattcatgaatcacttggacgcttgcgtaacaagggtatcgcttttaagcgcggaaaagatgctaaaggcggctatcagactggtctgctgaagaaagaagctgcacaagccatttacactttcatcgaaagccttccgcagaacccgttgccgctatcgttcgcgcgaatccgtgagcgcctggctttgcagtcagctgttggcgagcaaaaccgtatcattaagaaagcgatagaacagcttaaaacaatcggctatctcgactgttctattgagaagaaaggccgggaaacacacatatttgataccagcgatccctccacagcacataattcaatgcgacttcaccagttgatagagagtgaagcttggctgcccattgaagcaggaaatcaccaaaatgattcaggctacaacctgaacaatgtaagccgtgaagagctgttagaggagtttattgttccttctgttgtacctggggttgacgttatgcctgcgtcgattgacgatgcctttattgcatccgattggagagagctgtgcaatgagcatctaccgggtcagaacatccatgctgtcctgaaagaaaatgtgattgataagctgaagagcgattatgactttatcctcgttgatagtggtcctcaccttgacgccttcctgaaaaatgctttggcctcggccaatatactgtttacacctctgccgccagcaactgtcgatttccactcatcgcttaaatacgttgcccgccttcctgagttgaaaaacagaccaacaattgggcgaacccttaatccttcaatattaagcggatttgatagttcttcagcctctggcgatcgagtcgagcaggtattcaagttatcaactggtcgccaggccacatttattgaagaggtaatacctccgaaccaggtagaaagcgatacctttgttgatcagcataacaacgggcgtgaccaggcatctcttacgccaaaatcattaaaaagtatccgaagcactattaagcatcagcaattttaccctgcaataggtgttagacgggctacagggaaaattgaaattttggatggttcccggcgtcgagcttctgccatcttagagaacgtagggttgcgggttttagtcacggaccaggagatcagcgttcaggaagcgcaaaatttagcgaaagacgttcagacagcattgcagcacagcattcgagaaataggtctgcgtttgatgcgaatgaaaaatgatgggatgagtcagaaggatattgcagccaaagaagggctgtctcaggcgaaggtcacgcgtgctctccaggcagcgagtgctccggaagaattagtcgcccttttccctgtgcagtcggaattaaccttttcggactacaaaacgctttgtgctgttggcgacgaaatggggtacaagaatttagagtttgatcagcttattcaaaacatatccccggaaataaacgacatcttatccattgaagaaatggccgaagatgaagttaaaaataaaatcctgcgcttgataacaaaggaagcctcactactcacggataaaggttctaaagataagtccgtagttactgaattatggaaatttgaggacaaggatcgctttgcaaggaagcgcgtgaaaggccgtgcattttcttatgagtttaatcgactctcaaaagagaagagtaaattgagtaacttacgcgaataccagaatcgtattgcagatatcgcaaaacgctctaaagctgtgcttggctgggcaagcactgcgcagttcggtactgataaccaattcattaaagatgatgccgcgcgtgccgcatctatccttgaagctgcacgtaaagacccggtttttgcgggtatctctgataatgccaccgctcaaatcgctacagcgtgggcaagtgcactggctgactacgccgcagcacataaatctatgccgcgtccggaaattctggcctcctgccaccagacgctggaaaactgcctgatagagtccacccgcaatagcatggatgccactaataaagcgatgctggaatctgtcgcagcagagatgatgagcgtttctgacggtgttatgcgtctgcctttattcctcgcgatgatcctgcctgttcagttgggggcagctaccgctgatgcgtgtaccttcattccggttacgcgtgaccagtccgacatctatgaagtctttaacgtggcaggttcatcttttggttcttatgctgctggtgatgttctggacatgcaatccgtcggtgtgtacagccagttacgtcgccgctatgtgctggtggcaagctccgatggcaccagcaaaaccgcaaccttcaagatggaagacttcgaaggccagaatgtaccaatccgaaaaggtcgcactaacatctacgttaaccgtattaagtctgttgttgataacggttccggcagcctacttcactcgtttactaatgctgctggtgagcaaatcactgttacctgctctctgaactacaacattggtcagattgccctgtcgttctccaaagcgccggataaaggcactgagatcgcaattgagacggaaatcaatattgaagccgctcctgagctgatcccgctgatcaaccacgaaatgaagaaatacaccctgttcccaagtcagttcgttatcgcggctgagcacacggtacaggcggcgtatgaagcacagcgtgaatttggtctggacctgggttccctacagttccgcaccctgaaggaatacctgtctcatgaacaggatatgctgcgtcttcgcatcatgatctggcgcactcttgcgaccgacacctttgacatcgctctgccggttaaccagtcctttgatgtatgggcaaccatcattcgtggcaaattccagactgtatatcgcgacattattgagcgcgttaaatcttctggtgcgatggggatgtttgctggtgctgatgcagcatctttcttcaaacagttgccgaaggatttcttccagccagccgaagactatatccagactccgtatgttcactacatcggtaccccatttaggaccacccacagcacctaa

SEQ ID NO: 5736 - DNA, 1953 bp, Homo sapiens
  SIMILAR (1953)..(1174): 991254mologous to Escherichia coli parB (aa 1-343),accession number X02954,Smith-Waterman Score=1285.
ttaggtgctgtgggtggtcctaaatggggtaccgatgtagtgaacatacggagtctggatatagtcttcggctggctggaagaaatccttcggcaactgtttgaagaaagatgctgcatcagcaccagcaaacatccccatcgcaccagaagatttaacgcgctcaataatgtcgcgatatacagtctggaatttgccacgaatgatggttgcccatacatcaaaggactggttaaccggcagagcgatgtcaaaggtgtcggtcgcaagagtgcgccagatcatgatgcgaagacgcagcatatcctgttcatgagacaggtattccttcagggtgcggaactgtagggaacccaggtccagaccaaattcacgctgtgcttcatacgccgcctgtaccgtgtgctcagccgcgataacgaactgacttgggaacagggtgtatttcttcatttcgtggttgatcagcgggatcagctcaggagcggcttcaatattgatttccgtctcaattgcgatctcagtgcctttatccggcgctttggagaacgacagggcaatctgaccaatgttgtagttcagagagcaggtaacagtgatttgctcaccagcagcattagtaaacgagtgaagtaggctgccggaaccgttatcaacaacagacttaatacggttaacgtagatgttagtgcgaccttttcggattggtacattctggccttcgaagtcttccatcttgaaggttgcggttttgctggtgccatcggagctagtctcgctcatcatctctgctgcgacagattccagcatcgctttattagtggcatccatgctattgcgggtggactctatcaggcagttttccagcgtctggtggcaggaggccagaatttccggacgcggcatagatttatgtgctgcggcgtagtcagccagtgcacttgcccacgctgtagcgatttgagcggtggcattatcagagatacccgcaaaaaccgggtctttacgtgcagcttcaaggatagatgcggcacgcgcggcatcatctttaatgaattggttatcagtaccgaactgcgcagtgcttgcccagccaagcacagctttagagcgttttgcgatatctgcaatacgattctggtattcgcgtaagttactcaatttactcttctcttttgagagtcgattaaactcataagaaaatgcacggcctttcacgcgcttccttgcaaagcgatccttgtcctcaaatttccataattcagtaactacggacttatctttagaacctttatccgtgagtagtgaggcttcctttgttatcaagcgcaggattttatttttaacttcatcttcggccatttcttcaatggataagatgtcgtttatttccggggatatgttttgaataagctgatcaaactctaaattcttgttccccatttcgtcgccaacagcacaaagcgttttgtagtccgaaaaggttaattccgactgcacagggaaaagggcgactaattcttccggagcactcgctgcctggagagcacgcgtgaccttcgcctgagacagcccttctttggctgcaatatccttctgactcatcccatcatttttcattcgcatcaaacgcagacctatttctcgaatgctgtgctgcaatgctgtctgaacgtctttcgctaaattttgcgcttcctgaacgctgatctcctggtccgtgactaaaacccgcaaccctacgttctctaagatggcagaagctcgacgccgggaaccatccaaaatttcaattttccctgtcgcccgtctaacacctattgcagggtaaaattgctgatgcttaatagtgcttcggatactttttaatgattttggcgtaagagatgcctggtcacgcccgttgttatgctgatcaacaaaggtatcgctttctacctggttcggaggcat

SEQ ID NO: 5737 - DNA, 1295 bp, Homo sapiens
  SIMILAR (943)..(275): 931254mologous to Leishmania major probable incb protein,accession number AL160371,Smith-Waterman Score=1029.
ggagtctggatatagtcttcggctggctggaagaaatcttcggcaactgttgaaagaaagatgctgcatcagcaccagcaaacatccccatcgcaccagaagatttaacgcgctcaataatgtcgcgatatacagtctggaatttgccacgaatgatggttgcccatacatcaaaggactggttaaccggcagagcgatgtcaaaggtgtcggtcgcaagagtgcgccagatcatgatgcgaagacgcagcatatcctgttcatgagacaggtattccttcagggtgcggaacgtgtgctcagccgcgataacgaactgacttgggaacagggtgtatttcttcatttcgtggttgatcagcgggatcagctcaggagcggcttcaatattgatttccgtctcaattgcgatctcagtgcctttatccggcgctttggagaacgacagggcaatctgaccaatgttgtagttcagagagcaggtaacagtgatttgctcaccagcagcattagtaaacgagtgaagtaggctgccggaaccgttatcaacaacagacttaatacggttaacgtagatgttagtgcgaccttttcggattggtacattctggccttcgaagtcttccatcttgaaggttgcggttttgctggtgccatcggagcttgccaccagcacatagcggcgacgtaactggctgtacacaccgacggattgcatgtccagaacatcaccagcagcataagaaccaaaagatgaacctgccacgttaaagacttcatagatgtcggactggtcacgcgtaaccggaatgaaggtacacgcatcagcggtagctgcccccaactgaacaggcaggatcatcgcgaggaataaaggcagacgcataacaccgtcagaaacgctcatcatctctgctgcgacagattccagcatcgctttattagtggcatccatgctattgcgggtggactctatcaggcagttttccagcgtctggtggcaggaggccagaatttccggacgcggcatagatttatgtgctgcggcgtagtcagccagtgcacttgcccacgctgtagcgatttgagcggtggcattatcagagatacccgcaaaaaccgggtctttacgtgcagcttcaaggatagatgcggcacgcgcggcatcatctttaatgaattggttatcagtaccgaactgcgcagtgcttgcccagccaagcacagctttagagcgttttgcgatacctgcaatacgattctggtattcgcgtaagttactcaatttactcttc

SEQ ID NO: 5738 - DNA, 1539 bp, Homo sapiens
  SIMILAR (672)..(1100): 981254mologous to Homo sapiens osteopontin,accession number J04765,Smith-Waterman Score=742.
cccgggccgacccacgcgtccgcccacgcgtccgggaggaggcagagcacagcatcggctgtaccagactctgtctcaggccagttgcagccttctcagccaaacgccgaccagaggaaaactcactaccatgagaattgcagtgatttgcttttgcctcctaggcatcacctgtgccataccatttaaacaggctgattctggaagttctgaggaaaagcattttttacaacaaatacccagatgctgtggccacatggctaaaaccctgacccatcttcagaaggcagaatctcctaggccccacagaatggctgtgtcctctgaaggaaaccaatggactttaaacaaggaggaccctttccaagttaaggtccaacggaaaggccatggaccacatgggatgatatgggatgatggaaggtggatggatggaccatgtgggacagccaggactccattgactccgaaccgactctgatgatgtagatgacactggatgattctcaccagtctgatgagtctcaccattctggatgaatctgatgaactggtcactggattttccacggacctgccagcaaccgaagttttcactccagttgtccccacagtagacacatatgatggccgaggtgatagtgtggtttatggactgaggtcaaaatctaaggaagtttcgcagacctgacatcaagtaccctgatgctacagacgaggacatcacctcacacatggaaagcgaggagttgaatggtgcatacaaggccatccccgttgcccaggacctgaacgcgccttctgattgggacagccgtgggaaggacagttatgaaacgagtcagctggatgaccagagtgctgaaacccacagccacaagcagtccagattatataagcggaaagccaatgatgagagcaatgagcattccgatgtgattgatagtcaggaactttccaaagtcagccgtgaattccacagccatgaatttcacagccatgaagatatgctggttgtagaccccaaaagtaaggaagaagataaacacctgaaatttcgtatttctcatgaattagatagtgcatcttctgaggtcaattaaaaggagaaaaaatacaatttctcactttgcatttagtcaaaagaaaaaatgctttatagcaaaatgaaagagaacatgaaatgcttctttctcagtttattggttgaatgtgtatctatttgagtctggaaataactaatgtgtttgataattagtttagtttgtggcttcatggaaactccctgtaaactaaaagcttcagggttatgtctatgttcattctatagaagaaatgcaaactatcactgtattttaatatttgttattctctcatgaatagaaatttatgtagaagcaaacaaaatacttttacccacttaaaaagagaatataacattttatgtcactataatcttttgttttttaagttagtgtatattttgttgtgattatctttttgtggtgtgaataaatcttttatcttgaatgtaataag

SEQ ID NO: 5739 - DNA, 2174 bp, Homo sapiens
  SIMILAR (1050)..(34): 941254mologous to Leishmania major probable incb protein,accession number AL160371,Smith-Waterman Score=1598.
ttaggtgctgtgggtggtcctaaatggggtaccgatgtagtgaacatacggagtctggatatagtcttcggctggctggaagaaatccttcggcaactgtttgaagaaagatgctgcatcagcaccagcaaacatccccatcgcaccagaagatttaacgcgctcaataatgtcgcgatatacagtctggaatttgccacgaatgatggttgcccatacatcaaaggactggttaaccggcagagcgatgtcaaaggtgtcggtcgcaagagtgcgccagatcatgatgcgaagacgcagcatatcctgttcatgagacaggtattccttcagggtgcggaactgtagggaacccaggtccagaccaaattcacgctgtgcttcatacgccgcctgtaccgtgtgctcagccgcgataacgaactgacttgggaacagggtgtatttcttcatttcgtggttgatcagcgggatcagctcaggagcggcttcaatattgatttccgtctcaattgcgatctcagtgcctttatccggcgctttggagaacgacagggcaatctgaccaatgttgtagttcagagagcaggtaacagtgatttgctcaccagcagcattagtaaacgagtgaagtaggctgccggaaccgttatcaacaacagacttaatacggttaacgtagatgttagtgcgaccttttcggattggtacattctggccttcgaagtcttccatcttgaaggttgcggttttgctggtgccatcggagcttgccaccagcacatagcggcgacgtaactggctgtacacaccgacggattgcatgtccagaacatcaccagcagcataagaaccaaaagatgaacctgccacgttaaagacttcatagatgtcggactggtcacgcgtaaccggaatgaaggtacacgcatcagcggtagctgcccccaactgaacaggcaggatcatcgcgaggaataaaggcagacgcataacaccgtcagaaacgctcatcatctctgctgcgacagattccagcatcgctttattagtggcatccatgctattgcgggtggactctatcaggcagttttccagcgtctggtggcaggaggccagaatttccggacgcggcatagatttatgtgctgcggcgtagtcagccagtgcacttgcccacgctgtagcgctttgaacggtggcattatcaaagatatgcacaaaaaccgggtctttacgtgcagcttcaaggatagatgcggcacgcgcggcatcatctttaatgaattggttatcagtaccgaactgcgcagtgcttgcccagccaagcacagctttagagcgttttgcgatatctgcaatacgattcctcttccttgcaaagcgatccttgccctcaaatttccataattcagtaactacggacttatctttagaacctttatccgtgagtagtgaggcttcctttgttatcaagcgcaggattttatttttaacttcatcttcggccatttcttcaatggataagatgtcgtttatttccggggatatgttttgaataagctgatcaaactctaaattcttgttccccatttcgtcgccaacagcacaaagcgttttgtagtccgaaaaggttaattccgactgcacagggaaaagggcgactaattcttccggagcactcgctgcctggagagcacgcgtgaccttcgcctgagacagcccttctttggctgcaatatccttctgactcatcccatcatttttcattcgcatcaaacgcagacctatttctcgaatgctgtgctgcaatgctgtctgaacgtctttcgctaaattttgcgcttcctgaacgctgatctcctggtccgtgactaaaacccgcaaccctacgttctctaagatggcagaagctcgacgccgggaaccatccaaaatttcaattttccctgtagcccgtctaacacctattgcagggtaaaattgctgatgcttaatagtgcttcggatactttttaatgattttggcgtaagagatgcctggtcacgcccgttgttatgctgatcaacaaaggtatcgctttctacctggttcggaggtattacctcttcaataaatgtggcctggcgaccagttgataacttgaatacctgctcgactcgatcgccagagg

SEQ ID NO: 5740 - DNA, 1504 bp, Homo sapiens
  SIMILAR (1129)..(446): 881254mologous to Leishmania major probable incb protein,accession number AL160371,Smith-Waterman Score=988.
cgatgtagtgaacatacggagtctggatatagtcttcggctggctggaagaaatccttcggcaactgtttgaagaaagatgctgcatcagcaccagcaaacatccccatcgcaccagaagatttaacgcgctcaataatgtcgcgatatacagtctggaatttgccacgaatgatggttgcccatacatcaaaggactggttaaccggcagagcgatgtcaaaggtgtcggtcgcaagagtgcgccagatcatgatgcgaagacgcagcatatcctgttcatgagacaggtattccttcagggtgcggaactgtagggaacccaggtccagaccaaattcacgctgtgcttcatacgccgcctgtaccgtgtgctcagccgcgataacgaactgacttgggaacagggtgtatttcttcatttcgtggttgatcagcgggatcagctcacgagcggcttcaatattgatgtccgtctcaattgcgatctcagtgcctttatccggcgttgggaacagggtgtatttcttcatttcgtggttgatcagcgggatcagctcaggagcggcttcaatattgatttccgtctcaattgcgatctcagtgcctttatccggcgctttggagaacgacagggcaatctgaccaatgttgtagttcagagagcaggtaacagtgatttgctcaccagcagcattagtaaacgagtgaagtaggctgccggaaccgttatcaacaacagacttaatacggttaacgtagatgttagtgcgaccttttcggattggtacattctggccttcgaagtcttccatcttgaaggttgcggttttgctggtgccatcggagcttgccaccagcacatagcggcgacgtaactggctgtacacaccgacggattgcatgtccagaacatcaccagcagcataagaaccaaaagatgaacctgccacgttaaagacttcatagatgtcggactggtcacgcgtaaccggaatgaaggtacacgcatcagcggtagctgcccccaactgaacaggcaggatcatcgcgaggaataaaggcagacgcataacaccgtcagaaacgctcatcatctctgctgcgacagattccagcatcgctttattagtggcatccatgctattgcgggtggactctatcaggcagttttccagcgtctggtggcaggaggccagaatttccggacgcggcatagatttatgtgctgcggcgtagtcagccagtgcacttgcccacgctgtagcgatttgagcggtggcattatcagagatacccgcaaaaaccgggtctttacgtgcagcttcaaggatagatgcggcacgcgcggcatcatctttaatgaattggttatcagtaccgaactgcgcagtgcttgcccagccaagcacagctttagagcgttttgcgatatctgcaatacgattctggtattcgcgtaagttactcaatttactcttctcatcatctgtgtcgacgaacat

SEQ ID NO: 5741 - DNA, 2451 bp, Homo sapiens
  SIMILAR (1)..(1050): 1001254mologous to Escherichia coli parA (aa 1-398),accession number X02954,Smith-Waterman Score=1792.
atgctcaatgttctgactgaacaagtacagttgcaaaaggatgagctacacgcgaacgagttttaccaggtctatgcgaaagcggcactggcaaaattgcctctactgactcgagcgaacgttgactatgccgtaagtgaaatggaagaaaagggttatgttttcgataaacgccctgctggctcttcaatgaaatatgcgatgtcaattcagaacatcattgacatatatgaacatcgcggagtgccaaaataccgggatcgctacagcgaagcgtatgtgattttcatctccaatcttaaaggcggtgtgtcaaaaactgtatcgacggtttctctggcgcatgcaatgcgtgctcaccctcatcttcttatggaggatttaaggattctggttattgaccttgatccgcaatcttcagcaacgatgtttttaagccataaacactctattggtatcgtaaacgcaacatctgcacaggctatgttgcagaatgtaagccgtgaagagctgttagaggagtttattgttccttctgttgtacctggggttgacgttatgcctgcgtcgattgacgatgcctttattgcatccgattggagagagctgtgcaatgagcatctaccgggtcagaacatccatgctgtcctgaaagaaaatgtgattgataagctgaagagcgattatgactttatcctcgttgatagtggtcctcaccttgacgccttcctgaaaaatgctttggcctcggccaatatactgtttacacctctgccgccagcaactgtcgatttccactcatcgcttaaatacgttgcccgccttcctgagttggtgaaactcatttcggatgaaggctgcgagtgccagcttgcgactaacattggttttatgtccaagttgagtaacaaggcagaccataagtattgccatagcctggctaaagaagtgttcggtggggatatgcttgatgtcttcctccctcgccttgacggttttgaacgctgcggcgagtcttttgacactgttatttcagctaacccggcaacgaagagtaaattgagtaacttacgcgaataccagaatcgtattgcagatatcgcaaaacgctctaaagctgtgcttggctgggcaagcactgcgcagttcggtactgataaccaattcattaaagatgatgccgcgcgtgccgcatctatccttgaagctgcacgtaaagacccggtttttgcgggtatctctgataatgccaccgctcaaatcgctacagcgtgggcaagtgcactggctgactacgccgcagcacataaatctatgccgcgtccggaaattctggcctcctgccaccagacgctggaaaactgcctgatagagtccaaccgcaatagcatggatcccaataataaagcgatgctggaatctgtcgcagcagagatgatgagcgtttctgacggtgttatgcgtctgcctttattcctcgcgatgatcctgcctgttcagttgggggcagctaccgctgatgcgtgtaccttcattccggttacgcgtgaccagtccgacatctatgaagtctttaacgtggcaggttcatcttttggttcttatgctgctggtgatgttctggacatgcaatccgtcggtgtgtacagccagttacgtcgccgctatgtgctggtggcaagctccgatggcaccagcaaaaccgcaaccttcaagatggaagacttcgaaggccagaatgtaccaatccgaaaaggtcgcactaacatctacgttaaccgtattaagtctgttgttgataacggttccggcagcctacttcactcgtttactaatgctgctggtgagcaaatcactgttacctgctctctgaactacaacattggtcagattgccctgtcgttctccaaagcgccggataaaggcactgagatcgcaattgagacggaaatcaatattgaagccgctcctgagctgatcccgctgatcaaccacgaaatgaagaaatacaccctgttcccaagtcagttcgttatcgcggctgagcacacggtacaggcggcgtatgaagcacagcgtgaatttggtctggacctgggttccctacagttccgcaccctgaaggaatacctgtctcatgaacaggatatgctgcgtcttcgcatcatgatctggcgcactcttgcgaccgacacctttgacatcgctctgccggttaaccagtcctttgatgtatgggcaaccatcattcgtggcaaattccagactgtatatcgcgacattattgagcgcgttaaatcttctggtgcgatggggatgtttgctggtgctgatgcagcatctttcttcaaacagttgccgaaggatttcttccagccagccgaagactatatccagactccgtatgttcactacatcggtaccccatttaggaccacccacagcacctaa

SEQ ID NO: 5742 - DNA, 2982 bp, Homo sapiens
  SIMILAR (835)..(1752): 991254mologous to Escherichia coli parB (aa 1-343),accession number X02954,Smith-Waterman Score=1507.
atgctcaatgttctgactgaacaagtacagttgcaaaaggatgagctacacgcgaacgagttttaccaggtctatgcgaaagcggcactggcaaaattgcctctactgactcgagcgaacgttgactatgccgtaagtgaaatggaagaaaagggttatgttttcgataaacgccctgctggctcttcaatgaaatatgcgatgtcaattcagaacatcattgacatatatgaacatcgcggagtgccaaaataccgggatcgctacagcgaagcgtatgtgattttcatctccaatcttaaaggcggtgtgtccccaactgtatcgacggtttctctggcgcatgcaatgcgtgctcaccctcatcttcttatggaggatttaaggattctggttattgaccttgatccgcaatcttcagcaacgatgtttttaagccataaacactctattggtatcgtaaacgcaacatctgcacaggctatgttgcagaatgtaagccgtgaagagctgttagaggagtttattgttccttctgttgtacctggggttgacgttatgcctgcgtcgattgacgatgcctttattgcatccgattggagagagctgtgcaatgagcatctaccgggtcagaacatccatgctgtcctgaaagaaaatgtgattgataagctgaagagcgattatgactttatcctcgttgatagtggtcctcaccttgacgccttcctgaaaaatgctttggcctcggccaatatactgtttacacctctgccgccagcaactgtcgatttccactcatcgcttaaatacgttgcccgccttcctgagttgaaaaacagaccaacaattgggcgaacccttaatccttcaatattaagcggatttgatagttcttcagcctctggcgatcgagtcgagcaggtattcaagttatcaactggtcgccaggccacatttattgaagaggtaatacctccgaaccaggtagaaagcgatacctttgttgatcagcataacaacgggcgtgaccaggcatctcttacgccaaaatcattaaaaagtatccgaagcactattaagcatcagcaattttaccctgcaataggtgttagacgggctacagggaaaattgaaattttggatggttcccggcgtcgagcttctgccatcttagagaacgtagggttgcgggttttagtcacggaccaggagatcagcgttcaggaagcgcaaaatttagcgaaagacgttcagacagcattgcagcacagcattcgagaaataggtctgcgtttgatgcgaatgaaaaatgatgggatgagtcagaaggatattgcagccaaagaagggctgtctcaggcgaaggtcacgcgtgctctccaggcagcgagtgctccggaagaattagtcgcccttttccctgtgcagtcggaattaaccttttcggactacaaaacgctttgtgctgttggcgacgaaatggggtacaagaatttagagtttgatcagcttattcaaaacatatccccggaaataaacgacatcttatccattgaagaaatggccgaagatgaagttaaaaataaaatcctgcgcttgataacaaaggaagcctcactactcacggataaaggttctaaagataagtccgtagttactgaattatggaaatttgaggacaaggatcgctttgcaaggaagcgcgtgaaaggccgtgcattttcttatgagtttaatcgactctcaaaagagaagagtaaattgagtaacttacgcgaataccagaatcgtattgcagatatcgcaaaacgctctaaagctgtgcttggctgggcaagcactgcgcagttcggtactgataaccaattcattaaagatgatgccgcgcgtgccgcatctatccttgaagctgcacgtaaagacccggtttttgcgggtatctctgataatgccaccgctcaaatcgctacagcgtgggcaagtgcactggctgactacgccgcagcacataaatctatgccgcgtccggaaattctggcctcctgccaccagacgctggaaaactgcctgatagagtccacccgcaatagcatggatgccactaataaagcgatgctggaatctgtcgcagcagagatgatgagcgtttctgacggtgttatgcgtctgcctttattcctcgcgatgatcctgcctgttcagttgggggcagctaccgctgatgcgtgtaccttcattccggttacgcgtgaccagtccgacatctatgaagtctttaacgtggcaggttcatcttttggttcttatgctgctggtgatgttctggacatgcaatccgtcggtgtgtacagccagttacgtcgccgctatgtgctggtggcaagctccgatggcaccagcaaaaccgcaaccttcaagatggaagacttcgaaggccagaatgtaccaatccgaaaaggtcgcactaacatctacgttaaccgtattaagtctgttgttgataacggttccggcagcctacttcactcgtttactaatgctgctggtgagcaaatcactgttacctgctctctgaactacaacattggtcagattgccctgtcgttctccaaagcgccggataaaggcactgagatcgcaattgagacggaaatcaatattgaagccgctcctgagctgatcccgctgatcaaccacgaaatgaagaaatacaccctgttcccaagtcagttcgttatcgcggctgagcacacggtacaggcggcgtatgaagcacagcgtgaatttggtctggacctgggttccctacagttccgcaccctgaaggaatacctgtctcatgaacaggatatgctgcgtcttcgcatcatgatctggcgcactcttgcgaccgacacctttgacatcgctctgccggttaaccagtcctttgatgtatgggcaaccatcattcgtggcaaattccagactatatattga

SEQ ID NO: 5743 - DNA, 3279 bp, Homo sapiens
  SIMILAR (1)..(1137): 981254mologous to Escherichia coli parA (aa 1-398),accession number X02954,Smith-Waterman Score=1892.
atgctcaatgttctgactgaacaagtacagttgcaaaaggatgagctacacgcgaacgagttttaccaggtctatgcgaaagcggcactggcaaaattgcctctactgactcgagcgaacgttgactatgccgtaagtgaaatggaagaaaagggttatgttttcgataaacgccctgctggctcttcaatgaaatatgcgatgtcaattcagaacatcattgacatatatgaacatcgcggagtgccaaaataccgggatcgctacagcgaagcgtatgtgattttcatctccaatcttaaaggcggtgtgtcaaaaactgtatcgacggtttctctggcgcatgcaatgcgtgctcaccctcatcttcttatggaggatttaaggattctggttattgaccttgatccgcaatcttcagcaacgatgtttttaagccataaacactctattggtatcgtaaacgcaacatctgcacaggctatgttgcagaatgctatgttgcagaatgtaagccgtgaagagctgttagaggagtttattgttccttctgttgtacctggggttgacgttatgcctgcgtcgattgacgatgcctttattgcatccgattggagagagctgtgcaatgagcatctaccgggtcagaacatccatgctgtcctgaaagaaaatgtgattgataagctgaagagcgattatgactttatcctcgttgatagtggtcctcaccttgacgccttcctgaaaaatgctttggcctcggccaatatactgtttacacctctgccgccagcaactgtcgatttccactcatcgcttaaatacgttgcccgccttcctgagttggtgaaactcatttcggatgaaggctgcgagtgccagcttgcgactaacattggttttatgtccaagttgagtaacaaggcagaccataagtattgccatagcctggctaaagaagtgttcggtggggatatgcttgatgtcttcctccctcgccttgacggttttgaacgctgcggcgagtcttttgacactgttatttcagctaacccggcaacgtatgttggtagtgctgatgcattgaagaacgcgcgaattgccgcggaagattttgctaaagcagtttttgacccctctggcgatcgagtcgagcaggtattcaagttatcaactggtcgccaggccacatttattgaagaggtaatacctccgaaccaggtagaaagcgatacctttgttgatcagcataacaacgggcgtgaccaggcatctcttacgccaaaatcattaaaaagtatccgaagcactattaagcatcagcaattttaccctgcaataggtgttagacgggctacagggaaaattgaaattttggatggttcccggcgtcgagcttctgccatcttagagaacgtagggttgcgggttttagtcacggaccaggagatcagcgttcaggaagcgcaaaatttagcgaaagacgttcagacagcattgcagcacagcattcgagaaataggtctgcgtttgatgcgaatgaaaaatgatgggatgagtcagaaggatattgcagccaaagaagggctgtctcaggcgaaggtcacgcgtgctctccaggcagcgagtgctccggaagaattagtcgcccttttccctgtgcagtcggaattaaccttttcggactacaaaacgctttgtgctgttggcgacgaaatggggaacaagaatttagagtttgatcagcttattcaaaacatatccccggaaataaacgacatcttatccattgaagaaatggccgaagatgaagttaaaaataaaatcctgcgcttgataacaaaggaagcctcactactcacggataaaggttctaaagataagtccgtagttactgaattatggaaatttgaggacaaggatcgctttgcaaggaagcgcgtgaaaggccgtgcattttcttatgagtttaatcgactctcaaaagagaagagtaaattgagtaacttacgcgaataccagaatcgtattgcagatatcgcaaaacgctctaaagctgtgcttggctgggcaagcactgcgcagttcggtactgataaccaattcattaaagatgatgccgcgcgtgccgcatctatccttgaagctgcacgtaaagacccggtttttgcgggtatctctgataatgccaccgctcaaatcgctacagcgtgggcaagtgcactggctgactacgccgcagcacataaatctatgccgcgtccggaaattctggcctcctgccaccagacgctggaaaactgcctgatagagtccacccgcaatagcatggatgccactaataaagcgatgctggaatctgtcgcagcagaagcgttgatgatgagcgtttctgacggtgttatgcgtctgcctttattcctcgcgatgatcctgcctgttcagttgggggcagctaccgctgatgcgtgtaccttcattccggttacgcgtgaccagtccgacatctatgaagtctttaacgtggcaggttcatcttttggttcttatgctgctggtgatgttctggacatgcaatccgtcggtgtgtacagccagttacgtcgccgctatgtgctggtggcaagctccgatggcaccagcaaaaccgcaaccttcaagatggaagacttcgaaggccagaatgtaccaatccgaaaaggtcgcactaacatctacgttaaccgtattaagtctgttgttgataacggttccggcagcctacttcactcgtttactaatcctgctggtgagcaaatcactgttacctgctctctgaactacaacattggtcagattgccctgtcgttctccaaagcgccggataaaggcactgagatcgcaattgagacggaaatcaatattgaagccgctcctgagctgatcccgctgatcaaccacgaaatgaagaaatacaccctgttcccaaggaaattgtggggtctttgcatcatgatctggcgcactcttgcgaccgacacctttgacatcgctctgccggttaaccagtcctttgatgtatgggcaaccatcattcgtggcaaattccagactgtatatcgcgacattattgagcgcgttaaatcttctggtgcgatggggatgtttgctggtgctgatgcagcatctttcttcaaacagttgccgaaggatttcttccagccagccgaagactatatccagactccgtatgttcactacatcggtaccccatttaggaccacccacagcacctaa

SEQ ID NO: 5744 - DNA, 2790 bp, Homo sapiens
  SIMILAR (1741)..(2757): 941254mologous to Leishmania major probable incb protein,accession number AL160371,Smith-Waterman Score=1598.
atgacaaagtgctcgcacttgtgcaataactatctcttctcctggttgcgtgataacggaattctgatcgcaaccggtgaacgcaggaacgtccgcaaacaagaatacatatctcgtgggtatttcacccttaaagaaaccgtgatcgatacaagcaatggaagcaggatttctttcacgactcgtataaccggcaaaggtcagcagtggctgatgaagcgattgcttgatgctgacgtagtaagaaccaccagcattgtaatgctggctaaagtcactttcctgagctgtataacgatgagcgattttactttttctggctatgaattggcctgctttgtaacacactccggtctatcccgtagcgccgggcatatcctgtcgcaatgtgcaaatctcgcggcaacaaccagtgaatacttcattcacaagcctcaccgcctgatcacggcagaaactggttatagccaatcaaccgtcgttcgtgcattccgtgaagctgtaaacaaaggaattctgtctgtagagattgttatcggcgatcaccgtgaacgtcgcgctaacctgtaccggtttacaccatcctttttggccttcgcacaacaagccaaaaatgcgctgatagaaagcaaattaaagatctcttcagcggcaaccaaggttaaagctgttctcgctaagacattggctttatttaattttttatccacacccccatgtcaaaatgataccccctccccctgtcaggatgacgtggcaataaagaataagaagtcacaagttaaaaaaacaaaaagatcagtttccggcggtgccggaacaaccagcctcaaaaaattgacttcatggatcgctaaggcaaaagcaaaggctgacaatctgcggttatccaaaaaacgcactcaaaaacatgagttcaagcagaaagtagaggcggctgcgcggaaatatgcttacctgaagaacaagcgttcgcctgatattggcgggatatcaaacttcgataacctaccgcattgcatgacggtaaacgaagctcttaatgcggttttagccaaaaataaagataacgaacaatggggtgcggttgctggcgcctatatcgccgacatcaccgatggggaagatcgggctcgccacttcgggctcatgagcgcttgtttcggcgtgggttcaggggtatacatgcagactcggtatagaggtaaacttgtgtcacaggggtttgttgtacagatgattttgacacccagggatgctgatgggacttttattacctccacagacagtgagaccgtgcactaccactatggccctaaggacctggtcacaatcttgttctacatcttcatcaccatcatcttgcatgctgtggttcaggagtacattttagataaaatcagcaaacggcttcatctctccaaagtcaaacacagcaagttcaatgaatctggacagctggtcgtctttcatttcacctcggtgatttggtgcttctacgtggtggtgacgactccacaggccctaacaagggtcctgaactgtctcctggccctgggctccaacgctgctgtcatgggtgaatgcggttttgctcagctccagcagacgtgggcaagtgcactggctgactacgccgcagcacataaatctatgccgcgtccggaaattctggcctcctgccaccagacgctggaaaactgcctgatagagtccacccgcaatagcatggatgccactaataaagcgatgctggaatctgtcgcagcagagatgatgagcgtttctgacggtgttatgcgtctgcctttattcctcgcgatgatcctgcctgttcagttgggggcagctaccgctgatgcgtgtaccttcattccggttacgcgtgaccagtccgacatctatgaagtctttaacgtggcaggttcatcttttggttcttatgctgctggtgatgttctggacatgcaatccgtcggtgtgtacagccagttacgtcgccgctatgtgctggtggcaagctccgatggcaccagcaaaaccgcaaccttcaagatggaagacttcgaaggccagaatgtaccaatccgaaaaggtcgcactaacatctacgttaaccgtattaagtctgttgttgataacggttccggcagcctacttcactcgtttactaatgctgctggtgagcaaatcactgttacctgctctctgaactacaacattggtcagattgccctgtcgttctccaaagcgccggataaaggcactgagatcgcaattgagacggaaatcaatattgaagccgctcctgagctgatcccgctgatcaaccacgaaatgaagaaatacaccctgttcccaagtcagttcgttatcgcggctgagcacacggtacaggcggcgtatgaagcacagcgtgaatttggtctggacctgggttccctacagttccgcaccctgaaggaatacctgtctcatgaacaggatatgctgcgtcttcgcatcatgatctggcgcactcttgcgaccgacacctttgacatcgctctgccggttaaccagtcctttgatgtatgggcaaccatcattcgtggcaaattccagactgtatatcgcgacattattgagcgcgttaaatcttctggtgcgatggggatgtttgctggtgctgatgcagcatctttcttcaaacagttgccgaaggatttcttccagccagccgaagactatatccagactccgtatgttcactacatcggtaccccatttaggaccacccacagcacctaa

SEQ ID NO: 5745 - DNA, 3438 bp, Homo sapiens
  SIMILAR (1)..(1137): 981254mologous to Escherichia coli parA (aa 1-398),accession number X02954,Smith-Waterman Score=1892.
atgctcaatgttctgactgaacaagtacagttgcaaaaggatgagctacacgcgaacgagttttaccaggtctatgcgaaagcggcactggcaaaattgcctctactgactcgagcgaacgttgactatgccgtaagtgaaatggaagaaaagggttatgttttcgataaacgccctgctggctcttcaatgaaatatgcgatgtcaattcagaacatcattgacatatatgaacatcgcggagtgccaaaataccgggatcgctacagcgaagcgtatgtgattttcatctccaatcttaaaggcggtgtgtcaaaaactgtatcgacggtttctctggcgcatgcaatgcgtgctcaccctcatcttcttatggaggatttaaggattctggttattgaccttgatccgcaatcttcagcaacgatgtttttaagccataaacactctattggtatcgtaaacgcaacatctgcacaggctatgttgcagaatgctatgttgcagaatgtaagccgtgaagagctgttagaggagtttattgttccttctgttgtacctggggttgacgttatgcctgcgtcgattgacgatgcctttattgcatccgattggagagagctgtgcaatgagcatctaccgggtcagaacatccatgctgtcctgaaagaaaatgtgattgataagctgaagagcgattatgactttatcctcgttgatagtggtcctcaccttgacgccttcctgaaaaatgctttggcctcggccaatatactgtttacacctctgccgccagcaactgtcgatttccactcatcgcttaaatacgttgcccgccttcctgagttggtgaaactcatttcggatgaaggctgcgagtgccagcttgcgactaacattggttttatgtccaagttgagtaacaaggcagaccataagtattgccatagcctggctaaagaagtgttcggtggggatatgcttgatgtcttcctccctcgccttgacggttttgaacgctgcggcgagtcttttgacactgttatttcagctaacccggcaacgtatgttggtagtgctgatgcattgaagaacgcgcgaattgccgcggaagattttgctaaagcagtttttgacccggatttgatagttcttcagcctctggcgatcgagtcccgcaggtattcgagttatcaactggtcgccaggccacatttattgaagagggtaatacctccgaaccaggtagaaagcgatacctttgttgatcagcataacaacgggcgtgtccaggcatctcttacgccaaaatcattaaaaagtatccgaagcactattaagcatcagcaattttaccctgcaataggtgttagacgggctacagggaaaattgaaattttggatggttcccggcgtcgagcttctgccatcttagagaacgtagggttgcgggttttagtcacggaccaggagatcagcgttcaggaagcgcaaaatttagcgaaagacgttcagacagcattgcagcacagcattcgagaaataggtctgcgtttgatgcgaatgaaaaatgatgggatgagtcagaaggatattgcagccaaagaagggctgtctcaggcgaaggtcacgcgtgctctccaggcagcgagtgctccggaagaattagtcgcccttttccctgtgcagtcggaattaaccttttcggactacaaaacgctttgtgctgttggcgacgaaatggggaacaagaatttagagtttgatcagcttattcaaaacatatccccggaaataaacgacatcttatccattgaagaaatggccgaagatgaagttaaaaataaaatcctgcgcttgataacaaaggaagcctcactactcacggataaaggttctaaagataagtccgtagttactgaattatggaaatttgaggacaaggatcgctttgcaaggaagcgcgtgaaaggccgtgcattttcttatgagtttaatcgactctcaaaagagaagagtaaattgagtaacttacgcgaataccagaatcgtattgcagatatcgcaaaacgctctaaagctgtgcttggctgggcaagcactgcgcagttcggtactgataaccaattcattaaagatgatgccgcgcgtgccgcatctatccttgaagctgcacgtaaagacccggtttttgcgggtatctctgataatgccaccgctcaaatcgctacagcgtgggcaagtgcactggctgactacgccgcagcacataaatctatgccgcgtccggaaattctggcctcctgccaccagacgctggaaaactgcctgatagagtccacccgcaatagcatggatgccactaataaagcgatgctggaatctgtcgcagcagagatgatgagcgtttctgacgcagagatgatgagcgtttctgacggtgttatgcgtctgcctttattcctcgcgatgatcctgcctgttcagttgggggcagctaccgctgatgcgtgtaccttcattccggttacgcgtgaccagtccgacatctatgaagtctttaacgtggcaggttcatcttttggttcttatgctgctggtgatgttctggacatgcaatccgtcggtgtgtacagccagttacgtcgccgctatgtgctggtggcaagctccgatggcaccagcaaaaccgcaaccttcaagatggaagacttcgaaggccagaatgtaccaatccgaaaaggtcgcactaacatctacgttaaccgtattaagtctgttgttgataacggttccggcagcctacttcactcgtttactaatgctgctggtgagcaaatcactgttacctgctctctgaactacaacattggtcagattgccctgtcgttctccaaagcgccggataaaggcactgagatcgcaattgagacggaaatcaatattgaagccgctcctgagctgatcccgctgatcaaccacgaaatgaagaaatacaccctgttcccaagtcagttcgttatcgcggctgagcacacggtacaggcggcgtatgaagcacagcgtgaatttggtctggacctgggttccctacagttccgcaccctgaaggaatacctgtctcatgaacaggatatgctgcgtcttcgcatcatgatctggcgcactcttgcgaccgacacctttgacatcgctctgccggttaaccagtcctttgatgtatgggcaaccatcattcgtggcaaattccagactgtatatcgcgacattattgagcgcgttaaatcttctggtgcgatggggatgtttgctggtgctgatgcagcatctttcttcaaacagttgccgaaggatttcttccagccagccgaagactatatccagactccgtatgttcactacatcggtaccccatttaggaccacccacagcacctaa

SEQ ID NO: 5746 - DNA, 1600 bp, Homo sapiens
  SIMILAR (50993)..(49923): 981254mologous to Escherichia coli parA (aa 1-398),accession number X02954,Smith-Waterman Score=1796.
ctacaaactgcgcatactggtggacgaacccctctcaattgcgatctcagtgcctttattcggcgctttggagaacgacagggcaatctgaccaatgttgtagttcagagagcaggtaacagtgatttgctcaccagcagcattagtaaacgagtgaagtaggctgccggaaccgttatcaacaacagacttaatacggttaacgtagatgttagtgcgaccttttcggattggtacattctggccttcgaagtcttccatcttgaaggttgcggttttgctggtgccatcggagcttgccaccagcacatagcggcgacgtaactggctgtacacaccgacggattgcatgtccagaacatcaccagcagcataagaaccaaaagatgaacctgccacgttaaagacttcatagatgtcggactggtcacgcgtaaccggaatgaaggtacacgcatcagcggtagctgcccccaactgaacaggcaggatcatcgcgaggaataaaggcagacgcataacaccgtcagaaacgctcatcatctctgctgcgacagattccagcatcgctttattagtggcatccatgctattgcgggtggactccctctcaattgcgatctcagtgcctttatccggcgctttggagaacgacagggcaatctgaccaatgttgtagttcagagagcaggtaacagtgatttgctcaccagcagcattagtaaacgagtgaagtaggctgccggaaccgttatcaacaacagacttaatacggttaacgtagatgttagtgcgaccttttcggattggtacattctggccttcgaagtcttccatcttgaaggttgcggttttgctggtgccatcggagcttgccaccagcacatagcggcgacgtaactggctgtacacaccgacggattgcatgtccagaacatcaccagcagcataagaaccaaaagatgaacctgccacgttaaagacttcatagatgtcggactggtcacgcgtaaccggaatgaaggtacacgcatcagcggtagctgcccccaactgaacaggcaggatcatcgcgaggaataaaggcagacgcataacaccgtcagaaacgctcatcatctctgctgcgacagattccagcatcgctttattagtggcatccatgctattgcgggtggactctatcaggcagttttccagcgtctggtggcaggaggccagaatttccggacgcggcatagatttatgtgctgggggcgtagtcagccagtgcacttgcccacgctgcgcaaaattgagtgacgcatccctctcaattgcgatctcagtgcctttatccggcgctttggagaacgacagggcaatctgaccaatgttgtagttcagagagcaggtaacagtgatttgctcaccagcagcattagtaaacgagtgaagtaggctgccggaaccgttatcaacaacagacttaatacgggtaacgtagatgttagtgcgaccttttcggattggtacattctggccttcgaagtcttccatcttgaaggttgcggttttgctggtgccatcggagcttgccaccagcacatagcggcgacgt

SEQ ID NO: 5747 - DNA, 461 bp, Homo sapiens
  SIMILAR (1)..(105): 1001254mologous to Mus musculus putative,accession number AK009320,Smith-Waterman Score=171.
ctctcttccatccttgccaagacagccagcaacatcattgatgtgtctgctgcagactcacagggcatggagcagcatgagtacatggaccgtgccaggcagtacagacatacagggcatcacactgaaaaggagctgtgatctgagggtcaggagtgtgggcctgggtaccagcactgccactgacttgcctctctctcagccttagttgccccttcactgaagacctttccagctttggtgatctacgattctatcacagcaagcaacaggaagacagagcatcatgctaggcacataagaagcttttaaaatactggttaaattgagatcaccacaccaggggaatagtgtccaagtcatgctccagctcctttcccctcttagggatcttggactagaaaaggccaaactttgtttatttcttaaaacttgaatctgagttcacagaaaaaaaaaaa

SEQ ID NO: 5748 - DNA, 904 bp, Homo sapiens
  SIMILAR (168)..(629): 431254mologous to Mus musculus putative,accession number AK009320,Smith-Waterman Score=158.
gggggtgggggcgggtggttgcctgcgggaggccgccgcgggtcatgtgaccggaagggctcctcacggacgccgtccctcctcggcgcggcctgagcgcccggcccgaccccggccatggggtgctgctacagcagcgaggaacgaggactcggaccaggaccgcagaggagcggaagctgtctgtctggaccctagtcagcccccccctaccaaagctctcaatggagccgagcccaactaccacagcctgccttccgctcgcactgatgagcaggccctgctcttcttccatccttgccaagacagccagcaacatcattgatgtgtctgcttgcagactcacaggggcatggtgcagcatcgagtacatgggaccgcgccaggggagtacagcacccgctttgggtgttgcttgagcagcagccttgacccatttggaagaagcttgccaccgctgccgtctctttaccagccagccccaccaagtgctggccagttgagcccattcccgttctctgatttttgcagcaggtcttcaaggatagcctggttatgcctacagttgcacttttttcagatccgtggtggacgcaaaagaggagttggttgtaaagtttggggatcccatgaagagagggggtccttggacagctcttctcctctcttcatcccatctctaccccacccccttggccccccagccttcacttgcggcttatacagtaccctaacctgcttactaatcacagagaaaaatgtgaagaaggaggaagaagaggaaggctagaaagctgaggcaagttagggtagaaaccttttgggactgggctttgaagttcttgccaggataagtgttggggccaaaagaaagaagctcgtatgtcttcgtatgattgggaaa

SEQ ID NO: 5749 - DNA, 382 bp, Homo sapiens
  misc_feature (1)...(382): n = a,t,c or g
cgaccataaatcccaaactcttgaaaaaccacgccaggggcaccccagaagtcccgaatcaaaaacaccactggtctcccaaacaaaaaccccttttaactaaaaaccccaaaaataacttacccaggtggcctgtgcccataatccccccttttccagaggaaaaaccccgaaaatttccttaaaccccgaaaaggagaatcccctaaaccaaaattgggcccctgccctccaacccggggtaccccaccaaacccccttttnnnnnnnnnnnnnnnnnnnnnnnnnnnnnnnnnnnnnnnnnnnnnnnnnnnnnnnnnnnnnnnnnnnnnnnnnnnnnnnnnnnnnnnnnnnnnnnnnnnnnnnnnnnnnnntatgaata

SEQ ID NO: 5750 - DNA, 6294 bp, Homo sapiens
  SIMILAR (1288)..(2796): 901254mologous to Homo sapiens putative p150,accession number U93572,Smith-Waterman Score=2384.
atggcgcgatctcggctcaccgcaacctccgcctcccgggttcaagcgattcttctgcctcatcctcccaacccggtgtcgttccccgcggtaggtggtccccgacgagctgcagccatgggaaacaccaccagcgaccgggtgtccggggagcgccacggcgccaaggctgcacgctccgagggcgcaggcggccatgccccggggaaggagcacaagatcatggtggggagtacggacgaccccagcgtgttcagcctccctgactccaaggtggaagagccaatgattccacgacttgtttactcctcagtagtacttcaaaatgttgcgtggctaaaaaaacgacaacccacagctgccctgaagaccttgctctcaattccaaggactttcaggaagagaacaacttgttttcactctctccctggggacaaagagtttgtatcatggcagcaggatttggaggactccgtaaagcccacacagcaggcccggcccactgttatccgctggtctgaaggaggcaaggaggtcttcatctctgggtccttcaacaattggagcaccaagattccactgattaagaggattaagaaacccactcaaaaccgctcaactacatggaaactgaacaacctgctcctgaatgactactgggtacttaacaaaatgaaggcagaaataaagatgttctttgaaaccaacgagaacaaagacacaacataccagaatctctgggacacattcaaagcagtgtgtagagggaaatttatagcactaaatgcccacaagagaaagcaggaaagatccaaaattgacaccctaacatcacaattaaaagaactagaaaagcaagagcaaacacattcaaaagctagcagaaggcaagaaataactaaaatcagagcagaactgaaggaaattgagacacaaaaaacccttcaaaaaattaatgaatccaggagctggttttttgaaaagatcaacaaaatcgatagactgctagcaagactagtaaagaagaaaagagagaggaatcaaatagatgcaataaaaaatgataaaggggatatcaccaccaatcccacagaaatacaaactaccatcagagaatactacaaacacctctatgcaaataaactagaaaatctagaagaaatggataaattcctcaacacatacaccctcccaagactaaaccaggaagaagttgaatctctgaatagaccaataacaggatctgaaattgtggcaataatcaatagcttaccaaccaaaaaaagtccaggaccagatggattcacagccgaattctaccagaggtacaaggaggaactgcatataaacagagccaaagacaaaaaccacatgattatctcaatagatgcagaaaaagcctttgacaaaattcaacaacccttcatgctaaaaactctcaataaattaggtattgatgggacgtatctcaaaataataagagctatctatgacaaacccacagccaatatcatactgaatgggcaaaaactggaagtattccctttgaaaactggcacaagacagggatgtcctctctcaccactgctattcaacatagtgttggaagttctggccagggcaattaggcaggagaaggaaataaagggtattcaattaggaaaagaggaagtcaaattgtccctgtttgcacatgacatgattgtatatctagaaaaccccattgtctcagcccaaaatctccttaagctgataagcaacttcagcaaagtcttaggatacaaaatcaatgtacaaaaatcacaagcattcttatacaccaataacagacaaacagagacccaaatcatgagtgaactcccattcacaattgcttcaaagagaataaaatacctaggaatccaacttacaagggatgtgaaggacctcttcaaggagaactacaaaccattgctcaaggaaataaaagaggatacaaacaaatggaagaacattccatgctcatgggtaggaagaatcaatatcgtgaaaatggccatactgcccaaggtaatttatagattcaatgtcatccccatcaagctaccaatggctttcttcacagaattgggaaaaactactttaaagttcacatggaaccaaaaaagagcctgcattgccaagtcaatcttaagcaaaaagaacaaagccagaggcgtcacgctacctgacttcaaactatactacaaggctacagtaaccaaaacagaatggtactggtaccaaaacagacatatagatcaatggaacagaacagagccctcagaaataatgccgcatatctacaaccatctgatctttgacaaacctgagaaaaacaagaaatggggaaaggattccctatttaataaatggtgctgggaaaactggctagccatatgtacaaagctgaaactggatcccttccttacaccttatacaaaagttaactcaagatggattaaagacttacatgttagacctaaaaccataaaaaacctagaagaaaacctaggcaataccattcaggacataggcatgggcaaggacttcatgtctaaaacaccaaaagccatggcaacaaaagccaaaattgacaaatgggatttaattaagctaaagagcttctgcacagcaaaagaaactaccatcagagtgaacaggaaacctacagaatgggagaaaatttttgcaaactactcatctgacaaagggctaatatccagaatctacaatgaactcaaacaaatttacaagaaaaaaacaaccccatcaaaaagcgtcagagccagcgtcccgggaaacgcccgggtccgcgacttcccaaaggaagcagaacgccccgtggactctagtgatggctctttccgttcttggctccgccttcacccgactttctacgccgcttgggctcccctagctcaactcggcttcggtcgagcaaggtcaagcatcaccgcttgccttgtggcccgccgtgatcgtatagtggttagtactctgcgttgtggccgcagcaacctcggttcgaatccgagtcacggcaaagttgctcgtctgggtagtcagctgatccgttttgctccccgcaaccaggcgcgtcaggatcagcccttaattcaaataagagcagttggaacgacaaaaggtgttcagttgtacccttggaatccacagaaatcctgggtagggaagctcgagtaccaccaactggaaagacagggatgcctagtagctgattcggggcccattgtcgtaggctttgtccactttgcaaactggagacagggactcgactcaccttctccagccactggaggaccgggaggaccttcagaggaggtgaggtcgacttcatggaggggcgagaggatcctcggtgagcgaacccagccttctacctggctggccctggtcaacaggctcagaagaggccgatttggaggacagaacagaaggaaagacctaaaggtagaaactcatgatgtcgagatgttaaaagcctcaaatcctaagtcagcggaggcgagggatgcggctaaacaccttacaatccaccgaagggcccctcccccaccccgtaatacccattccgcggaggtggagaaactcgcgtgtagatcaatgcccacgcacttggccgatgggaaatcacgaattggtgaccagttcgatcttggccctgaggaaaaaactcaaacgtcagcgggaacccttggagctttgcccagagcatacggaagggtggcgttgcagtatagcctaagatgggaaaatggcagtgcgcggctctggcccggtgacccgctactgtctctccatgcgctgccgcttcacaaaggcgcatctctaggtcggtggtcaggttctgcccggacgctgcaactggctccgggacttgtgtccttgaatttagcgctttcaccgccgcagctcgggttggattaccagtcagggaattgttttgcactgactgccttcccgcaggaatcttcctttacgcccgctagatgccagccctcctggaactgcacccaagaagcccaccgtctttgccgcctctgccgtcccggaggcgccgatcgggctgagctgcgaataactaagagagaggccaaggcaagtcgtggcgtttgtgcgtgccacaaattatcagctgacaggggacggtcagtggagcctcctcacctccgttcgcgggtaacgtgcttcttaggccttcagaagaagcgactggaggcgatgcccgcgaggttggaagtgggactgagcggtaaagggaggcgatgtttgctgacccaacaaagacagcacgtggagcaggcacaaatggaaaactgtggccgctctcgaacagacagatgtgagctctctgtcttttacacgctgaatttggctattggcaaaaaagccctgacccagagcttgggtctccttccgacctgcacacgactccccgactcccgcctccaagcgcggctcttggctcgctggcgggcagcgtccacagagtgtggaaccgccgcagccgcagctcccgcccgctggcgggcagacactagcaggagaaaggacacaaggcctgcgtggtgggaaagcatgggagacctcgctttcccaccggacgagaaggtctccctgcagtctttggacaccagatggatggaggcaccccttctaggaacaaggcggctgctcctgaggcctggcttcgcacagtggctcctgggtcccgcgcgccctctcccttcccgcggtagcaagagctgctttacacatctcagccggcttcctctttctccccagctgtccttgggacagcaaggcccccagccccgggtccagggggctggttcagggcccaggactcctcgctcctcctggagggcctgggtcgcgtggcctaggagctggccacatgggcatctccagcactgctcctcagggaacgggaggcattatcctgcaggacccactcttacccatgagagacaccgggaaatgctcctgcggaagctggagctctgcgcgcttgaccacttcggggtgaagcttccgtccgcccatccttccttcgaggggccttggggagaggagaaatgctccaggacgatgccctttgcagtgtctcaaccgagaccagaggaaaggaggtcttacaggagcacctttcactcattagaggaacagcaagttggcttggctcttgacataggtagtgagtactccattgtgaaggtgataaagctccagttagcatcccaggccagtgtcacccttgtctacctctcagtggaagatgtgacccaggtttcactgaatttatctccattttctgtgtcttctaagttggcttgttttagctcatctgtccatcatcttgctggacctcagtgtgatcaagtgaaaaaggacgatcgagaggcaacatgtcccagtttttcctacttcttcaagctcagcagggagctgttggaagtggaagagcctgaagtcttgcaggactcactggatagatattattcgactcctaccagttatcttgaactgcctgactcatgccagccctacagaagtacttttactcattggaggaacagcatgttggcttggctcttgatggggacagattggacagtggattgttgcatgaataggggaatagacttaatgtgtctgtccctgtctgactttgttgcagacattgaaaaaaatcaagaagaagaagaagaccaagacccacaatgccccaggctgagcccggatctgccagaggtggaggaacaggacgtcccacaggactccctggatgaagtttacttgactccttcactcccccatgacctgtctgactgccagcaaccttacaacagcacgttgtactcattggaggatcagctcacctgctttgctctcgatgtagcctgtgctggcctaactgatgaagaaagcacagtggttctcatccccatgatctccagcaaacccctccttctcttgtcccacctgatgagaaacgcccacaggtgtggaggggcaggccaccccttcaagtctgatacactgtgctctcaggaagatgaagaacagatacacggaaggcattttaaggaaaacttagagaaaccttgctcccacccaggtggcctgtcctcacgggccttggagtggagacttgagccaccacctgtcagaggtggaggcttcacaggcacagctggagccaagaaccctggtgcccagttgtctgtgactgcaactggatcaagggtttga

SEQ ID NO: 5751 - DNA, 687 bp, Homo sapiens
  SIMILAR (282)..(617): 751254mologous to Homo sapiens PRO2550,accession number AF130089,Smith-Waterman Score=437.
taggtggaacacttgatatttaaataggagttgaaaagggtgaaaagagtatcagagacctcatttttttcctttgcaataagctgaagaaactttctttttcaggagagatggcaaaggtatatgctgttgccagagtcctgtggtataagcatctgtttttattatagtatgtcaaagttagggaaatgggactggcaagtaaaaaatggaatttaatttcaatgttttatgggaactctgatttaatgggaagcaaactagttcatattagcaggaattattttattttttcgagacagagtttcactctcgttggccaggctggagtgcaatggcgtgatctcggctcaccgcaacctctgcttcccgggttcaagcgattctcctgcctcagcctcccaagtagctgggattacaggcatacaccaccacacccagctaattttgtatttttagtagagacggggtttctccatgttggtcaggctggtctcgaactcccaacctcgggtgatctgcccgcctcggcctcccaaagtcctgggattacaggtgtgagccactgcacctggccgatcccgtcccatctcttaaaaaaaaaaatcaaaaagataaacatacatttgtaatggctggctatctggagacagagggccagagcagatgactgactgaggtcctttc

SEQ ID NO: 5752 - DNA, 413 bp, Homo sapiens
  SIMILAR (99)..(323): 981254mologous to Sus scrofa skeletal alpha actin,accession number U16368,Smith-Waterman Score=385.
agaccttcaacgtgcccgccatgtacgtggccatccaggccgtgctgtccctctacgcctccggcaggaccaccggcatcgtgctggactccggcgacggcgtcaccacgatgtaccctgggatcgctgaccgcatgcagaaagagatcaccgcgctggcacccagcaccatgaagatcaagatcatcgccccgccggagcgcaaatactcggtgtggatcggcggctccatcctggcctcgctgtccaccttccagcagatgtggatcaccaagcaggagtacgacgaggccggcccttccatcgtccaccgcaaatgcttctagacacactccacctccagcacgcgacttctcaggacgacgaatcttctcaatgggggggcggctgagctccagccaccccgcagtccg

SEQ ID NO: 5753 - DNA, 413 bp, Homo sapiens
  SIMILAR (2)..(169): 1001254mologous to Anopheles gambiae actin 1D,accession number U02964,Smith-Waterman Score=294.
  misc_feature (1)...(413): n = a,t,c or g
cctggcacccagcacaatgaagatcaagatcattgctcctcctgagcgcaagtactccgtgtggatcggcggctccatcctggcctcgctgtccaccttccagcagatgtggatcagcaagcaggagtatgacgagtccggcccctccatcgtccaccgcaaatgcttctaggcggactatgacttagttgcgttacaccctttcttgacaaaacctaacttgcgcagaaaacaagatgagattggcatggctttatttggtttttttggtatgctttgggnnnnnnnnnnnnnnnggcctgggctcgggattaaaaaccgggaccgggggagggaccacctgccggggggaccgggcttcccccaaggttcaaaagggggccgggggcttagtgggccattgggtgtttttt

SEQ ID NO: 5754 - DNA, 1715 bp, Homo sapiens
  SIMILAR (104)..(1105): 851254mologous to Bos taurus alpha skeletal actin precursor,accession number U02285,Smith-Waterman Score=1415.
  misc_feature (1)...(1715): n = a,t,c or g
accgcagcggacagcgccaagtgaagcctcgcttccctcccgcggcgaccagggcccgagccgagagtagcagttgtagctacccgcccagaaactagacacaatgtgcgacgaagacgagaccaccgccctcgtgtgcgacaatggctccggcctggtgaaagccggcttcgccggggatgacgcccctagggccgtgttcccgtccatcgtgggccgcccccgacaccagggcgtcatggtcggtatgggtcagaaagattcctacgtgggcgacgaggctcagagcaagagaggtatcctgaccctgaagtaccctatcgagcacggcatcatcaccaactgggatgacatggagaagatctggcaccacaccttctacaacgagcttcgcgtggctcccgaggagcaccccaccctgctcaccgaggcccccctcaatcccaaggccaaccgcgagaagatgacccagatcatgtttgagaccttcaacgtgcccgccatgtacgtggccatccaggccgtgctgtccctctacgcctccggaaggaccaccggcatcgtgctggactccggcgacggcgtcacccacaacgtgcccatttatgagggctacgcgctgccgcacgccatcatgcgcctggacctggcgggccgcgatctcaccgactacctgatgaagatcctcactgagcgtggctactccttcgtgaccacagctgagcgcgagatcgtgcgcgacatcaaggagaagctgtgctacgtggccctggacttcgagaacgagatggcgacgggccgccatccatccatcctcccatggaaaagagctacgagctgccagacggggcaggtcatcaccatcggcaacgagcgcttccgctgcccggagacgttcttccagccctccttcatcggtatggaagtcggcgggcatttcacgagaccaccttacaacagcatcatgaagtgtgacatcgacattcaggaaggaccctgtatgccaaccaacgtcatgttcggggggcacccacgattgtacccctgggaattcgctgacccgcatgcaagaaagagattcaccggcgctggcaccccaggcacccatgaagaatccaaagataaggattcattcgccccccgccggagcggcaaaatactcgggttgttggatccggcgggcttccattccctgggccctcgctgtcccacctttccagccagatgttggatcacccaaggcagggagtaccgaccgagggccgggccctttccattcgtccaaccgcaaatgcttctagacacacttccaccttccagcacggcgactttctcaggaccgacggaatcttctcacatgggggggcggctgagctccagccacccccgcagtcactttctttgttaacaacttcccgttgctgccatccgtaaacttgacacagtgtttataaccgtgtacatacattaactttattacctccattttgttatttttcggaaacaaagccctgtgggaagaaaatggaaactttgaagaagcattaaagtcattctggttaagctgcnnnnnnnnnnnnnngggggggctttttaagggagccaattttagtacccgcgggcgggcaacaaaaaattttttatagggggcccataaaataaattactgggcccggtttaaaacaccctggataggagaaaaccctgtcttcccc

SEQ ID NO: 5755 - DNA, 614 bp, Homo sapiens
  SIMILAR (66)..(290): 611254mologous to Homo sapiens ER-60 protease,accession number D83485,Smith-Waterman Score=225.
ttacgcccctggtgtgtcaccttagaacctgagcccagtatcacactttgcgagcagctcgtctagaccccaacttcgccatagcctagatggaggccaaagccactgacggtcctcctccatttgaagccggggttttcctaccatatactttctctccagccaacaaccgcctacatccacggacatctgaaggtggccgtgacttaagcgactttatcagctatctacacgtagaagctacaaacccccctgtaattcaagaagtataacccaagaagaagcaagaaggcacaggaggatctctaaagcagtagccaaacaccacttcgtaaaaggactcttccatcagagatgggacaaccattggggaggactaggacccatatgggaattattacctctcagggccgagaggacagaatggatataatctgaatcctgttaaatttcttagctgcactgtttatggaaataccaggaccagtttatgtttgtggttttgggaaaaattatttgtgttgggggaaatgttgtgggggtggggttgagttggggatattttctaattttttttgtacatttggaacagtgacaataaatgagaccccttt

SEQ ID NO: 5756 - DNA, 979 bp, Homo sapiens
  SIMILAR (2)..(394): 841254mologous to Homo sapiens ER-60 protease,accession number D83485,Smith-Waterman Score=557.
tgctatcagaactgctaaaggagagaagtttgtcatgcaggaggagttctcgcgtgatgggaaggctctggagaggttcctgcaggattactttgatggcaatctgaagagatacctgaagtctgaacctatcccagagagcaatgatgggcctgtgaaggtagtggtagcagagaattttgatgaaatagtgaataatgaaaataaagatgtgctgattgaattttatgccccttggtgtggtcattgtaagaacctggagcccaagtataaagaacttggcgagaagctcagccaaagacccaaatatcgtcatagcccaagatggatgccacagccaattaatgtgcattctccatatgaagtcagaggtttttccttcccatatacttctctccaagccaaacaagaagctaaatcctaaagaaatatgaaggtggccgtgaattaaggtgatttttattggctatctaccaaagagaagctaccaaacccccccctgtaattcaagtatagtttatacccaagtatagaagaagaaggcaccaggaggatctcctaaagccagtagcccaaacacccactttgtaaaaggactccttcccatcagagatgggaaaacccattggggaggacctaggaccccatatgggaattattacctctcagggccgagaggacagaatggatataatcctgaatcctgttaaattttctctaaactgtttcttagctgcgactgtttatgggaaatacccaggacccagtttatgtttgtggttttggggaaaaattatttgtgttgggggggaaatgttgtgggggtggggttgagtttgggggtatttttctaatttctttttgtacatttggaacagtgacaataaatgaggacccctttaaaaaaaaaaaaaaaaaaaaaaaaaaaaaaaaaaaaaaaaaaaagggccggccgctttaaaagggatcccaagcttac

SEQ ID NO: 5757 - DNA, 558 bp, Homo sapiens
  SIMILAR (371)..(237): 1001254mologous to Homo sapiens PRO1828,accession number AF116669,Smith-Waterman Score=237.
tatgataaaccacatgtgctagtggatatacttgtggatgatagcggtaaagagtccttgattggttatagaccaacagaagattatgatctcagaaattgtatcttagttggtatcaaccaaatggagtgacttagtgtacatgaaagcgtaaagaggatgtgtggcattttcacttttggcttgtaaagtacagacttttttttttttttaaacaaaaaaagcattgtaacttatgaacctttacatccagataggttaccagtaacggaacagtatccagtactcctggttcctaggtgagcaggtgatgccccagggacctttgtagccacttcactttttttcttttctctgccttggtatagcatatgtttttgtaagtttatgcatacagtaattttaagtaatttcagaagaaattctgcaagcttttcaaaattggacttaaaatctaattcaaactaatagaattaatggaatatgtaaatagaaacgtgtatattttttatgaaacattacagttagagatttttaaataaagaattttaaaactca

SEQ ID NO: 5758 - DNA, 115 bp, Homo sapiens
  misc_feature (1)...(115): n = a,t,c or g
tttttnnnnnnnnnnnnnnnngtctgtcctttccaagccaaaagtgaaaatgccacacatcctctttacgctttcatgtacagtaagtcactccatttggttgataccaataatg

SEQ ID NO: 5759 - DNA, 2161 bp, Homo sapiens
  SIMILAR (76)..(1182): 991254mologous to Homo sapiens interferon-gamma receptor,accession number J03143,Smith-Waterman Score=1919.
ggccggggctggagggcagtgctgggctggtcccgcaggcgctcggggttggagccagcgaccgtcggtagcagcatggctctcctctttctcctaccccttgtcatgcatggtgtgagcagggctgagatgggcaccgcggatctggggccgtcctcagtgcctacaccaactaatgttacaattgaatcctataacatgaaccctatcgtatattgggagtaccagatcatgccacaggtccctgtttttaccgtagaggtaaagaactatggtgttaagaattcagaatggattgatgcctgcatcaatatttctcatcattattgtaatatttctgatcatgttggtgatccatcaaattctctttgggtcagagttaaagccagggttggacaaaaagaatctgcctatgcaaagtcagaagaatttgctgtatgccgagatggaaaaattggaccacctaaactggatatcagaaaggaggagaagcaaatcatgattgacatatttcacccttcagtttttgtaaatggagacgagcaggaagtcgattatgatcccgaaactacctgttacattagggtgtacaatgtgtatgtgagaatgaacggaagtgagatccagtataaaatactcacgcagaaggaagatgattgtgacgagattcagtgccagttagcgattccagtatcctcactgaattctcagtactgtgtttcagcagaaggagtcttacatgtgtggggtgttacaactgaaaagtcaaaagaagtttgtattaccattttcaatagcagtataaaaggttctctttggattccagttgttgctgctttactactctttctagtgcttagcctggtattcatctgtttttatattaagaaaattaatccattgaaggaaaaaagcataatattacccaagtccttgatctctgtggtaagaagtgctactttagagacaaaacctgaatcaaaatatgtatcactcatcacgtcataccagccattttccttagaaaaggaggtggtctgtgaagagccgttgtctccagcaacagttccaggcatgcataccgaagacaatccaggaaaagtggaacatacagaagaactttctagtataacagaagtggtgactactgaagaaaatattcctgacgtggtcccgggcagccaatctgactccaatagagagagagagttcttcacctttaagtagtaaccagtctgaacctggcagcatcgctttaaactcgtatcactccagaaattgttctgagagtgatcactccagaaatggttttgatactgattccagctgtctggaatcacatagctccttatctgactcagaatttcccccaaataataaaggtgaaataaaaacagaaggacaagagctcataaccgtaataaaaagccccccaccctccttttgtttatgataaacccacatgtgctagtggatctacttgtgggatgatagcggtaaagagtcccttgattggttatagaccaacaggaagattcccaaagaaattttcatgagatcagcttaagttgcacccaactttgaagtcttgattttccctggacagttttctgcttttaattttcatgaaaagattatggatctcaggaaattgtatccttagttgggatccaccccaattgggagtgacttaggtgtacatgaaaagcgtaaagaggatgtttgggcattttcaacttttgggcttgtaaaagtaccagacttcttttttttttattaaacaaaaaaagccattgtaaccttatgaaccctttaacatcccagataggttacccagtaacgggaacagtatcccagtactcctggttccctaggtgaagccaggtgatgccccagtggtacctttgtagcccacttcactttttttccttttcctctgcccttggtatagccatatgtgttttgtaagtttatggcatacagtaattttaagtaatttcagaaagaaattctgcaaagcttttcaaaatttggctttaaaatctaattccaaactaatagaatttaatggaatatgtaaatagaaacggtgtatatttttttatgaaaccattacagttaggagattttttaaataaagaattttaaaactcgaaaaaaa

SEQ ID NO: 5760 - DNA, 466 bp, Homo sapiens
  SIMILAR (200)..(418): 951254mologous to Homo sapiens transducin-like enhancer protein,accession number M99435,Smith-Waterman Score=382.
  misc_feature (1)...(466): n = a,t,c or g
gagtgtagnnnaaatcgatatcgttgacaatgcggnggaannctgagaaactggcaagggaaangaccgnntgcagaggcactatgtgatgtattatgaaatgtcatatggattaaacattgaaatgcacaaacagactgaaatcgccaagagattgaatacgatttgtgcacaagtcatcccatttctgtctcaggaacagcagcagttgcaagctcagcatctttctcatggccacggacccccagttccccttacgcctcacccttcgggacttcagcctcctggaatcccgcccctcgggggcagtgccggccttcttgcgctgtctagtgctctgagtgggcagtctcacttggcaataaaagatgacaagaagcaccacgatgcagagcaccacagaggtgagaggccgggcaagccagattaggactttgtcctcatactcttacagtgctgcaaagtc

SEQ ID NO: 5761 - DNA, 654 bp, Homo sapiens
  misc_feature (1)...(654): n = a,t,c or g
ttttttctttaaaagcaatttatttctgattacaaaatacaggtgaggagcatgggcgatgcctgtaaccccttggttgtgcatcttcccagtctatttctgcttctagaaataccctgtgtacaacagcaagctcatgctgtccccaagtgcttgcacattctaacagctgcagagtatatgaccaggtggaaagtccaacagatgccccactcacaagatagggccctccaatcagtcttttgtgctccttttcactcatagtaactggttgctcttcctactggtcatagataaatgacacctgcacaattctccgagtgctttcaagcaacttcgggaggcagtgactaagaccctttccttgctcccagcttcctatgtcccagggctgcctgtggcacctggactgctgctgcccctgggtcccgtacattccagggcaacaatggaggaagggcaggcaacgcatgaggaattaacagtctttattgggctcagaccaggagtccgtgggtcttgaggcaatttttctcctcacgttcttctcggcctgttccgtagcctcatgagctgtttcttcttccggtagtgatcctggctttctctttcctcttctccttcagnggtgcnntgcactgcctgtacttncca

SEQ ID NO: 5762 - DNA, 1671 bp, Homo sapiens
  SIMILAR (164)..(823): 991254mologous to Homo sapiens transcription factor RTEF- 1,accession number U63824,Smith-Waterman Score=1142.
ggcgggagggccgcagctccggcgccgcgccgtcccgccagaacgatcgccgcggccggaagagttggcgctcggggcggactccttggaactggcttagcgcacccatcccaccttcccgcaccctgggaccggtccaacgagcgctcctccaagcggagccttggagggcacggccggcaccattacctccaacgagtggagctctcccacctcccctgaggggagcaccgcctctgggggcagtcaggcactggacaagcccatcgacaatgacggagagggcgtgtggagcccggatattgagcagagtttccaggaggccctcgccatctacccgccctgtggcaggcgcaaaatcatcctgtcggacgagggcaagatgtatggtcgaaacgagctgattgcccgctacatcaagctccggacagggaagacccgcaccaggaagcaggtctccagccacatccaggtgctggctcgtcgcaaagctcgcgagatccaggccaagctaaaggaccaggcagctaaggacaaggccctgcagagcatggctgccatgtcgtctgcacagatcatctccgccacggccttccacagtagcatgcgcctcgcccggggccccggccgcccagcagtctcagggttttggcaaggagctttgccaggccaagccgaaacgtcccatgatgtgaagcctttctctcagcaaacctatgctgtccagcctccgctgcctctgccagggtttgagtctcctgcagggcccgccccatcgccctctgcgcccccggcacccccatggcagggccgcaggcgtggccagctccaagctctggatgttggagttctctgccttcctggagcagcagcaggacccggacacgtacaacaagcacctgttcgtgcacattggccagtccagcccaagctacctgcgcccctacctcgaagccgtggacatccgccaaatctatgacaaattcccggagaaaaagggtggactcaaggatctcttcgaacggggaccctccaatgccttttttcttgtgaagttctgggcagacctcaacaccaacatcgaggatgaaggcagctccttctatggggtctccagccagtatgagagccccgagaacatgatcatcacctgctccacgaaggtctgctctttcggcaagcaggtggtggagaaagttgagacagagtatgctcgctatgagaatggacactactcttaccgcatccaccggtccccgctctgtgagtacatgatcaacttcatccacaagctcaagcacctccctgagaagtacatgatgaacagcgtgctggagaacttcaccatcctgcaggtggtcaccaacagagacacacaggagaccttgctgtgcattgcctatgtctttgaggtgtcagccagtgagcacggggctcagcaccacatctacaggctggtgaaagaatgagagactcggggagcagggaggggggaagagacgtgtgtgcaggaaacggggacgtggggaggggacctgcaggggccagccccctgaagtgccaagagagctgagaggagcagttgtgactctacccaggaacaaactgtgcctgaacctgaggtgcccaaccccaaataaacccaagatgctgtgtattttcagaggaaaa

SEQ ID NO: 5763 - DNA, 2502 bp, Homo sapiens
  SIMILAR (310)..(918): 991254mologous to Homo sapiens transcription factor,accession number X94438,Smith-Waterman Score=1059.
atgcccgctgctgcctgcagacaggacaagaagtctggacgcttctactcgtttacagaggcggagggcacggtggcagtcacacagggcaaggccgagggccgggcagctccctggagcctcccaagtgtgaagaaggcccaggagaaagtgtggggagaggagaggaggccgccagcgctgggtcggaacgagctgattgcccgctacatcaagctccggacagggaagacccgcaccaggaagcaggtgggcctcaagagacgggtaggggtcccgggggtggtaccccagcaccagtctgctcccaaggtctccagccacatccaggtgctggctcgtcgcaaagctcgcgagatccaggccaagctaaaggaccaggcagctaaggacaaggccctgcagagcatggctgccatgtcgtctgcacagatcatctccgccacggccttccacagtagcatggccctcgcccggggccccggccgcccagcagtctcagggttttggcaaggagctttgccaggccaagccggaacgtcccatgatgtgaagcctttctctcagcaaacctatgctgtccagcctccgctgcctctgccagggtttgagtctcctgcagggcccgccccatcgccctctgcgcccccggcacccccatggcagggccgcagcgtggccagctccaagctctggatgttggagttctctgccttcctggagcagcagcaggacccggacacgtacaacaagcacctgttcgtgcacattggccagtccagcccaagctacagcgacccctacctcgaagccgtggacatccgccaaatctatgacaaattcccggagaaaaagggtggactcaaggatctcttcgaacggggaccctccaatgccttttttcttgtgaagttctgggtcagaggccgggaaggcactagtcagaggcagaaggcaggcccaggactggaagccaaaacccaggcataccaactcatcccacctcagaaaccacctccagcagagccagaaagaaccttggcagtgggtcacccaacctgccgctttgtaggtgaggaaaatggcctgaagaagccaatcgacttgcccaagttcccacagcagttacagtccaggaaagcttcctggaggaggaaatacctgagtcaccccagggaaaaggacagctgcaggtcagaagggcacgcgcacataatgagagactgggtctctgaactaagagttaccaggcgaccggggaagacggcggaggtgcaggtcctgttgctttaatgttcgaggcccatctcctgggcccgcctggccggccatcggggctaaacaaggtactgctgggccggaaaggtgggtgttcgtacgctgtgaaggcatcaacatttctggcaattttctacagaaacatgttgcatgttaaagcacctggccttcctccacaagcggatgaacaccaacccttcccgaggccccttaccacttccgggcccccagccgcatcttctggcggaccgtgcgaggtatgctgccccacaaaaccaagcgaggccaggccgctctggaccgtctcaaggtgtttgacggcttcccacccccctttcaacaagaaaaagcgggatggtggtttcctgctgccctcaaggttgtgcgtctgaagcctacaagaaagtttgccctatctggggccccctgcctcacgaggttggctggaagtaccaggcaagtgaccagcacccctgaaggagaagaggaaaagagaaagccaaagatccactaccgggaagaaagaaccagctcattgaggctacggaaacaggccgagaaagaacgtggagaagaaaattgaccaattaccaccagaggtccttcaagaccccacgggacttctgggtctgagcccaattaaagactgttaaattccctcatgcttggcctggcctgcccttcctccattgttgcccctggaatgtacgggaccccaggggcagcagcaagtccccaggtgccacagggcagccctgggacataggaagctgggagcaaggaaagggtcttagtcactgcccctccgaagttgcttgaaagcactcggagaattgtgcaggtgtcatttatctatgaccaattaggaagagcaacccagttactatgagtgaaaaggagccaaaaaacctgattggagggccctatcttgtgagtggggcatctgtttggactttccacctggtcatatactctgcagctgttagaatgtgcaagcacttggggacagcatgagcttgctgttgtacacagggtatttctagaagcagaaatagactgggaaagatgcacaaccaaggggttacaggcatcgcccatgctcctcacctgtattttgtaatcagaaataaattgcttttaaagaaaaaaaaaaaaaaaaaaaaagggcggccgctctagagtatccctcgaggggcccaagcttacgcgtacccagctttcttg

SEQ ID NO: 5764 - DNA, 1047 bp, Homo sapiens
  SIMILAR (634)..(1041): 711254mologous to multiple sclerosis associated retrovirus polyprotein,accession number AF009668,Smith-Waterman Score=520.
cctactgagcatgtcacacttagagccttcagcgggggagctgaacctgatgaaccagtaaggtacagatttggacttaaaacataagattgttttattagacactcccgccatgtaaattctttcattacgtttgggctgtaaggtgcccaagctagtaccaatcaccaagaggcaaactgcagcaggccaggtatctttcactcaggaggaactaactctggacacatcctgggggcttgtctgggattttgccacatggtgagtaccatcggaccactttcactgctattctgtcctatttttccttagaattcaggggctaaacacgctgtagggggaggagaatttggcccaactcgggtacatgtccccttctccctctctgatttaaagcagatcaaggtagacatggggaagttttcagatgatcctgataggtatttagatgtcctacagggtctagggcaaaccttaaaaaagactgtccaacaagaaacaagccacatcctcgtccatgtccgctatgacaaggcaatcactggaaggtgcactgccccagagaacaaaggttctctgagccagaagcccccaaccagatgatccaacaacaggacggacaaccccacatcagtggcatatctaagtaaggaaactgatgtagtagcaaaaggctggcctcactgtttatgggtagttgtggcagtggccatcttagtattagaggctatcaaaataatacaaggaaaggatttcactgtctggacttctcatgatgtaaatggcatactaggtgccaaaggaaattcatggctatcagacaaacgcctgcttagataccaggcactactccttgagggaccagtgcttcaaatacacacgtgtgtggccctcaaccctgctatttttctcccagaggatggagagccaatcaagcatgactaccaacaaattgtagcccagacttatgtcacctgagaggatctcttagaagtccccttagctaatcctgaccttaacctatataccaatggaagttcatttgtg

SEQ ID NO: 5765 - DNA, 1413 bp, Homo sapiens
  SIMILAR (58)..(336): 711254mologous to Homo sapiens putative adhesion molecule= ADMLX,accession number S60088,Smith-Waterman Score=343.
atggagacaccagggaaagcatttaggcaaatagacaggaaaacgtcagcagcatcatggttttcctttccaagaaccagtgtgactgggctgaggggtggaggtgataaaatgaaaggtgctctgggagatccatctgccccaccagtgccagctaacctccggctggccaactccaccgtcaacagtgatgggagtgtgaccgtcactatagtttggggtctccccgaggagccggacatccttgtgcatcactacaatgtcttttggagctggacaatcagcagtaagtctcttgtaccaacaaagaagaagcagagaaagactacggatggggactggcaggcagcaccacctgcgactgggtgcaggatccactgggtgaagccagctgtgctcctgagtctggtgggaacttggagaacctttatgtctagccaagggattgtaaatacaccagtcagcactctgcatctagctcaagtgagaccaagaacccaccaattctggacagattttggtgaccacgaagggaccatcaccaatcgccaagcgagttcagggactaaataccaggcacctgtcggccagttaaaagcgactagcatggccgctggactaaagacacaggtgtcatgctttctgggaaagggctctctaatgacccccggactgttcggcgttgggaccgttggaggacaggcaagggtgcaggttttcaagaatgtgtcagtaagtgctgctaaatccgaccttccctggtcctccatctggtctgggaggaaaactagtgtttctgctgctgcgtcgctgttaggaggaggagaatttggcccaacccggatacatatccccttctccctctctgatttaaagcagatcaaggcaggcctggggagattttcagatgatcctgatagggaccaagaggaacaggcccaaaaggaaaagcgagatcagagaaaggctgcagccttagtcatggccctcagacaaacaaaccttggtggttcagagaggacagaaaatggagcaggccagtcacctgagagagcagggatagctcttggagaccttattcagactcgtgggaaaaccccacaaccagtggcatacctaagtaaggaaatagatgcagtagcaaaagtctggcctcactgtttaaagttagttgctgcagtggccgtctttgtgtcagaggctatcaaaataatacaaggaaaggatctcactgtctggactactcatgaggaacctgtgggatcatcagctcagcagtcccaacatcagccagaccagcctcgatacacctgtaaactgttggaggacttgcacctcctatttcggaaagaaatatcccagacgaaaaaggctcctatcctttttgatcctgtgatcaaaagagaaaagtag

SEQ ID NO: 5766 - DNA, 1686 bp, Homo sapiens
  SIMILAR (1617)..(562): 231254mologous to Leishmania major ppg3,accession number AC084329,Smith-Waterman Score=190.
ctagaaattggatcccttatcgacctgcagcatgctaagtccttgagtaggaacagcagaagtctctggtcctcttacctggtgaggttcccaggcccccagctcagtcctcaagaatggcagttttaccaatatggggctggctggaaaaaacagcagctctgctgccagaaggggcagacttaacttgtggtagggggctttgtgagtgacttcaagaatgaagccgtggaccctagcggtgagtgttacagttcttaaaggcagcgtgtccggagtttgttcctcctgacgtccggatgtgttcggagtttcttccttctggtgggttcgtggtctcactggctcaggagtgaagctgcagacctttcccgtgagtgttacagccacatccttctgattggtccattttacagagagcccagtggtctgttttgacagggcgctgattggtgcgtttacaatccctgagctagacacaaaggttctccacgtccccactagattagctagatacagagtgtccacacaaaggttctccaagtccccaccagagtagagggccgaccctcggtgggcggagggacggagggaagatggctgcagagaccggatattggcgctgcctccccgaatcccggacctgcgctgaggaggcggttcatctgtggccagcggtgcttcgggacccgcgctgggggaaccctggcgacggggcctggccctgctatatgcgggggcctcggctggagtgagcggcgtggacgcctctttcctccggctcttcccttgttgctgcgagagcgagagggccgcgggcggcggaggcagcggggccgggatggaggacgttaactctaacgtgaacgcggaccaggaggtgcggaagctgcaggtgccggtgaagaagctggggaagcagcacgaacagccgaggagccgctcgcgctgtgctgggccccggctccatcgcggttcgccggctcctccactccctcctacggcgcggggtcccctcggggcttccccttgggtctcagcgcaaagtcgggcggcggggccggatggacccgaggcggacgaataacgaggagctgcgagacgccaccttcttgctggcggcgggggagggcggcttgctagacgacctggagcgtctgtcaggctaggaggagggggaggagagctggtgagcgccgggcgccgggcggggctgggcggggacgccccggtggcggaggacgtcccggaggatccctctggtcgggcgcctggctttgtgtagccagccaggtccgctctcggcgggtactcgtggtcttgctctggcagaggggaggtcagttggagttgggggttcgaggcttgcaagtgcagggcttgtagctccttctctggattgtggaccctctgggtgctgggccctattggggttggtgggttggttggatccagaagggctgttcgccgtggggaggagtcggaggtgggaaactgctttgtaggcagggattctgctttgtataggagaccagctttcggatgctggtctgggcattttggatgttggggaggggtttggcttgatgaggtatcaccaagttcggggggtgcagaccaaagtcgccgacgtctatgcagcggttggtgtttgggatcaatttctagcgtggatggggagaccat

SEQ ID NO: 5767 - DNA, 411 bp, Homo sapiens
  SIMILAR (354)..(410): 471254mologous to multiple sclerosis associated retrovirus polyprotein,accession number AF009668,Smith-Waterman Score=51.
ggactaagaggaatggcccaaaaggaaaagcgagatcagagaaaggccacggccttagtcatggccctcagacaaacaaaccttggtggttcagagaggacagaaaatggagcaggccaatcacccggatcccacagaccacatgtcccaacttatgtggacggcttgccccaagggtttagggatagccctcatctgtttggtcaggcactagcccaagatctaggccacttctcaagtccaggcactctggtccttcagtatgtggatgatttacttttggctaccagttcggaagcctcatgccagcaggctactctagctctcttgaactttctagctaatcaagggtacaagcgtctagatcgaaggcccagctttgcctacagcaggtcaaatatctatgcctaa

SEQ ID NO: 5768 - DNA, 565 bp, Homo sapiens
  SIMILAR (13)..(375): 681254mologous to Homo sapiens gag,accession number AF156961,Smith-Waterman Score=412.
aagaaaacaagcaaagaaatctccaaaggaccacaaaaacccccaggttatcggttacgtccccttcaagctgtagggggaggggaatttggcccaacccaggtacatgtccacttctccctctctgatttaaagcagatcaaggtagatctggggaagatttcagatgatcctgataggtatatagatgtcctacagggtttagggcagaccctcgatctctcttggagagatgtcatgctattgttagatcaaaccctggcctttaatgaaaagaatgcggctttagctgcagcccaagagtttggagatacctggtatcttagtgaagtaaatgacagaatgacagctgaagaaagggacaaattccctaccgaggatggggaaccaatcaagtgtgactgccaacaaattatagtccagacttatgccgctcaagatgatatcttagaagtccccttagctaatcctgaccttaacctatataccgatggaagttcatttgtggagaatgggatacgaagggcaggttatgccatagttagtgatgtaaccatacttgaaa

SEQ ID NO: 5769 - DNA, 492 bp, Homo sapiens
  SIMILAR (400)..(2): 641254mologous to Homo sapiens gag,accession number AF156961,Smith-Waterman Score=437.
tggtagggaatttgtccctttctttggctgtcattctatcatttagttgactaagataccaggtatctccaaactcttgggctgcagctaaagctgcattcttttcattaaaggccaaggtttgatgtaacaatagcatgacatctctccaagtaagattaaaggtttgccctagaccctgtaggacatctatgtacctatcaggatcatctgaaaacttccccaggtctgccttgatctgctttaaatcagagagggagaatgggacatgtacccatgttgggccaaattcccctgcccctacagcttgaaggggacataaccgatagcctgggggattttgtggtcctttggagatttctttgcttatttcctttgatgcagcagcagaaacactagttttcctcccagaacacaagaaggaacgaggaaggtcagatttagtggcccttactgatgcattctcaaaaacctgcacccttgcctgtcgtc

SEQ ID NO: 5770 - DNA, 345 bp, Homo sapiens
  SIMILAR (1)..(327): 641254mologous to multiple sclerosis associated retrovirus polyprotein,accession number AF009668,Smith-Waterman Score=332.
tttctctttgcctttgaggatctcacagaccacacatcccaacttacgtggaccatcttgccccaagggtttagggatagccctcatctctttggtcaggcactggctcaagatctaggccacttctcaagtccaggcactctggtccttcagtatgtggatgatttacttttggctaccagttcagaagcctcatgccagcaggctactctagatttcttgagctttctagcaaatcaagggtacgaggcatctaggtcgaaggcccagctttgcctacagcaggatcgaggctatcaagctacagatgatcttacaaatggaaccccaaatgagctcaactaa

SEQ ID NO: 5771 - DNA, 651 bp, Homo sapiens
  SIMILAR (23)..(556): 831254mologous to Homo sapiens transducin-like enhancer protein,accession number M99435,Smith-Waterman Score=722.
tctgtccagagtgctggaattcgaggaattccagttcctgcaggcgcagtatcacagccttaaattggaatgtgagatactggctagtgaaaagacagaaatgcacaggcactatgtgatgtattatgaaatgtcatatggattaaacattgaaatgcacaaacagactgaaatcgccaagagattgaatacgatttgtgcacaagtcatcccatttctgtctcaggaacatcaacaacaggtggcccaggctgttgaacgtgccatacaggtgaccatggcagagttgaatgccatcatcggggtacgtggcctaccaggtctacctcctacacagcagcagttgcaagctcagcatctttctcatggccacggacccccagttccccttacgccttacccttcgggacttcagcctcctgggaatcccgcccctcgggggcaagtgccggccttcttgcgctgaccaagtgctcttgatgggcaatctcacttggcaattaaagatgacaagaagcaccacgatgcatagcaccacagaggtgataggccgggcaagccagattaggactttgtcctcatactcttacagtgctgcaaagttgtgtgcatcgctaaagagagccccaacctatacagagagcaaacaat

SEQ ID NO: 5772 - DNA, 1704 bp, Homo sapiens
  SIMILAR (625)..(26): 681254mologous to Homo sapiens gag,accession number AF156961,Smith-Waterman Score=692.
tttgttcagggccaagggctcgcttttggagctttctcctgatatctcagctgattgggtaataaacatcttttaggatcaattgaccctcgagggagttgggtgacaggggagtatattttcttaaggcctcccatagctgcttgaggaaggcagtaggattttcttcctttccctgagttatggtggacatcattgaataattcatgggctttttcctaattctccttagtccttctggaatacaggtcaacagatgtttgcgactccagttcccatgatctgagtctaggtcccagtggggatccataatggggatggcttgctgcccattagggaatttgtccctttcttcggctgtcattttgtcatttacttgactaagataccaggtatctccaaattctcgggctgcagctaaagctgcattcttttcattaaaggccagggtttgatctaacaatagcatgacatctctccaagtgaggtcgaaggtttgccctggaccctgtaggacatctatatacctaccaggatcatctgaaaactttcccaggtctaccttgatctgctttagaatgccagcaatacaccctgaactcggagaaaacataatctttaccctcaaaaagctcacagtctggtgctcagttgaccaaacatcgtgtttcttttctaccgagttgcaggtctataagttgtccttttaattcccagccacctctggcctctgcttaccatggccctgccttctgacttgctgtttgctcagctccttagtgcatgggaagagcagaaacatcaggggaagagcgctgagatctgctgtgcacctgtgccgcacagcccttcccatgtagacatgtgtagcttttgggtttgccagtggatggaacttatccgcatcaagtagccttcataaatagattatccaccatttccatcactctctggataccctcacatgtttaccaccaaaactcctgcgcagagactggtcctcttttgcaaactgcctttggctcccccgcgaagagtagttttccacttagaaccagccaactctctataaaatttacctccgtgattctaattttgctccctccgccgtgggcaagttggcaatgtctgaatgtctgaagtcatttttgcttgtcacgactggggaggacagcacaagatgtcaacagtgccaaggctgagaaaccctggtttaccttaaccttaaaagaacaattcgaatgcttgggaagggatgtctgccacatctgtactggagagaagcatggcccccagtcaaggacatggagagttccatgtctggatctagaccgtgtccatccacaaagatgcctcctgctcttctccgacatgaaaattggtccaatcaacattttcctttggccagggtagcttaccagcagctcctccataaggtccataattgcaatttctcattctcatttgcctggctggcttcacccttctgtcctctctgcaccttcccacaagtgaccgaatgtttgtgcacgcaggctccattcatgcgcatgcacacacccggcttgtgtccttcttccctctcgtcccttgaacccgtagctcttgattctgcctgtaggagcaatgatgttgtagcaaccatgacaaaagaaacaaaatcagaaggcagatccaggccgctccctgccacctgccctctgt

SEQ ID NO: 5773 - DNA, 1374 bp, Homo sapiens
  SIMILAR (489)..(533): 931254mologous to Homo sapiens unnamed protein product,accession number AX088212,Smith-Waterman Score=80.
atgcagtttttgggccaatttgtgaaaactggtggttattcttggcttctggtcctcagatctgaaatgtctaatactgatggtaaaattgcctatcccacatcctgccacattccccgctgttcggtctttgaatggtcgatgcgtaatgtcacggttctaagctgccaccttgtggccatcccacgggtcagcaatgccttcacagaagagtccaggctgaagcttaagcctgcaggtcagagggccaagcttggagacaggttagacatcccagacagaaggaaaagcagcactattttgggcagggctggggacctgcagcctgccatgcctgagcctcccaccctctccgtgggctcctgtgcggcccaagcctccccaatgaaccctgccccctgctccacggcacccagtcccatcgaccactcaagggctgaggagtgcgggcgcatagcacgggactggcaggcagctccacctgcaggcccctgcgggatccactgggtgaagccagctgggctcctgagtctgctcagggattgtaaatacaccaatcggcactctgtatctagctcaaggtttgcaaacaccaatcagcatcctgcgtctagctcagggtttgtgaatgcaccaatcgacactctgtatctagctaatctagtggggacgtggagaacctttgtggctagctcagggattgtaaacgcaccaatcagcaccctgtcaaaacagaccacttggctctaccaatcagcaggatgtgggaaagagtccacacaggcttctggggcacagacaggagggaccagctttaagagcttagaaacaacaggttccatctctgaagcctcaagtgccaagcactgcactgaactcttctctaggtttactacgtttaatcccgacagtgtcccgtcagatggtgtggtaggagacacagcagggacagtgtggccaggagttctcaaaggggaaccttgtcacctgggaacttgttatagatgcgttcttgatccccatccgacaccttctgaatcagacacgattcaggggatacatgtgcaggtttgttatatgagtacattgcatgatgctgacgtttgtgatacaaatgatcctgtcacccataataccaaaaagtatatatacagcactgagattttcaccagcaacaatccagagctcagatctgaggatgagacagttttcagggccttagagaaatggaaaacctctgagcagacaataggagaaatggatttctacatctgtaatgaccctcaccccgattctgccctgtaccaaaatggtctgtccaaaatgcaagacaccgtgtcactttctgtgttcagcccttcagtggcagcctag

SEQ ID NO: 5774 - DNA, 1002 bp, Homo sapiens
  SIMILAR (397)..(903): 691254mologous to Homo sapiens gag,accession number AF156961,Smith-Waterman Score=630.
atgaaaacaggttataataccacaaaaagatgtaaagataacttcaggttcctgcagctagacaaaatacttgatgtcgtttctaaaggaggacaggcaaaggtgcaggttttcaagaaagcatcagtaagggccactaaatccgaccttcctcggtcctccctgtggtgtaggaggaaaactagtgtttctgctgctgcgtcagtgagcacaactattctgatcaacagggtccagggaccgttgtgggttcttgagcaagaagggtttctgctgctgcgtcgggaaaaatggccacctgagggaggtataaataacaatactatcctgcagcttgacctttgctgtaagagggaaggcaaacggagtgaaataccttatgtccaagctttcttttcattgaagaaggaaataagcaaagaaatctccaagagaccaaaaaaacccccgggctatcagttatgtccccttcaagctgtagggggaggggaatttggcccaacccaggtacatgtccccttctccctctctgatttaaagcagatcaaggtagacctggggaagttttcagatgatcctgataggtacatagatgtcctacagggtctagggcaaacctttgatctcacttggaaagatgtcatgctattgttagatcaaaccctggcctttaatgaaaagaatgctttagctgcagtccgagagtttggagatacctggtatcttagtcaagtaaatgacagaatgacagctgaagaaagggacaaattccctactggtcagcaagccatccccagtatggatccccactgggaccttgactcagatcatggggactggagttgcaaacatttgttgacctgtgttctagaaggactaaggagaattaggaaaaatgaattatgcaatgatgtccaccataactcagggaaaggaagaaaatcctgccttcctcaagtggctatgggaggccttaagaaaatacactcccctgtcacctga

SEQ ID NO: 5775 - DNA, 1635 bp, Homo sapiens
  SIMILAR (910)..(1626): 741254mologous to multiple sclerosis associated retrovirus polyprotein,accession number AF009668,Smith-Waterman Score=939.
atggtgtgtccagagtttgttccttctgatgtacggatgtgtccagagtttcttccttctgttgggttcgtggtctcgctgacttcaggagtgaagctgcagaccttcacgctagacacaaaagttctccatgtccccttctccctctctgatttaaagcagatcaaggcagacctggggaagttttcagatgatcctgataggtacaaagatgtcctacagggtctagggcaaacattcgatctcgcttggagagatgtcatgctattgttagatcaaatcctagcctttattgaaaagaatgcagctttagctgcagcccgagagtttggagatacctggtatcttagtcaagtaaatgatagaatgacagccaaagaaagggacaaattccttactggtcagcaagccatccccactatggatccccactgggactttgactcagatcatggggactggagtcataaacatctgttgacctgtgttcttgaaggactaaagggaattaggaaaaagcccatgaattattcaatgatgtccactataactcagggacaagaagaaaagccttctgccttcctcgagcggctaagagaggccttaagaaaatatactcccctgtcacccgaatcactcgagggtcaattgattctaaaagataagtttattacccagtcagctgcagatatcaggagacagctccaaaagcaagccctgggccctgaacaaaatctgcaggaattattaaacctggcaaccttggtgttctataacagggaccaagaggaacaggcccaaaaggaaaagcgagatcagagaaaggctgcagccttagtcagggccctcagacaaacaaaccttggtggttcagagaggacagaatatggagcaggccaatcacccaggagggatatattagccaaagctggagctattatctacatgaatatggggaacaagttacccatttgttgtcccctacttgaggagggaatcaaccctgaagtgtgggcattggaaagacaatttggaagggcaaaaaatgcccgcccagtccaaatcaggctaaaagaccccaccacttttccttatcaaaggcaatatcccttaaggcttgaagctcataaagcattacaggatattgtaaaacatttaaaacctcaaggcttagtaaggaaatgcagcagtccctgcaacaccccagttctaggagtacaaaaaccaaatggtcagtggagattagtgcaagatcttagactcatcaatgaggcagtaattcctgtatatctagttgtagcaaacccctataccctgctctctcaaataccagaggaagcagaatggtttatggttctggacctcaaggatgccttcttctgtattcccctgcactctggctcccagtttctctttgcctttgaggatcccacagaccacatgtcccaacttatgtggatggtcttgccccaagggtttagggatagccctcatctgtttggtgaggcactggcccaagatctaggccacttctcaagtccaggcactctggtccttcagtatatggatgatttacttttggctaccagttgggaagcctcatgccagcaggctactcttgaactttctagctaa

SEQ ID NO: 5776 - DNA, 816 bp, Homo sapiens
  SIMILAR (651)..(457): 701254mologous to Homo sapiens gag,accession number AF156961,Smith-Waterman Score=233.
ctaattggtgggtttaaagcaaacaggcaaaagttccgtgtggtcatgctgtgactgagaggtggtcactgaggcatatctgtgtagtccctgtggagtgtgagggtcagcggagtgagtgaagttggctgcatctagctgttccagagggaaggggttcaccaagagcagttgtataaggcagatgtctggattgaccacattaaggaactgggctaagggatccccagatagctggtaaaacatttctgagtatgtctgtgagggtgtttccagaagagatttgcattcaaatcggtacactgagacgagaatatccaccctctcaatcccctctctaaacaggacaccccaactgctgttgggaattggacaatgactgctgtagctacttcctgctggataggggtgaagaaggggccctgcagttgtagtatcctccagaggggagctctcggtagggaatttgtccctttcttcagctgtcattctatcatttacttgactaagataccaggtatctccaaactcttgggctgcagctaaaactgcattcttttcattaaaggccagagtttgatctgacagtagcgtgatatctctccaagtgagatcgaaggtttgccctagaccctgtaggacatctgtgtaccggcgtccagtccaggaaggcctgcatcctccaggtctctgggagtctatgggtccctttgggtcccctatgggtccactcttgatgatgccttccaaaataaaatcctcatccctggctacttccctgaatttcagactcacaggcacaaatgccagctccat

SEQ ID NO: 5777 - DNA, 1152 bp, Homo sapiens
  SIMILAR (823)..(1011): 731254mologous to Homo sapiens Human secreted protein, SEQ ID NO: 7083,accession number AAG03002,Smith-Waterman Score=230.
atggatggaactggagatcattacgttaagcgaaagaagccagacacagaaagacaaacatcacatcttctcacttctttgtgggatctaaaaatcaaaacaattgaacttgtagagatagagagtagaaggatggcaaccaaagcctgggaaggcccagctatggaacacacatgtcacttggcctcttcctatcagacaagtgtagagacagctctgggccaccccattgaagaagaagcagcagaggccgaacccaaacagaactcaggcattaatgtagttttggctgtcatatctgagctgcttcggctgccacccgtatccataatccaatccaatgaggccagggtagcaggaccacatgaccaaaatcatcacagcttctgttcaaggggccatttgtggcctctgtattctggagggaactgggggctgttatttggactctcagaacttaaatcaataccctgggagaaactgagtcatgtttatatgtcgaggggattaagccagggaccaatgggagatgaaagatacatgagagagaagagacaaggatgcagcaagggctctgaggaaatgggagcgagctactctggtggggactttgagaacctttgtgtgggcactctgtatctagctaatttagtggggacgtggagaacttttgcgtctagctcagggattgtaaacgcaccaatcagcatcctgtcaaaacggaccaatcagctctctgtaaaatggaccaatcagctctctgtaaaatggaccaatcagcaggattccacactgcctctacgagctgcaacactcacggcgaaggtctgcagcttcactcctgaagccagggagaccacgaacccaccaggaggaatgagcaactccagacgcgctgccttaagagttgtaacactcactgtgaaggtttgcagcttcattcctgagccagtgagaccaggaacccaccaaaaggaagaaactctgaacacatctgaacatcagaaggaacaaactctggatacgccacctttaagaactgtaacactcaccccaagggtccacggcttcattcttgaagtcagtgagaccaagaacccaccaattccggacacaccagcactttgggaggctgaggcgggtggatcatga

SEQ ID NO: 5778 - DNA, 675 bp, Homo sapiens
  SIMILAR (465)..(283): 621254mologous to multiple sclerosis associated retrovirus element gag polyprotein,accession number AF123881,Smith-Waterman Score=193.
ctactgctgcaccaagtcattttggtgatactcaacaatattgtccatatcccattttcctggttccttcagctctgattttgaagaactttcttccatagggatgtagtctacctgaggtgacatctgccaccacttggggctgacacctgtgggttcacactcactgctaagctgctccagatgacaagtggcctgagtaggagctgtcactgctgccacaattggaactggcattctgctacagcaattggcatttcttgtctgcaattggctgcttctatcaggatcatctgaaaacttccccaggtctgccttgatctgctttaaatcagagagggagaaggggacatgtatccaggttgggccaaattcccctccccctacagcttgcaagggacataactgatagcctgggggtttttgtggtcctttggagatttctttgcttgtttccttcataatgtagaatccgtgggagccctgagcttgttttcctgcaactagacagtcccatctatccagcaggaagtagctagagtggtcatcagccaaattcccaacagcagttggggtgtccttgctactttcttctgtgtgtagatcccagtgattcttgatggatgctatgtcccggatggacttagtcagatatacttctgcaagagtttccat

SEQ ID NO: 5779 - DNA, 2436 bp, Homo sapiens
  SIMILAR (912)..(1073): 1001254mologous to Homo sapiens phospholipase,accession number AB019435,Smith-Waterman Score=267.
atgcctcaagttgaccatttggtgtttgtggtgcatggcattggacctgtgtgtgacttacgctttaggagcattattgagtgtggactaaggagaattaggaaaaagcccatgaattattcaatgatgtccaccataactcagcgaaaggaagaaaatccttctgtcttccttgagtggctatgggaggccttaagaaaatatactcccctgtcacccgactcactcgagggtcaattgatcctaaaagataagtttattacgcaatcagccacagatatcagcagaaagctccaaaaccgagccctggtccctgaacaaaatctggaggtattattaaacctggcaaccttggtgttctatactagggaccaagaggaacaggccaaaaaggaaaagcgagatcagagaaaggctgcagccttagtcatggccctcaaacaaacaaaccttggtggttcagagaggacagaaaatggagcaggccaatcacctggtatggctttttatcagtgtggtttgcaaggacaccttagaaaagactgtccaacaagaaacaagctgccccctcgcccatgtccactatgccgaggcaatcactggaaggcgactgcaccagaggacaaagaggatggagaaccaatcaagcatgactgccaacaaattatagtccagagttatgctccccaagaggatcgcttagaagtccccttagctaatcctgaccttaacctatatactgatggaagttcatttgtggagaatgggatacgaagagcaggttatgccatagttagtgatgtaacaatacttgaaatgcggaagtgcgctggccaggagcgtgatcggtttccggtcagtggtgtggtaccgggtacccggagacgtgtatcggacggtgggccgcagccatggccgagagaaaacctaacggtggcagcggcggcgcctccacttcctcatcgggcactaacttacttttctcctcctcggccacggagttcagcttcaatgtgcccttcatcccagtcacccaggcctccgcttctccggcctccctgctcttaccgggagttgtccagagtgctggacattcattcgtaccctggcattccgcaaatctttgctgaatacccgttgttggtacgccaggtgctggcaggaaatgcaaataaattaaacagtggccctctcctagggtacagtagtctgtctcccactaggagacttctaggatacgaggattccacagatgttggtgaggaggacagcttccttggtcagacttctattcacacatctgccccacagacatttagttacttctctcaggtatcaagcagcagtgatccttttgggaatattggacagtcaccattaacaactgcagcaacctcagttggacaatcaggattccccaagcccctgactgctctcccttttacaactggatcccaagatgtctcgaatgcattttcaccatccatttcgaaggctcaacctggtgctccaccttcctcactgatgggaataaattcttatctgccttctcagccaagtagtctccctccttcatattttgggaaccaaccccaaggaattccccaaccaggatacaatccatatcgccatacccctggcagcagcagggctaatccttacattgcaccaccccagctgcagcagtgccaaacaccaggccctcctgctcatcctccaccttctggaccccctgttcagatgtaccagatgcctccaggatctttgccaccggttccttcttcagtgcagtcaccggcacagcagcaggtacctgccagacctggggctccctctgttcaagtgccatctccttttctacttcaaaaccaatatgagcctgttcagccccactggttttactgcaaggaggtagaatacaaacaactgtggatgccttttagtgtgttcgactctttgaatcttgaagaaatctataattcagttcagccagatccggagagcgtggttcttggcacggatggagggcgctacgatgtttacctctatgaccgaataaggaaggctgcctactgggaagaggagccagccgaagtgagacgctgtacttggttttacaagggggacacagatagtcgatttattccctatactgaggagttcagtgaaaaactagaggtaccatcactgaacgaagttccccttcattatttgaaacctaatagttttgtgaaatttcgttgcatgattcaggatatgtttgaccctgagttttacatgggagtttatgaaacggttaaccaaaacacaaaagcacatcctcaacaagaacttgatttaaactctccacgaaataccactttggaaagacagactttctattgtgttccggtgcctggggaatctacgtgggtaaaagaaatatcctttatctga

SEQ ID NO: 5780 - DNA, 1065 bp, Homo sapiens
  SIMILAR (172)..(726): 751254mologous to multiple sclerosis associated retrovirus polyprotein,accession number AF009668,Smith-Waterman Score=724.
atgtttcggaaggatgaagaactgacttcctcacagagggatttagctgtaaggaactgggcatggagcctagcccgtggtgagcgctcagcaaacatgcacgcagtacacacctcgcttctagtggaaaggacaatactgaccacgaccaaggaaagagggtctaccttgcaatatcccttaagacctggagctcataaaggattgcaagatattgttaaacgtttcaaagctcaagccttaataaggaaatgcagcagtccctgcaacaccccaattctaggagtacaaaaaccgaatggtcagtggagactagtgcaagatcttagacttatcaatgaggcagtaattcctctatatccagttgtacccaacccctataacctgctctctcaaataccagaggaagcagaatggttcactgttctggacctcaaggatgccttcttctgtattcccctgcactctgactcccagtttctctttgcctttgaggatcccacagaccacacgtcccaacttacgtggacggtcttgcccccagggtttagggatagccctcccctgtttggtcaggcactggcccaagatctaggccacttctcaagtccaggcactctggtccttcagtatgtggatgatttacttttggccaccagttcagaagcctcttgccagcaggctactctagatctcttgaactttctagctaatcaagggtacaagacacactcacgtgattctgatgcacctgttggattcacagataggcatttggtagccactgagaagatccctaggggacgtgagcctttgagcagcctggccgtttacacacgcggccgcccgacccggaccggcgcgcgtcgcacgattgtctcgcgtattcgtcgagattttcggtttttttatcgatatttggcgcaacgtgaaccacctctatatcaacaaagcctgctcattcacttacaattggacagccagcccgcactaagtgtcgtcatcggaaaagtgccaaacgtcgtagagcttacccctaattttgggactgcagctcaagtgtag

SEQ ID NO: 5781 - DNA, 2406 bp, Homo sapiens
  SIMILAR (1147)..(1893): 751254mologous to multiple sclerosis associated retrovirus polyprotein,accession number AF009668,Smith-Waterman Score=989.
atgtctatgggctttctggttgaagaaagtgaaccagtagtttggagaggccttatggtaatgtcggccattgagaaattgttgaggcaggtatcgggttaccttctggcccagggtgtgtctaggaatgtcgtccatgagcctggagtggggtcctcacaggtctgctctgtgccctgtcctactgtggctaagctgaattcaggggctaaataccgggcacctgtcggccagttaaaagctactagcgcggcaaccagactaaagacacgggtgtcaggctttctgggaaggggctctctaacatcccctgactctttggagttgggagcgttggtttgcctagaaccagcttccacttttcctgtacttctgggccgagccaagggtcgacagagaggaaagccattcagctccggggtccgaacaacaagaggacctatcagcttacccccatatcctagcctccctatagctccccgtcctattaacgataatcctcctctaatctcccctgcccagaaggaaatatgcgaagaaatctccaaaggacaacaaaaacccctgggctatcggttatgtccccttcaagctgtagggggaggggaatttggcccaacctgggtacatgtccccttctccctctctgatttaaagcagatcaaggcagacctggggaatttttcagatgatcctgataggtacataaatgtcctacagggtctaggacaaatcttctatctcatttggagagatgtcatgctattgttagatcaaaccctggcctttaatgaaaagaatgcagctttagctgcagcccaagagtttggagatacttggtatcttagtcaagtaaatgacagaatgacagctgaagaaaggggcaaaatccctaacggtcagcaagctgtccccagtatggatccccactgggaccttgactcagatcatggggactgcagttgcaaacatctgttgacctgtgttctagaaggactaaggagaattaggaaaaaggaccaagaggaacaggcccaaaaggaaaagcaagatcagagaaagaccgcagctttagtcatggccctcagacaaacaaactttggtggttcagagaggacagaaaatggagcaggccaatcacccgagagggatacattagccaaagctggagctattatctacatgaatatggggaacaagttacccatttgttgtcccctacctgaagagggaataaaccctgaagtctgggcattggaaggacaatttggaaaagcaaaaaatgcccacccagtccaaatcaggctaaaagaccccaccacttttccttatcaaaggcaatatcccttaaggcctgaagctcataaaggattaaaggatattgttaaatatttaaaagctcaagccttagtaaagaaatgcagcagtccctgcaacagcccaattctaggagtacaaaaaccaaacagtcagtggagactagtccaagatcttagactcatcaatgaggcagtaattcctctatatccagttgtacccaacccctatatcctgctctctcaaataccagaggaagcagaatggttcactgttctggacctcaaggatgccttcttctgtattcccccgcactctgactcccagtttctttttgcctttgaggatcccacagaccacatgtcccaacttatgtggacagtcttgccccaagggtttaaggatagccctcatctgtttggtcaggcactggcccaagatctaggttacttctcaagtccaggcactctggtccttcagtacgtggatgatttacttttggctaccagttcagaagcctcgtgccagcaagctactctagatctcttgaactttctagctaatcaagggtacaagcgtttgctgactatggatccccggacacagcgagatagccaggcccctctatactctaatcaaggagagaaccagagagacaaaaagtcaaagaaagaagtacaaagagaggaagagacagacaaagagggagtcagaaagagagaaagagagagacaaaggagaagtcaaagagaaagaaagagagatggaacctcggtgtccactctggctgtgctcgaggagcccttcagcctgccgatgcgctatgggggcccctacctggggctggccaagaccagagctgactccctctgcttgtggggaggtgtggagggagaggcacgggtgggagctggggcttcgtgcagcactcgcaggccagtgcgggttccaggtgagcacaggctcggcaggccctgcactgggcatggccagccagcacctgctgggcttgatcgggggatgtgctccttctgggctgccagagtgcccgggctaggtggtgcaaagtcccacggcgactgccattga

SEQ ID NO: 5782 - DNA, 1566 bp, Homo sapiens
  SIMILAR (713)..(931): 951254mologous to Homo sapiens transducin-like enhancer protein,accession number M99435,Smith-Waterman Score=382.
tgggaattgcaatacttcctcacagtactgagatggattgatggaataagggggcataagtgcctgggtggtgcatgagacacccacccagattactgggtcttcctttccaaattctattccttagtgatagtattttggttttgtctcatcatactactgtggtaagtcaatgcaagggtgtagggtgaaatggagttacctggtgacaggttgagagtatggctactatattgtgggatgcatccccacccccattttaatccctctgaaaacagcgtgagtctgaaaatctgtggcatcttagattgagtgacatgctggatctcatccctggaggcgcataaagacagaactagctcatgtttacttactgatgtagccagccttgcttaataataaacagctcccctctcggagtgagtgataccagaaagtgacagtgtagatgtgaggattatattttgggaaggtgggagaggtaattgagcaggtgaaagcttttgatgaactgaaagcactaatcgcattttttcccctttcctccctctctttcttggctccttttgtgtgtttgttgaacctcctgttctgtttccgccttcccctcctgtcatgtctgttttcccctggatgccgcctccatcgccatcactgtcaccactacctcctcctcctcctcctttttctctctcaccaccaccaccaacagcagcagcagttgcaagctcagcatctttctcatggccacggacccccagttccccttacgcctcacccttcgggacttcagcctcctggaatcccgcccctcgggggcagtgccggccttcttgcgctgtctagtgctctgagtgggcagtctcacttggcaataaaagatgacaagaagcaccacgatgcagagcaccacagaggtgagaggccgggcaagccagattaggactttgtcctcatactcttacagtgctgcaaagttgtgtgcatcgctaaagagagccccaacctatacagagagcaaacaatgagataagaggaactgtcgcaaagctttccactgaaacacaggtcaccctgggaagtttgcagggtttgctgtgggccatctgtagatttctcgatctcgttagattgcaggcatcctgacatcttgggcaactgcctagttaatgccagtggcctgtaccatattatgggaaaactgttaactgcttaattggggtaatttttccaaagaaagtaatgttgttaaatgggggcgaattaaggagtttaattttggaaagtggatgtgtttccaattgaaaggtttgataattgcatctgttactacttagtttcataggctttaattctagtatgcattaaatattgggcaaaattgcacttgactaattttttgaagaaaagtaatttattctgtcaagaaataaaaaaataggctttgtgtatggttaaactgtaaatcttatgtttacaaaatactgtaattttcaggaaatcactgtattaggaatgtgcaatgacttatataaataaaagccatttttaaaactgaaaaaaaaa

SEQ ID NO: 5783 - DNA, 2838 bp, Homo sapiens
  SIMILAR (595)..(1173): 751254mologous to multiple sclerosis associated retrovirus polyprotein,accession number AF009668,Smith-Waterman Score=736.
atgagtggaactctcaaaggcatgttgcccaagcgagacttgcccatctatcctatctatcctgacctttgccccctgggtcctaatgcctgtgagacaaacttcctctcgcctctcttctctgagaaggaaataagcaaagaaatctccaaaggtccacaaaaacccctgggctatcgattatgtccccttcaagctataggggcaggggaatttggcccaacccgggtacatgtccccttctccctctctgatttaaagcagatcaaggcagacctggggaagttttcagatgatcctgataggcacatagatgtcctacagggtctagggcaaacctttgacctcgcttggagagatgtcatgctactgttagatcaaaccctggccttttatgaaaagaatgtggctttagctgcagcccgagagtttggagatacctggtatcttagtcaagtatgtttaactattgagggccaggaaattgacttcctcctggacagtggcacggccttctcagtgttaatctcctgtcctggacaactgtcctcaaggtctgttaccatccgaggaatcctgggacagcctgtaaccaggcctgaagctcataaaggattacagaatactgttaaacatttgaaagctcaaggcttagtaaggaaatgcagcagtcccggcaacaccccaattctgggagtacaaaaacccaatcgtcagtgcagactagtgcaagatcttagactcatcaatgaggcagtgattccactatatccagttgtacccaacccctataccctgctctctcaaataccagaggaagcagaatggttcatggttctggacctcaaggatgccttcttctgtattcccctgcactctgattcccagttcctctttgcttttgaggatcccacagaccacacgtcccaacttatgtggatggtcttgccccaggggtttagggatagccctcatctgtttggtcaggcactggcccgagatctaggccacttctcaagtctaggcactctggtccttcaatatgtggatgatttacttttggctaccagttcggaagccttgtgccagcaggctactctagatctcttgaactttctagctaatcaagggtacaaggtgtctaggtcgaaggcccagctttgcctacagcaggatggggaaccaatcgagcatgactgccaacaaattatagtccagacttatgccacccgagatgatctcttagatgtccccttaactattcctgaccttaacctatataccgatggaagttcagttgtggagaatgggatacaaaggacaggttacaccatagttagtgatgtaaccatacttgaaagtcccgtggcagccatcttgctgttacttgcctttggggcctgtatttttaaccttcttgtcaaatttgtttcctctagaatcgaggccttcgagctacagatggtcttacaaatggaaccccaaatgagttcaactaacaacttctaccgaggacccatggaccgacccgctggcacttcccctggcctagagagttcccctctgaaggacactacaactgcaggagctgtaacactcaccacggaggtctgcagcttcactcctgagccagcgagaccacgaacccaccagaaggaagaaactccgaacacatctgaacatcagaaggaacaaactccagacacgctgcctttaagaactgtaacactcaccgcaagcgtccacggcttcattcttgaagtcagctttgaccaagaacccaccaattccagacacattttggtgaccacaaagggaccactgattatcgccaagtggaggaaaactaatgtttctgctgctgtgctggtgagctcaactattctgatcagcagggtccagggactgttgcaggttcttgggcagggttgtttctgctgctgcatcggtgagcgcaactattccaatcagcagggtccagggaccattgcaggttcttgggcaggggttgtttctactgctgcatcaaatgcgactttagctgcagccccaaagtttggagatacttggtatcttagtcaagtaaatgatagaatgacagctgaagaaagggacaaattccctactggtcagcaagccatccccagtatggatctccactgggacctcaactcagatcatggggactggagtcgtaaacatctgttgtcctgtgttctagaaggactaagaagaattaggaaaaaagccatgaattactcaatgttgtccaccgtaactcagggaaaggaaaaaaatccttctgccttccttgaacagctatggggggccttaagaaaatatactcccctgtcacccaaatcactagagggtcaattgattctaaaagataagtttattacccaatcagccgcagatatcaggagaaagctccaaaagcaagccctgggccctgaacaaaatctggaggcattattaaacctggcaacctcggtgttctataatagggaccaagaggaacaggcccaaaaggaaaagcgagatcagagaaaggccgcagccttagtcatggccctcagacaaacaaaccttggtggttcagagaggacagaaaatggagcaggccagtcacctgagagagcagggatagctcttggagaccttattcagactcgtgggaaaaccccacaaccagtggcatacctaagtaaggaaatagatgcagtagcaaaagtctggcctcactgtttaaagttagttgctgcagtggccgtctttgtgtcagaggctatcaaaataatacaaggaaaggatctcactgtctggactactcatgag

SEQ ID NO: 5784 - DNA, 4701 bp, Homo sapiens
  SIMILAR (1966)..(2862): 751254mologous to multiple sclerosis associated retrovirus polyprotein,accession number AF009668,Smith-Waterman Score=1186.
atggcttttatccaaagacaggcaataacaaatgctgatgaggatgtggataaaaatgaaccctcatatactgttgttccagaatgcataactggaaaagatatcctgagcaactggcagaatccatacattagttccctgacttgtggacttgaaggtcttagttcgagagggagaaatgctgccacaaagagacctaacaataattccactgaactggaagttagcactgccactggaaactttgagatcctcatgactctggatgaacaagcaaagaagggagttactattactgggttggggtggtcaaccatgactactaggggaaaatggaactgctactccacagtggaggccctgcactcggagcactcggccggccctgccagccccggcaatgaagggcttagcacccgggccagctgccgaggagggtgtactgggtcccccagcagtgccagcccaacggtgctgcactggatttctcaccgggccttagccgccctcctgtgggacagggctcgggacctgcagcccgccatgcctaagcctcccaccccctccgtggtctcctgtgcggcccgagcctcctcgacgagcgccaccccctgctccacggcacccagtcccatcgaccacccaagggctgaggagtgccggcgcaccgtgtgggactggcaggcagctccatctgcagcccaggtgcgggatccattgggtgaagccagctgggctcctgagtctggtggagatgtggagaacctttatgtcttgctcagggattgtaaatacaccagtcagcaccctgtgtctagctcagggtctgtgaatgcaccaatcgacactctgtatctagctactctgctcagggattgtaaatacaccaatcggcactctgtatctagctcaaggtttgtaaacacaccaatcagcaccgtgtctagctcagagtttgcgaatgcaccaatcgacactctgcatctagctactctgaaggaagaaactccgaacacatctgaacatcagaaggaacaaactccggacatgccgcctttaagaactgtaacagtcacggcgagggtccgcggcttcattcttgacgtcagtgagaccaagaacccaccaattccagacacattttggcgacccagatgggaccttcgccaatcaccaagcaatcaaaccctggcgtttaatgaaaagaatgcggctttagctgcagcccaagagtttggagatacctggtatcttagtcaagtaaatgacagaatgacagccgaagaaagggacaaattcccgactggtcagcaagccatccccagtatggatccccactgggaccttgactcagatcatggggactggagtcgtaaacatctgttgacctgtgttctagaaggactaaggagaattaggaaaaagcccatgaattattcaatgatgtccaccataactcagggaaaggaagaaaatccttctgccttccttgagcagctacaggaggccttaagaaaatatactcctctgtcacccaactcactagtgggtcaattgatcctaaaagataagtttattacccaatcaaccacagatatcagaagaaagctccaaaatagggaccaagaggaacaggcccaaaaggaaaagcgagatcagagaaaggccatagccttagtcatggccctcagacaaaccttggtggttcaaagaggacagaaaatggagcaggccaatcacctggtggggcttgttaccagtgtggtttgcaaggacaccttaaaaaagattgtccaacgagaaacaagccgccccatcgtccatgtccactatacggaggcaatcactggaagtcacactacccagagggcaaagcttctctgggccagaagcccccaaccagatgatccaatgacaggactgaggatgactgcggcaagcacccgttcatgtcatcaccccctcactgagccctgggtatgtttaatcattgagggccaggaaattgacttcctcctggacactggcacgaccttctcagtgttaatcccctgtcttggacgactgtcctcaaggtccgttaccatccaaggaatcctgggacagcctgtaaccaggtatttctcccacctcctcagttgtaattgggagactttgctcttttcacatgcctttcttgttatgcctgaaagtcccacacccttattagggagggatatattagccaaagctggagctattatctccatgaagacagggaacaagttacccatttgttgtcccctacttgagggaatcaaccctgaagtctgggcattggaaggacaatttggaagggcaaaaaatgcccatccactccaaatcaggctaaaagaccccatcagttttccttatcaaaggcaatatcccttaaggcctgaagctcataaaggattacaggatattgttaaacatttaaaagctcaagactcagtaagaaaatgcagcagtccctgcaacaccccaattctaggagtacaaaaactgaacagtcagtggagactagtgcaagatcttagactcatcaatgaggcagtaattcctctatatccagttgtacgcaacccctatacccttctctctcaagtaccagaggaagcagaatggttcactgttctggacctcaaggatgccttcttctgtattcccctgcactctgactcccagtttctttttgcctttgaggatcccacagaccacacatcccaacttatgtggatggtcttgccccaaaggtttagagatagccctcatctgtttggtcaggcacaggcccaagatctaggccacttctcaagtccaggcactctggtccttcaatacagcgagatagccaagaccctctatactctaatcaaggagatggagagggcaaatactcacctagtagaatgggaaccagaggcagaaacagccttcgaaaccttaaagcaggccctagtacaagctccagctttaagccttcccacaggacaaaacttcgctttatatgtcatagagagagcagggatagctcttggagtccttactcagactcacaggacaaccccacaaccagtggcatacctaagtaaggaaattgatgtagtagcaaaaggctggcctcactgtttaaggacagttgtggcagtggctgtcttagtgtcagaggctatcaaaataatacaaggaaaggatttcactgtctggactactcatgatgtgaatggcatactaggtgccaaaggcggtttatggccatcagacaactgcctacttagataccaggcactactccttgaggaaccagtgcttcaaatacatatgtgcatagccatcaaccctgccacttttctcccagaagatggggaaccaatcaagcatgactgccagcaaattatagtccagacttatgccacccaagatgatctcttagaagtccccttagctaatcctgactttaacctatataacagtggaagttcatttgtagagaatgggatacaaagggcaggttatgccatagttagtgatgtaactgtacttggaagtaagcctctttccccagggactagcacccagttagcagaactagtggcacttacccgagccttagaactgggaaaaggaaaaagaataaatgtgtatacagatagcaagtatgcttatctaatcctacatgcccatgctgcaatatggaaagaaagggagttcctaacctctgggggcacccccattaaataccacaaggaaattatggagttattgcacacagtgcaaaaacccaaagaggtggcagtcttacactgccaaagccatcagaaggggagtgcaaggaggatcttctgtctcaccagaattcccgggaccagagtatgcaaaaacccccatgtctccctgagtggcatctctgagtggccactgagagaccacacacctctgtgcttcagacccaaggccctgctggcatgggttcatgaggagatctgctccatgggttgcaaagatccaggttggaacagtttgaaggtctcagaagaagataggaagatgcaggaaagtttggaaacttctagagacttgctgaatggttttgaccaaaatgttgataatgatatggacagtaaagtccaggctgagggagcctcagatggagatgaggaacttattgggaaatggcgtaaaggattgtcaatgctatggaagatactctctatagagaatatgatgaatgtctggaaggatggcaccataaaagatgccatcattgttatagaaaaagcagtgaaagccatcaagcctgaaacaataaattcctgccagagaaatctgtgtccagatgttgtacatgacttcacaaggtttacaacagagccaataaaggacataaaagagattggagatttggcaataaaattgggaatttttgagtcctctaatagcacccaattccttaatcagtttgtacctgatgatcggttatccccccataataaattactgaagttttacaaaccggaattttattcatcatacccccttgtttcctgccttgaccattatgtggatcaagttggagccagaatcagcatgagtttctgtgtgacaacagtgacagaggcctctggcagcggcagctggacatgtggtgtgagccagcttaagctgtcctatgccgactaa

SEQ ID NO: 5785 - DNA, 2947 bp, Homo sapiens
  SIMILAR (1688)..(2434): 751254mologous to multiple sclerosis associated retrovirus polyprotein,accession number AF009668,Smith-Waterman Score=989.
atgggagccattctctgggctggccgaggccggagccgcctccctcggcttgcggggagtcccatcgactgcccaagggctgaggagtgcaggcgcatggcgcgggactggcaggcagctcgacctgcggccccagtgggagacccactgggtgaagccagctgggctcctgagtctagtggggacttggagaacctttatgtctactcatggtttgtaaatataccaatcgacactctgtatctagctaatctagtggggacgtggagaacttttgtgtctagctcagggattgtaaacgcaccaatcagcaccctgtcaaaacggaccaatcggctctctgtaaaacagaccaactggctctctgtaaaatggaccaatcggcaggatgtggatgggaaacactcaggcatcacaggctcacccttgaaatgcatcctaagctattgggaccaattcgacccacaaaccctgaaaaagaggcggctcatttttttctgcgctacggcttggccccaatattctctctctgatggggaaaaacggccacctgaagggaagtacaaattacaatactatcatcctgcagcttgactttttctgtaagagggaaggcaaatggagtgaaataccttatgtccaagctttcttttcattgagggagaatacacaactatgcaaagcttacaagttacatcccacaggaggacctctcagcttacccccatatcctagcctccctatagctccccttcctattaatgataatcatcctctcatctcccctgcccagaaggaaataagcaaagaaatctccaaaggaccacaaaaacccacgggctatgggttatgtccccttcaagctgtagggggaggggaatttggccctacccagggtacatgtccccttctcctgctctgatttaaagcagatgaaggcagacctggggaagttttcagatgatcctgataggtacatagatgtcctacagggtctagggcaaacctttgacctcacttggagagatgtcatgctactgttagatcaaaccctggcctttaacgaaaagaatgcggctttagctgcagcccaagagtttggagacacctggtatcttagtcaagtaaatgatagaatgacagccaaagaaagggacaaattccctactggtcagcaagctatccccagtatggatccccactgggaccttgactcagatcatggggactggagttgtaaacatctgttgacctgtgttctagaaggactaaggagaattagaaaaaaagcccatgaattattcaatgatgtccaccataactcagggaaaggaagaaaattcttctgccttcctcgagtggctatgggaggccttaagaaaacatactcccctgtcacccgaatcactcgagggtcaattgattctaaaagataagtttattacccaatcagccacagccgcagatatcaggagaaagctccaaaagcaagccctgggccctgaagaaaatttggaggcattattaaacctggcaacctcagtgttctataatagggaccaagaggaacaggcccaaaaaggaaaagcgagatcagagaaaggccacagccttagtcacggccctcaggcaaacaaaccttggtggttcagagaggacagaaaacagagcaggccaatcacccgagagggatacattagccaaagctggagctattatctacatgaatatggggaacaagttacccatttgttgtcccctacctgaagagggaataaaccctgaagtctgggcattggaaggacaatttggaaaagcaaaaaatgcccacccagtccaaatcaggctaaaagaccccaccacttttccttatcaaaggcaatatcccttaaggcctgaagctcataaaggattaaaggatattgttaaatatttaaaagctcaagccttagtaaagaaatgcagcagtccctgcaacagcccaattctaggagtacaaaaaccaaacagtcagtggagactagtccaagatcttagactcatcaatgaggcagtaattcctctatatccagttgtacccaacccctatatcctgctctctcaaataccagaggaagcagaatggttcactgttctggacctcaaggatgccttcttctgtattcccccgcactctgactcccagtttctttttgcctttgaggatcccacagaccacatgtcccaacttatgtggacagtcttgccccaagggtttaaggatagccctcatctgtttggtcaggcactggcccaagatctaggttacttctcaagtccaggcactctggtccttcagtacgtggatgatttacttttggctaccagttcagaagcctcgtgccagcaagctactctagatctcttgaactttctagctaatcaagggtacaagcgtttgctgactatggatccccggacacagcgagatagccaggcccctctatactctaatcaaggagagaaccagagagacaaaaagtcaaagaaagaagtacaaagagaggaagagacagacaaagagggagtcagaaagagagaaagagagagacaaaggagaagtcaaagagaaagaaagagagatggaacctcggtgtccactctggctgtgctcgaggagcccttcagcctgccgatgcgctatgggggcccctacctggggctggccaagaccagagctgactccctctgcttgtggggaggtgtggagggagaggcacgggtgggagctggggcttcgtgcagcactcgcaggccagtgcgggttccaggtgagcacaggctcggcaggccctgcactgggcatggccagccagcacctgctgggcttgatcgggggatgtgctccttctgggctgccagagtgcccgggctaggtggtgcaaagtcccacggcgactgccattga

SEQ ID NO: 5786 - DNA, 1127 bp, Homo sapiens
  SIMILAR (3)..(152): 881254mologous to Bos taurus rab11 binding protein,accession number AF117897,Smith-Waterman Score=224.
aaaaatcagaagggaacgagaaaagtgaagatgctgaagttttggatgccacaccttctggtattatgaagacagataacacagaagttcttctctctgctgacttcactggagcaatcaaagtgtttgttaataaaagaaaaaatgtatcttaatttgaaatggcatttaaaataaacatatcagtaagtttctatatgtatcaaaactgaaaaaatagtgttccaggctaacatacttttttaatttttattgaaagttgttcaaatataatatattttttgagaggcagtgttaatgatctaggaaaccctgggctgatagagtagaaaggaatatggctagaataacattgccaaacattaggctttatgttttgttatgtttgagttttcgttgtataattatgaacatgcacaagtttctgcatgaaaagatattaatatattaatcacatgtatgtgccttttggttacatgcattaaatctaacagagttaaattatttcagtggctcttttggcctcttactaggggggatagtcttgtttctagcttaaacaattttttttttgcacaaaatttcatttttaataaaagtgggtatcttttgactgagttattgttttgaaaatgggtatatagggtttccagtaggggtcaacaacccatatggtaaagggtttttataaatttctcaatttggggggacaagatttttttgtggtctaaattgtggggcttaagattcttttctttatatgggaacatataatttttttttctttgccacactggagcacaatgtttctatgtaaagaattattttcattctttatccatgagcaccaggctttgctcccttaaaaaaaaaattaagccccattaaggagtgagtcttctttttttacaataatgtaaaaattaaactgtttacatttttttaaagcattgtagtttttaaaaattaagctgttttgttttgtgttgttgaatttgaaagcctttgtaaatatcaatataatgtaccaatgaaataacatctggggcaatgaaaccctgactcatgttgttgatggttagcatattgatatttacaaaggctttcaaattcaacaacacaaaaaa

SEQ ID NO: 5787 - DNA, 750 bp, Homo sapiens
  SIMILAR (3)..(419): 921254mologous to Homo sapiens Human protein clone HP10574,accession number AAY94897,Smith-Waterman Score=662.
atggagatagttgtgctgtgtgcattgaattgtataaaccaaatgatttggtacgcatcttaacgtgcaaccatattttccataagacatgtgttgacccatggctgttagaacacaggacttgccccatgtgcaaatgtgacatactcaaagctttgggaattgaggtggatgttgaagatggatcagtgtctttacaagtccctgtatccaatgaaatatctaatagtgcctcctcccatgaagaggataatcgcagcgagaccgcatcatctggatatgcttcagtacagggaacagatgaaccgcctctggaggaacacgtgcagtcaacaaatgaaagtctacagctggtaaaccatgaaggcaaattctgtgggcagtgggatgttattccctcatgtttgaccaacccaacgctttgaagggtggacggaaactcctaatcaaggggactgctgtttcggggaatttaaatctttaaatctgtgtaaatagaaaacttgaaccattagtaataacagaactgccaatcagggcctagtttctattaataaattggataaatttaataaaataagagtgatactgaaagtgctcagatgactaatattatgctatagttaaatggcttaaaatatttaacctgttaacttttttccacaaactcattataatatttcgcataggcaagtttcctctcagtagtgataaccacatttttagacaattcaaaactgtccttcaaga

SEQ ID NO: 5788 - DNA, 629 bp, Homo sapiens
  SIMILAR (9)..(245): 651254mologous to Homo sapiens PRO1902,accession number AF118082,Smith-Waterman Score=254.
tgagactgtctcagtctgtcacccaggctggagtgcagtggcacgatctcagctcactgcaacctctgccctccaagtccaagcgattctcgtgcctcagccacccaaatagttgggattacaggcatacaccacaacacccagctaatttttgtatttttttcttttgtagagacggggtttcaccatgttggccatgctggtcctgtcctggcctcaagtgatccacccacctcagcctctcagtgttgggattataggcaaccgcgcccggccaaatccattatcatcacttaatgtttaaaggctacgttcagtttcctataggtgatattgttaggatctactagcaaatgatttggtaacctgacatctttgtattcatgtccaaaaaaattcttttataagaacaaaaatggtactcttagcctcattcactggagtattactgaaaagcatgatattcttactctattttgggtacattatgacagagaggttattattaccaactgtcagtagaactgaggcttcttgagtaaaggggattgaggtaaacctttggaagctggtgaatacatttcaagacacaacatggcacctgtgtctagctctatggtacaacatgg

SEQ ID NO: 5789 - DNA, 463 bp, Homo sapiens
  SIMILAR (3)..(275): 1001254mologous to Homo sapiens 52-kD Ro/SSA ribonucleoprotein,accession number M34551,Smith-Waterman Score=502.
tgatgtgggaggaggtcacatgccctatctgcctggaccccttcgtggagcctgtgagcatcgagtgtggccacagcttctgccaggaatgcatctctcaggttgggaaaggtgggggcagcgtctgtcctgtgtgccggcagcgctttctgctcaagaatctccggcccaatcgacagctagccaacatggtgaacaaccttaaagaaatcagccaggaggccagagagggcacacagggggaacggtgtgcagtgcatggagagagacttcaccaaactcatcttgatcaaccaaaaacatgtttctgccttctttatgggacttaagttttttttttctcctctccatctctaggatgtcgtctttggtgagatctctattatatcttgtatggtttgcaaaagggcttcctaaaaataaaaaataaaatttaaaaaactgtgaaaaaaaaaaaaaaaaa

SEQ ID NO: 5790 - DNA, 1970 bp, Homo sapiens
  SIMILAR (86)..(1537): 871254mologous to Homo sapiens 52-kD SS-A/Ro autoantigen,accession number M62800,Smith-Waterman Score=2162.
gggagctggctaccagcgttgagttgccctgtaaagccaaaccccctaaaggtctccacactgctgtttaacggcacacttgacaatggcttcagcagcacgcttgacaatgatgtgggaggaggtcacatgccctatctgcctggaccccttcgtggagcctgtgagcatcgagtgtggccacagcttctgccaggaatgcatctctcaggttgggaaaggtgggggcagcgtctgtgctgtgtgccggcagcgctttctgctcaagaatctccggcccaatcgacagctagccaacatggtgaacaaccttaaagaaatcagccaggaggccagagagggcacacagggggaacggtgtgcagtgcatggagagagacttcacctgttctgtgagaaagatgggaaggccctttgctgggtatgtgcccagtctcggaaacaccgtgaccacgccatggtccctcttgaggaggctgcacaggagtaccaggtgaggcctaagagacacctggagaagctccaggtggcattaggggaactgagaagaaagcaggagttggctgagaagttggaagtggaaattgcaataaagagagcagactggaagaaaacagtggaaacacagaaatctaggattcacgcagagtttgtgcagcaaaaaaacttcctggttgaagaagaacagaggcagctgcaggagctggagaaggatgagagggagcagctgagaatcctgggggagaaagaggccaagctggcccagcagagccaggccctacaggagctcatctcagagctagatcgaaggtgccacagctcagcactggaactgctgcaggaggtgataattgtcctggaaaggagtgagtcctggaacctgaaggacctggatattacctctccagaactcaggagtgtgtgccatgtgccagggctgaagaagatgctgaggacatgtgcagtccacatcactctggatccagacacagccaatccgtggctgatactttcagaagatcggagacaagtgaggcttggagacacccagcagagcatacctggaaatgaagagagatttgatagttatcctatggtcctgggtgcccagcactttcactctggaaaacattactgggaggtagatgtgacaggaaaggaggcctgggacctgggtgtctgcagagactctgtgcgcaggaaggggcactttttgcttagttccaagagtggcttctggacaatttggttgtggaacaaacaaaaatatgaggctggcacctacccccaggactccctcccaccttcaggtgcttccatgccaagttgggattttcctggactatgaggctggcatggtctccttctacaacatcactgacccatggctccctcatctactctttctctgaatgtgcctttacaggacctctgcggccattcttcagtccctggtatcaatgatggaggaaaaaacacagccccctctaaccctcttgtcccactgaatattggatcacaaggatccactgactattggatggctttctctgggacactgccactctccccccattgggcacccgcttcttcagccacaaaaccctggcctctttttccccatggaactctggaaccacctttgtcctctgcagaggcatcccgggatccccagcaagcgagctttagcagggaagtcacttcacccatcaacattcctgccccagatggcgtggtgtgattccctccagtgaagcagcctccttatatttgggcccaaactcatcttgatcaaccaaaaacatgtttcttgccttctttatgggggatttaagtttttttttttcttcctcttccatctctaggggatgttcgtctttggggtgaggatctctattatatcttgtatgggttgcaaaagggcttcctaaaaataaaaaataaaatttacaaaactgtgaaaaaaaaag

SEQ ID NO: 5791 - DNA, 495 bp, Homo sapiens
  SIMILAR (45)..(116): 871254mologous to Xenopus borealis actin,accession number X07507,Smith-Waterman Score=108.
  misc_feature (1)...(495): n = a,t,c or g
nttgaaagctgtacaccgctgcaccggaccggaattcccgggacgacaacggctacggcatgagcaaggacggcttcgcgggcgacgatgccccccgggccgtcttcccctccatcgagaggcactcttccagccttccttcctgggcatggaggcctgtggcatccacgaaactaccttcaactccatcatgaagggtgacgtggacatccgcaaagacctgtacgccaacacagtgctgtctggcggcaccaccatgtaccctggcattgccgacaggatgcagaaggagatcactgccctggcacccagcacaatgaagatcaagatcattgctcctcctgagcgcaagtactccgtgtggatcggtggctacatcctgggctggctgtccaccttccaccagatgtggatcagcaagcaggagtatgacgagtccggacccttcatagtgcacacgacatgcttctaggcggactatgacttagatgcgta

SEQ ID NO: 5792 - DNA, 721 bp, Homo sapiens; identical to SEQ ID NO: 4886
  SIMILAR (2)..(238): 661254mologous to Canis familiaris beta-actin,accession number AF021873,Smith-Waterman Score=262.
  misc_feature (1)...(721): n = a,t,c or g

SEQ ID NO: 5793 - DNA, 425 bp, Homo sapiens
  SIMILAR (108)..(10): 1001254mologous to Homo sapiens Amino acid sequence of a human secreted protein,accession number AAY19459,Smith-Waterman Score=164.
  misc_feature (1)...(425): n = a,t,c or g
tttcgcgcgaaataaaaataataataaagaaaaaagaagaacatctaaataaatagggctcaggagagtactcaggtatgaaaagaggaaacatgttatatcagtcatataaaattccagaaaattgacattaatctactgttaagcaaatattgtaattcagtgattgtctggagcatggagaggccagagagaaagatagnnnnnnnnnnnnnnnnnnnnnnnnnnnnnnnnnnnnnnnnnnnnnnnnnnnnnnnnnnnnnnnnnnnnnnnnnnnnnnnnnnnnnnnnnnnnnnnnnnnnnnnnnnnnnnnnnnnnnnnnnnnnnnnntcttattacagctttaaaaatttaatttgaaagaactatcttgatttaaccattatttttgacaaataggttatgtgaatttacattgactctcc

SEQ ID NO: 5794 - DNA, 837 bp, Homo sapiens
  SIMILAR (319)..(834): 881254mologous to Homo sapiens mutant beta-actin (beta'- actin),accession number X63432,Smith-Waterman Score=781.
atggatgatgatattgctgcgctcgttgttgacaacagctctggcatgtgcaaggccggcttcgcgggtgacgatgtcccctgggccatcttcccttccatcgtggggtgcaccaggcaccaggtcatgatgctgcatgtggctcccgaggagcaccctgtgctgctgaccgaggcccccctgaaccccaaagccaactgtgagaagatgacccagatcatgtttgagaccttcaacaccccagccatgtatgtggccatccaggccatgctgtccctgtacgcctccgtccgtaccgcccatgtacaagggcttcacaccacggccgagcgggaaatcgtgcgtgacatcaagaagctgtgctacgtcgccctggacttcgagcgggagatggccatggtggcctccagctcctccctggagaagagctacaagctgctcgatggccaggtcatcaccatcggcaacgagcggttccactgccccgaggcgctcttccagccttccttcctgggcatggaatcctgtggcatccacaaaactaccttcaactacatcatgaagtgtgacgtggacatctgcaaagacctgtacaccaacacagtgctgtctggcggcaccaccatgtaccctggcatcaccaacaggatgcagaagaagatcaccgccctagcacccagcatgatgaagatcaagatcattgctcctcccgagcgcaagtactccgtgtggatcagcggctccatcctggcctcgctgtctaccttccagcagatgtggatcagcaagcagaagtatgaccagtccggcccctccatcgtccacgaatgcttctag

SEQ ID NO: 5795 - DNA, 705 bp, Homo sapiens
  SIMILAR (187)..(702): 881254mologous to Homo sapiens mutant beta-actin (beta'- actin),accession number X63432,Smith-Waterman Score=781.
ctgcatgtggctcccgaggagcaccctgtgctgctgaccgaggcccccctgaaccccaaagccaactgtgagaagatgacccagatcatgtttgagaccttcaacaccccagccatgtatgtggccatccaggccatgctgtccctgtacgcctccgtccgtaccgcccatgtacaagggcttcacaccacggccgagcgggaaatcgtgcgtgacatcaagaagctgtgctacgtcgccctggacttcgagcgggagatggccatggtggcctccagctcctccctggagaagagctacaagctgctcgatggccaggtcatcaccatcggcaacgagcggttccactgccccgaggcgctcttccagccttccttcctgggcatggaatcctgtggcatccacaaaactaccttcaactacatcatgaagtgtgacgtggacatctgcaaagacctgtacaccaacacagtgctgtctggcggcaccaccatgtaccctggcatcaccaacaggatgcagaagaagatcaccgccctagcacccagcatgatgaagatcaagatcattgctcctcccgagcgcaagtactccgtgtggatcagcggctccatcctggcctcgctgtctaccttccagcagatgtggatcagcaagcagaagtatgaccagtccggcccctccatcgtccacgaatgcttctag

SEQ ID NO: 5796 - DNA, 1626 bp, Homo sapiens
  SIMILAR (499)..(1620): 941254mologous to Homo sapiens FKSG30,accession number AY014272,Smith-Waterman Score=1865.
atggtgccatcagcggcggcagcagcagggatgcgctgcctcatcctcaagggtgttgacagcatcggcaagactgagaggaccctccaagagattgggtctccctgtgttgccctggctagtcctgaactgctgagctcaagagatccagtagctgtggactcccaaggtgtggtgggttttttgcattcccttttgtaccggtcatttggcatctgctgtgcataccacacgcagtgcaatgaccatgccagccatgtgtggctcaaggttcctgtatcaggcagcacagctcagctttctcttagttgtaagaaagaaaaagacatcttgcatgaaaatagtacgttgcgggaagaaattgccatgctaagactggagctagacacaatgaaacatcagagccagctaagagaaaagaaatatttggaggatattgaaagtgtgaaaaaaaggaatgataatcttttaaaggctctacaattgaatgagctcaccatggatgatgataccgctgtgctcgtcattgacaacggctctggcatgtgcaaggccggctttgcgggcgacgatgccccccgggctgtcttcccttccatcgtggggcgccccaggcagcagggcatgatggggggcatgcatcagaaagagtcctatgtgggcaaggaggcccagagcaaaagaggcatcctgaccctgaagtaccccatggaacacggcatcatcaccaactgggatgacatggagaagatctggcaccacaccttctacaacgagctgcgtgtggctcccgaggagcaccccgtcctgctgaccgaggccaccctgaaccctaaggccaaccgcgagaagatgacccagatcatgtttgagaccttcaacaccccagccatgtacgtggccatccaggctgtgctgtccctgtacacctctggccgtactactggcatcgtgatggactctggtgacggggtcacccacactgtgcccatctatgaggggaatgccctcccccatgccaccctgcgcctagacctggctgggcgggaactgcctgactacctcatgaagatcctcaccgagcatggctataggttcaccaccatggccgagcgggaaatcgtgcgtgacatcaaagagaagctgtgctatgttgccctggacttcgagcaggagatggccacggcggcctccagctcctccctagagaagagctacgagctgcccgatggccaggtcatcaccatcggcaacgagcggttccgctgccccgaggcgctcttccagccttgcttcctgggcatggaatcctgtggcatccatgaaactaccttcaactccatcatgaagtctgatgtggacatccgcaaagacctgtacaccaacacagtgctgtctggcggcaccaccatgtaccctggcatggcccacagaatgcagaaggagatcgctgccctggcgcctagcatgatgaagatcaggatcattgctcctcccaagcgcaagtactccgtgtgggtcggtggctccatcctggcctcgctgtccaccttccagcagatgtggatcagcaagcaggagtatgatgagtcaggcccctccattgtccaccgcaaatgcttgtag

SEQ ID NO: 5797 - DNA, 1430 bp, Homo sapiens
  SIMILAR (1)..(1113): 871254mologous to Trichosurus vulpecula gamma-actin,accession number AF076191,Smith-Waterman Score=1669.
  misc_feature (1)...(1430): n = a,t,c or g
atggaagaagagatcgccgcgctggtcattgacaatggctccggcatgtgcaaagctggttttgctggggacgacgctccccgagccgtgtttccttccatcgtcgggcgccccagacaccagggcgtcatggtgggcatgggccagaaggactcctacgtgggcgacgaggcccagagcaagcgtggcatcctgaccctgaagtaccccattgagcatggcatcgtcaccaactgggacgacatggagaagatctggcaccacaccttctacaacgagctgcgcgtggccccggaggagcacccagtgctgctgaccgaggcccccctgaaccccaaggccaacagagagaagatgactcagattatgtttgagaccttcaacaccccggccatgtacgtggccatccaggccgtgctgtccctctacgcctctgggcgcaccactggcattgtcatggactctggagacggggtcacccacacggtgcccatctacgagggctacgccctcccccacgccatcctgcgtctggacctggctggccgggacctgaccgactacctcatgaagatcctcactgagcgaggctacagcttcaccaccacggccgagcgggaaatcgtgcgcgacatcaaggagaagctgtgctacgtcgccctggacttcgagcaggagatggccaccgccgcatcctcctcttctctggagaagagctacgagctgcccgatggccaggtcatcaccattggcaatgagcggttccggtgtccggaggcgctgttccagccttccttcctgggtatggaatcttgcggcatccacgagaccaccttcaactccatcatgaagtgtgacgtggacatccgcaaagacctgtacgccaacacggtgctgtcgggcggcaccaccatgtacccgggcattgccgacaagattgcagaaggagatcaccgccctggggccccagcaccatgaagatcaagatcatcgcacccccagagcgcaagtactcagtgtggatcggcggctccatcctggcctcactgtccacctttccagcagatgtggattagcaagcaggaagtacgacgagtcgggcccctccatcgtccaccggcaaatgcttctaggcggactatgacttagttgcgttacaccctttcttgacaaaacctaacttgcgcagaaaacaagatgagattggtatggcnnnnnnnnnnnnnnnnnnnnnnnnnnngnnnnnnnnnnnnnnngggctggccccaggattaaaaaccggaaccgggaaaggggacaccagccggtgggagcaaccttcccccaaagttcacaagggggccgaggactttgatggcccatggtggttttttaaatagccttcccaaatatgaaaggtaagaaggctttgggcctccctgggagggggg

SEQ ID NO: 5798 - DNA, 1534 bp, Homo sapiens
  SIMILAR (1431)..(691): 841254mologous to Ammonia sp. actin,accession number AJ132373,Smith-Waterman Score=1115.
tttttttttttttttacgcagcttaaccagaatgactttaatgcttcttcaaagtttccattttcttcccacagggctttgtttcgaaaaataacaaaatggaggtaataaagttaatgtatgtacaccgttataaacactgtgtcaagtttacggatggcagcaacgggaagttgttacaaagaaagtgactgcggggtggctggagctcagccgccccccccattgagaagattcgtcgtccttgagaagtcgcgtgcttggaggtggagtgtgtctagaagcatttgcggttggacgatggaagggccggcctcgtcgtactcctgcttggtgatccacatctgctggaaggtggacagcgaggccaggatggagccgccgatccacacccgagtattttgcgctccggcgggggcgaatgaatcttgatcttccatgggtgctggggtgccagcgcgggtgatctcttttctgcatgcggtcagcgattcccaagggacatcgtgggtgccccccgacatgaacgttgttggcataaaaggtccttcctgaatgtcgatgtcacacttcatgatgctgttgtaaggtggtctcgtgaaatgcccgccgacttccataccgatgaaggagggctggaagaacgtctccgggcagcggaagcgctcgttgccgatggtgatgacctgccccgtctggcagctcgtagctcttttccagggaggaggaggaggcggccgtcgccatctcgttctcgaagtccagggccacgtagcacagcttctccttgatgtcgcgcacgatctcgcgctcagctgtggtcacgaaggagtagccacgctcagtgaggatcttcatcaggtagtcggtaagatcgcggcccgccaggtccaggcgcatgatggcgtgcggcagcgcgtagccctcataaatgggcacgttgtgggtgacgccgtcgccggagtccagcacgatgccggtggtcctgccggaggcgtagagggacagcacggcctggatggccacgtacatggcgggcacgttgaaggtctcaaacatgatctgggtcatcttctcgcggttggccttgggattgaggggggcttcggtgagcagggtggggtgctcctcgggagccacgcgaagctcgttgtagaaggtgtggtgccagatcttctccatgtcatcccagttggtgatgatgccgtgctcgatagggtacttcagggtcaggatacctctcttgctctgagcctcgtcgcccacgtaggaatctttctgacccataccgaccatgacgccctggtgtcgggggcggcccacgatggacgggaacacggccctaggggcgtcatccccggcgaagccggctttcaccaggccggagccattgtcgcacacgagggcggtggtctcgtcttcgtcgcacattgtgtctagtttctgggcgggtagctacaactgctactctcggctcgggccctggtcgccgcgggagggaagcgaggcttcacttggcgctgtccgctgcggt

SEQ ID NO: 5799 - DNA, 1915 bp, Homo sapiens
  SIMILAR (142)..(312): 981254mologous to Homo sapiens Sequence of beta- actin,accession number AAP61532,Smith-Waterman Score=297.
atgggggacaccccacgccagttcggaggcgcgaggccgcgctcgggaggcgcgctccgggggtgccgctctcggggcgggggcaaccggcggggtctttgtctgagccgggctcttgccaatggggatcgcaggctcaccatggatgatgatatcgccgcgctcgtcgtcgacaacggctccggcatgtgcaaggccggcttcgcgggcgacgatgccccccgggccgtcttcccctccatcgtggggcgccccaggcaccagggcgtgatggtgggcatgggtcagaaggattcctatgtgggcgacaagggcccagagcaagagaggcattctgaccctgaagtaccgcatcgagcatggcatcgtcaccaactgggaggatatggaggagatttggctccacaccttctacagtgagctgcatgtggctcctgaggagcaccccctgctgctgactgaggcctctctgaaccccaaggccaaccacgagaaggtaaaccagatcatgtttgagaccttcaacaccccagccatgtatgtggccatccaggccttgctgtccctgtacgcctctggccgtaccactggcatcgtgatggactccggtgacggggtcacccacactgtgcccatctacgggggggtatgccctcccccacaccatcctgcatctggacctggctggcccagacctgactgaccacctcatgaagatcctcaccgagcgcggctacagcttcaccaccacggccaagcgggaaatcgtgcatgacatcgaggagaacctgtgctatgttgccctcgactttgagcaggagatggccatggtggcctccaaccccctactggagaagagctaggagctgcctgacggccagggtcatcaccattggcaatgagccggttccgctgccctgaggcactcttccagccttcattcctgggcatggagtcctgtggacatccacgaaactaccttcagactccatcatgaaagtgtgacgtggacatccgcaaagacctgtacgaccaacacagtgctgtctggacggacaccaccatgtaccctgggcattgccgacaggatgcagaaggagatcactgccctggcacccagcacaatgaagatgaagatcattgctcctcctgagcgcaagtactccgtgtggatcggcggctccatcctggcctcgctgtccacctttccagcaaattttggatcagcaagcaggagtatgacgagtccggcccctctcatcgtacaccgcaaatgcttctaggcggactatggacttagtttgcgttacaacctttctttgacaaaacctaaacttgcgccagaaaacaagattgagatttggcatgggtttatttgtttttgtttgttttgttttggttttttttttttttttttgggttgaattcaggatttaaaaactgggaacgggtgaaggtgacagcagtcggttggagcgagcatcccccaaagttcacaatgtggccgaggactttgattgcacattgttgttttttttaatagtcattcccaaatatgagatgcattgttacaggaagtcccttgccatcctaaaagccaccccacttctctctaaggagaatggcccagtcctctcccaagtccacacaggggaggtgatagcattgctttcgtgtaaattatgtaatgcaaaatttttttaatcttcgccttaatacttttttattttgttttattttgaatgatgagccttcgtgcccccccttcccccttttttgtcccccaacttgagatgtatgaaggcttttggtctccctgggagtgggtggaggcagccagggcttacctgtacactgacttgagaccagttgaataaaagtgcacaccttaaaaaaaaaaaaaaaaaaaaaaaaa

SEQ ID NO: 5800 - DNA, 412 bp, Homo sapiens
  SIMILAR (19)..(282): 711254mologous to Homo sapiens Human myelin oligodendrocyte glycoprotein gene,accession number AAZ29204,Smith-Waterman Score= 319.
gagacagagtctcgctctgttgcccaggctggagtgcagtggcacaatcttggctcactgcaaccttccccttccgggttcaagcgattctcttgcctcagcctcccgagtaactgggattacaggcacccgccatcatgcccggctaatttttgtatttttgtagagacaaggtttcaccatgttggccaggctggtctcaaactcctgacctcaggtgatccgcccaccttggcttcctaaattgctgggattacaggcatgagccactgcgcctggcccagcctgcacatttggactcttttgctgtttgccaagtgccccaggaggtggacagggcaggttttactggcagccatattttcccaatgaggaagcagcccagagaggttaggtgacttgctcaaggaca

SEQ ID NO: 5801 - DNA, 4145 bp, Homo sapiens
  SIMILAR (2447)..(2617): 701254mologous to Homo sapiens PRO2550,accession number AF130089,Smith-Waterman Score=203.
aaataactaaagatatgtccattctcccaaagggagacacaggtggtttttccaatgattcccttgccctccatggttggatgagtcctgtagaattccagaaccccatttggacacagctaatatccctgctctttgggggtagaaaataaggacaccaagtcattggtagggaggtacaggcccgttcctctgctgctgcagagagagaatgactcaagaaaattgggctaaaatttgtttaaaaaaaaaaaaaccacaaaaaaataagtaaaagaatcacaggtgctgactgattgataattacatcttggaccagccaaatgcctttatttttacgtctatttttttggtggctgtaatcaaatgtgtgtttaaaattcctcattccccactgtagggttctagctgcaattatattacattgccttttagcaggcaactctaccatattcactcatataagctttgattgcagtagctctggatttagtatctatttctaagctggccctatgtaaactatttggtatttgaattaaatgaatattaatgatgccccttggtttttttggttttgaagtatcttcctatgcttgtgatgactgtatgagaaaactaggctaatagtgtaaatagataccattgcttgatctggtgcctgagtggaacttgcctataatgaaattctgagaaattctcatttgtaagtgttggtagtgataggtaaggttattccctccatcccaggagttacactgtacctttggaatgacagtgatgtaccaatgatgtctttctttccactctggtctcaaatcagtaagaactggatattacttttaatttagcttactgttctgtcctaaaaagtaaacattataaaaatgaacctgaaaagagtcttagggagtctgatctcaccatattcatacggtgtgacaggtatttaaagaggggaggcatcactaaagctatttataaacctgaacaaccttttccaagttttcataaagttttaacaatttaaatatccatactgcatctaggaattcaataaatataattgcatatgttgtgctttccataaattaaaatcctcaaatgcatctcaaaccaagatggtatttccacatcatgcctattacaaagcaaatataatagatactatgcctggtcataaaagccaggtaaacccccctaccccattcaaaaggcagcaatatctagtttccctacatctattaaatgagtgcttttctgttaaaaatcagaatatggaaaaaaagtcagttttttcccttatgcaccactcaaaacaagcataatcctctaaatgttttttttttaaatttccttacagtgttatttcttctagacaactgagtgggtggagaaagaaaagtgataaggaaaacattttcatcttttacatcttcctccagcccctaaaattctcatctgacactttgtgacatgtgtagtggtgtcagcatctcttcaaatatagctcccttcacgttggaccctctcaggttggcttcttgaagatcacacccagacagatcacaattctgcaagatgaaaacaatattcatgtaattcatgtggaaatttcaggccttatctatttctgctcagaatgatttctggggcagattaggaaaatgttcttatacaataaaactcagttaatttccggaaaactgatgatacaccaccctaaattaagatgttcttctatctttatttgttacctctagttcaggctgatcaccataaatatgtataaacaaaggttaaagaggaagcatgtcccttgttcttgcatattttataaggagacattgaaaacaggggtccccaacccctgggccacagactgatactggtccatggcctgttaagaatcaggccacacagcaggaggtcaccagtagatgaagcttcatctgtatttacagccagtccctgtatggctcaagttacagcctgagctccacctcctgtcagatcagcaggggcattagattcgcacaggagcgtgaaccctattgtgaactgcacatgtgagggatctaggtggggtactcctcatgagaatctaatccctgatgatctgtcactgtctccaacacccccagatgggactgtctagttgcaagaaaacaaactcagggctcccactgattctacattatggtgagttatataattatttcattatgtattacaatgtaatactagtagaaataaagtgcacaataaatgtaacgcgcttgaatcatcccaaaaccagcccccgactctgatctgtgaaaatattttcttccacaaaaccagtccctggtgccaaaaaggttggggaccactgatttaaaatacagaatggattccaacataataaatacacacacacacacacacacacacacacacaattttttttttgaaacggagttttgctcttgttgcccaggctagagtgcaatggcgtgatctctgctctctgaaacctccacctcccgagttcaagcaattctcctgcctcagcctcccaagtagctaggattacaggtgcccgccaccatgcccagctaatttttttttttttttgtatttttagtagagacggggtttcaccatgttggccaggctggtctcaaactcctaacctcaagtgattcgcccaccttggcctcccaaaatgctggggttacaggcatgagccactgcgcctggccccaaagtaataaatattatcaaaacaattttactatgatccaagaacaacaacaacaaaaggaatgagatggggggaagactttttttttaatctgaaaagattttacttaatcaaattgtgtaatagatttttccattccctagccctagtatttttatagcaaggaactgcccttctttttaaagccccaaaggtacgtatataatacagtgagtttgacagatgtacacaacagtgtaaccaccgcaatttgaagctatttcttaatttgtcttgagatcacggagcaataagatagagattccacttaagtccctggatatgataggggacaatggttagagagaagggtgactaaacgtaacctgttaggagaacaaatgtcagcagctctcccctcaatagtcaacctgatcagtctttgcaatcagagagagggaggcttttgctgctaggccacactgagtacacagtactaaaaccaaggaaaaaaaatatattcttaggtgaaagtaatgtaacaaacaataaataattgtgctcgtgataggattatacttaggccaattctttttgccttgaagttgaaaggggcctgctactctgctaccgagagctatcaagatatctaggcaaaaatattatgaaaaaacattaacagcaagctaaattttgacataccgttctctgctatccaatttataccagatttcatagctaccagccacatgtggctacttaaatttaaatgaattaaaattaaataaaatttaaaaatcaatttctcatttgcactagccaaatctcaagcgctcaatagctatatatgggtggtagctactatactgaacagcacagatatagaacatgtccctcctgcacaaagtgctattggatagtgctgatatagacctatcaacagctatcaagtctgctagctaaactggcaaattaagaagacatacaaatataattctttgaaaaagatgaccaggcaaaattataatctcaagctgaaaaccaaaaaacatatggttccaatttcaaatagacttttcctgaacctgatttcaaacctggatatcatttaaatttctcaagtagtttaagaagtaatctagcccatttaattctattcggaattaaattttatggaaaatgcaatacattagataacacatctatcaaacttatttacttgagaaaaactcaaggaaaaggagagaaatgaaatcaacttagactgaatgtcagatgagtcttccaatccagttttaccagccaactactttgttttgatttcaataaattttgcatgagatgcttagtaagtctagagtaataaaaattcttaaagtgttggtgaactcacctctaaatcagttcctgccagagttgc

SEQ ID NO: 5802 - DNA, 14291 bp, Homo sapiens
  SIMILAR (1336)..(1767): 881254mologous to Homo sapiens pregnancy-specific beta-1- glycoprotein 6,accession number M33666,Smith-Waterman Score=652.
gggaaggacagcacagctgacagccgtgctctggaagcttctggatcctaggctcatctccacagaggagaacatgcacgcagcagagatcatggggcccctctcagcccctccctgcacagagcacatcaaatggaaggggctcctgctcacaggtgaggagagaacttcctgggagaggacaggaggaggaagcagagttcacttgatggggtctcctggggagactcctggggtcctaaaaaataaaaaagccagcacttagggaggctgaggtgggtggatcacgagatcaggagttcaagatcagtctggccaacacagtgtagacgtgtctctaccaaaaaatacaaaaaattaaccaagtatggtggtgtgctcctgtaatcccagctttcgggaggctgaggcaggataatcacatgaacccaggaggcagaagttgcagctagccgagacagcaccactgcacgccagcctgggtgacagtacgagactccatttcaaaaaaaaaaaaaaaaaagaataaaaagaagaaagaaaaaaagggaaagaaggctctgttggagcctggataggggaaaatacaccagagagggacaggggtcaaaataggaaagtcacattgaaccggaattggtaagaggtagtaaaatcttaagtgttctgttttcctgattaatcatcaggggccaccacattttgaaaaatgataataatgactatatcagatgacacctcaaataaaaatgtaaccagggcatgaaacactttcctcagcaaaaaacctcaacaattgggggaaaaaaaacacccagggcatggagggccctgagaactctcacatctacaggagtctgcatcctgttccaggcactggggtgcaaccaacatgacaaaagtctctgtcctcacagagctcacactctcatggggaggaagacagacatgcaaagagatatagaatgtgaggtcaggtgttgacaagaaccctagagggagcagagcagggaaaggtcagaaagggaagacccagggtctctgaagcaggcatcaggaaagaagtctaaggatgccctgatgtgagcaggacctgagggcagtgtggagggggccgtgcggacccctggggaagaggattgcaaacagaaaaatgccaaggtcaggagtgttgaaggaatgggggtcatgctgctgaccttgacctagtaggacagtaggacacacacacatacacacacacaaacacacatgcccttttgtgtgtgtgtgtttgtatgtgtgtgtgtgcatatcttcaaggctgatgattgaagagaccttctcaggacacagggccccatcttttcaccccaatacataggtccaaatattaactgatgctgtctctacctcctagcatcacttttaaacttctggaacctgcccaccactgcccaagtaataattgaagccaagccacccaaagtttccgaggggaaggatgttcttctacttgtccacaatttgccccagaatcttactggctacatctggtacaaagggcaaatgacggacctctaccattacattacatcatatgtagtacacggtcaaattatatatgggcctgcctacagtggacgagaaacagtatattccaatgcatccctgctgatccagaatgtcacacaggaggatgcaggatcctacaccttacacatcataaagcgaggcgatgggactggaggagtaactggatatttcactgtcaccttatactgtgagtgattccgcatgatccctgggtgttggggggcaggggtcatttctacttcacacacacagaattgtcaggcctggactctgcctgtgtcactctctgcattatgtcccatgctggggtttgggcatttagtgcaggacacacacagaggagacacatttcaacagatcagaattcctttcccgcatccagaccctgcagacactcgctgcagaggaaggacagtctgatggggggactcagcaggaggagatcagtctcagccaagcacctcatgccctcttcataaatttgaccctgagaaagaccctggaaaactgagtagggcttggcctgaggggcccactgagataccctcagagaacctcagctctggaagcctcaatcccagacccctgtccctaaatccttgctccaggtaaagctgaggagcctgtgccaggactgggttgtggcttctttggcagggcttactgggaccaaggatttaccagctgtctgaggactgtgtctcctggagctgttcaccagccagggctcagtcctcagagcctcatctgggcaaggacagagctttcttcacctgacactcagagtggagaggacagaaagacaagctttgtaggccatcagccaactgccttaggaggcctaggacactccatagaaagtctaatatccccagaagcagaaacagaagagagaagatgcaccaggtagccgtttgtccacagggatctgacgcaaaggtgctttctcatggaagcaaattaataataaatgctgtttgtgtgaacacctccactgtgccaagcattaagtcagttgactgtgaatactttaacatttattcacagatagcatgaaaagccacagtccatttgccatttagctcatttgattgagagaaaactgaggcacaggaaggcacagtcactgagccacagtcacacaaacacaaaggggagatcggggtcacatgaggtctgtctgcagccacaggcccatcctctcctctaccagaagtgagggcttactgggttccaaggaccccatagtcatttattgactcaaatcctctcttcttaggcatccaaacctcagaggagtgagagcaaatggtcagctgattagtctgtactccagaactaaatcactggcttcaaccgccagagtcagtgcaaaaaaaatgtccaggtctccccctcagatcttaacctccatcactgaatgtgaaatcctgtgtttcccaagtgtccatgtcaccgtcatgagaggatcaaggagaggaccttgttttctttccccactcacaccctgcctcagcacaggcccagtgagagagacacactcaggagctctcacataacaaatgaaggaatggaatgaagaaatggatgatccaaaacctctttagagactggatcttggaatcagaatcctaggaggttctagccacacctgtcccttgtccttcagaggctgacacccatgtttcatccccccactacctcttgaccctaaagccaccccacctcatgcaactctgaagttctttggccaccggagggttctcagggctctttggtcctggactgtggagctgggggcacctggtccctggggtttttgaagtcagtgtctccctcactgctcactgccatggtgtctctgcctctctctgcttctctgtgtccctcatcttcctcccacttcattctgactggcaagccctgtcctgcacagcttcttcctccaaccctaggccttccccagacactccctctaactaggctggctgttctgttcccttcccgctaacactgtggcctggcccacctcccaggaaataggaaaggtgcagaaatcacctggagttgccactcctgccaggcttcctctcgagccaatgtccccaggtcactaagagaaaccttccactgtattcccatccagggctctttccctttgtgaggctgacctgtggacaagaccatgggacagggataggcagttcccccatccacccttgtaattgccagacaagttcctctggcctcctgcacacaaaaaaatataaaataaaataaaatttattgaaatggtggtttgcagtaaagaaagattttaagaactccaagtctgccaaacaggagggtggaggtttattattactcaaatcagcctccccagtggatcaggtgttagagattttcaaggatagtttcaggggcacaggactaaaaaatgagtactgctgattggtgatggaatcatgcgggcggagggaaatgatctgttagtgcttgaatctgcctctaggtaggggccacatgactggctgagccattaggcataggtatggatgaggtcagccggttgtcagaaggcaaaagaatgagaaacatttcaaaagaccaatctcacgttctacaatagtgatgttatctataggagcaattataggagcaattaagcccataggctcatttcacccatttcactagtgactccatcctcaacctgctatggagctcacattctccggtcactttctagagacttctggcttcctgtcaggcataaaacaagcttgaaatttgtcactcggttctaacactaagtaaaaagctgaacaaactcaaaagtcaacaactcattaaaatccttcagagatggctgggcacagtggctcacgcctataatcccagcactttgggaggctgaggcgggcacaaggtcaggagatagagaccatcctggctaacatggtgaaaccccgtctctactaaaaatacaaaaaattagctgggcatggtggtggtcacctgtagtcccagctacttgggaggccgaggcaggagaatggcatgaacccaggaggtggagcttgcagtgagctgagatcatgccactgcagctggggtgacagagcgagactctgtctcagaaaaaaaaatgctgttagagaaatgaagaatgcttttgatgcttactgatagaccgcacagagctgaggaaagaatccctagcttgagaatgtgtcaatagaaacttccaaaactgaaacaggaaagctcaaaaagagtggggaaaaaaagcggaacaacatattcaacttcatatttaatattttgttttgacaatagcaatttttaaattttgtagttgtgggacaactacaaaggctgtcacatacacttaacgggaatacttgtggtttggggaccagatggaggtggccaggtaggtcctatctcatggttttactgcctgtgccacatacaactatttcctcatgatgatgccgttttcataagttggagttcttcgtgtggggagacacaagagccattggcatctcacttagactcttcctaattcacacaaacttaaattttagtggtgtttcctgaccttaagagaaaatgaagaagacatttcacatacctgttttggggtcctccccatgttttgtaactctgcacagaaattagaagcaggttctttctatatttactaacataacacacatcacttcttttaatttggcatccttcctccttttatgtaattgacacactaaccagttcggtccttttaacaggactctctctacttaaggagttgctaatttcaaatcacctttggcatctttctttgagcataatgtgatcctgctggaattcatggcacacctaaaccttattttggtctcaagagaaatatgactaccagcaattgatcttagatgtttggaccatcagtaaaaatttccacttatgaaaacattttaaggtttcctccaaattttttttgttactagagtcagaatataacatgaggtctaaactcctgacaactttttatgggaaaattacagtattacaaattgagcatcggaaatccagaaatccacaatctgaaatgctcaaaactcaacacttctgaccactgatgtgatgctaaaaagaagtgctcactcgcgcattgtggattttaaatttttcagatttgggatgctaaaccagtacatatactgcaaatattccaaaataaaaaaaattagaaatccaaaacactttgttttaagctttctgcataaggagcactgtatctgcatgaagtataggcacgaggctgcacaggagatctctagaacctcctcatcctgcataacagaaaccgcacacccacggaacaacgccctatacccgtgatttcagttgctgcaaactactattctaatctctgattccctctggaatccactgatatgaggtacatagagtagtcaaactcagaatcagagagtagaatgtctaataagagaaagtatctgcaagacttcttcccaaatattggtctaatatccaccaaacacataaggtccctgagggccagacttctgtcatctgttcatgtttgccctttccaccagtcagttctgcatttgcaaacatcaacatgtatttctagaaagatccatatggtcctcaactgccctctacagggggaagggagcatcatggacccagaacagggatcatggtcttgggccaaacctatcagctcttgcctgtccctttcactctttgtaggtcattccttggactctgctctatctttagagtcattggctcaactcagtcactatgagacacctggaaaactgccccaccttgtggctccactgcctgatgactgaactgacctccaggcctgactctggtctcccctgtgttatttctgctgaagtacccagttccaggccaggctttctaatacccaaagggcttaaggacaatgggaagttccatcatccatctctaggatgtccttggcaagggaagctgatgagaaaacatacctcagggggcaaagtgagactgaaactaacaagattccagcactgcatgccccaagtaaggaccaaaaggtgggccaggcaggcagttggagacggagggactcagagaggcaccaggggctgtgactgctggtcctgtgtctttccatgacccaatgctgctgctcaattcacatttgagaaagtccatgcttctcctacataaagcaggcagcctcacaatcactgagccctcaggttgccatgcatctgtcttgtaacacacacacctgccatgggcttttaaggacttgggtgggctgagaggttggaaatgccaactctgattgaaaaatgcctttggaggaatcaaaggtgccacacagggcaatcttctctctgttttctgcacagcggagactcccaagccctccatctccagcagcaacttaaaccccagggaggtcatggaggctgtgcgcttaatctgtgatcctgagactccggatgcaagctacctgtggttgctgaatggtcagaacctccctatgactcacaggttgcagctgtccaaaaccaacaggaccctctatctatttggtgtcacaaagtatattgcaggaccctatgaatgtgaaatacggaacccagtgagtgccagccgcagtgacccagtcaccctgaatctcctccgtgagtatcttctgttcctctgtgagccaggctgccatcccaaatacaagtggccagaggccaggcctctcagtccctctcaggtccaagtacagagacctttatccctgaacatcaaagctggccatgactttctgctccaggcaaaccagagtaggcctaggcttgatcaacaataagagagaagaggcttctcctgtcatgggagactcaggttccacagcttgtgatggaagaaacaggtgaatgtctcaggctccagatcagtgaacacagcggggatttggctgggacttcagtgttgcaacttggctcacagggtcactgtgactgtgtcccttccacagaccaggattttcccttccctctgacaatatcgcctgtgacattattctctttgctccgcatggcctggatgctcccaccgtttcttcctcatacacctattaccatacaggggaagtccccaagctctcctgcctcacagactctcacccactggcagagcattcttggctgattgatgggaagttccagcaatcagcacaagtgttctttataccccaaatcactaaaacatatagaggggtctatgtctgtttcatccataactcagccactggtggaacaaatctcataatcaagaggatcatagtccctggtaagtggatccctggagcattggcaccatgttttccagtaaagtctatctagctgtcagggaagagccacctgctctctgcaaagggagagggaaaatcaaaacccaggaaagggaatatgtttctgctccaaaaccaccagcttctgcctgtccccttcactctttctagatcattctttagacaatacactaacaatgaacaatctgaaaggaagttaaggaaagaatttcaattcacattaacatcaaaaggaataaaatattttggaataagtttaaccaaaaaggtcaaatgattataccctgaaaactacaaaacattgctgaaagaaattaaagacgatatcaatatatggaaacacatttcattttcatggattggaagaagcaatattgttagaaaggcaatactacccaattgagttgcagattcaatgcaacccctaccagaatcccagtaacattttttgcagaatttagaaaactctgtcctaaatctgagctgacaggctcttcttaatgactgccacaacacaaacactgagaaaaagaagcaaccagaaaaggtggaaagttctgatgacatagaaaatagcaatcagcctttctcacatcccaaagccttcaaaaatatacgagtgcagcatggccactatggaattcaccgaaaactaatcaccaagctagaaacatggtgagagaaaaaaaagggcaagaatatatctggcttatcacctcccacttttgcctactaatctgatgctgaaaagaaatgctcactgaagcattttacattttgaatctttcagatttgggatgctaaaccagtaagtatatgacaaatatttgagaatcaaaaaatatcagaaatccaaaacactttttgtcctaaaacttatgcataagagataatctgtgtgaactataggcatcaagctctacagcagatctctagaacctctccaacttgtataactgaaactgcacacccatgaacaacttctgattctccccactcccagctcctggcttccagcagcctcgtctcatattcaatctggaatcaacttacatgaggtccctagattagtggaacccatggaatcagagagtagaatgtccaatgaaagaaaatatttgcaaaacttctctccaaatttgtctcatatccatcaaacacacatggtccatgaggactagatttccagcagttcattcccaccctttccaccactcagttctgcatttgcaaatgtccacatgtatttctagaaagatccacatggtcctcacctgccctctgcagaaggagaggaaacttaaagaacccaggacagggaacatgcttctgctccaaagccaccagctcttgcctgtccccttcactctttctagatcattccttgcactctgctctatctttagaggtcactggttcaagtaagtcatcatgaaacacctgcaaaaaaactgccccacctggtgcctctagtgcctgatgactgaactgacctacaggcttgactctggtcttccctgtgttatttctgctgaaacatccagtcccaggccaggctgctcagtatctgcagggtttcaggacaatgggaagtcccattattactcatctctagaatgtccttggaaatggaagctgcagagaaatcacatctaggggggcaaagtaggatgtaatttggaaggggcccagcagttgcacattccaggtaaggaacccagggtgagccagccagtcaactgattatggagggactgggaggggtaccaggggctgtgactcccactgacgtgtctgtccatgacccaacactgctgctcaattgacacttgagaaagtctgtgcttccctaagacagagcaggaggcctcacagtctttgagcccttagatcatcatacatctgtcttgtgacacatgcaccagctactggctttcaaggactcatgtgggttgacaggtgggagatgccaactctgaatgaaggatgcctgtggaggaatcaaaggtgccacacaggacaatcttctgttatccacacagcgaagctgcccatgccttacatcaccatcaacaacttaaaccccagggagaagaaggatgtgttagccttcacctgtgaacctaagagtcggaactacacctacatttggtggctaaatggtcagagcctcccggtcagtccgagggtaaagcgacccattgaaaacaggatactcattctacccagtgtcacgagaaatgaaacaggaccctatcaatgtgaaatacgggaccgatatggtggcatccgcagtaacccagtcaccctgaatgtcctctgtgagtatcctttgttcctctgtgggccaggacaccagcttaactccaaacgaccagaggccaggcctctcagtctctctccggtccaagtatagacaactttacttctggacatcagacctggccatgactccctgccctgggaaatcctgggtaggcacagccttaaccaagaatataaggggaggggcgctcttgtcatgggacactaggggcccacagcttgtaatgagagaaacaggggaatacctcaggcttgggcttagtaaacatagatgggatttggctgtcacttgaggttgtgtcttggttcagagggtcactgtgtccctttaagagaccaggagcatccccttcccttggatgacatcacctgtggctttattctctttcctccagatggtccagacctccccagaatttacccttcattcacctattaccgttcaggagaaaacctcgacttgtcctgctttgcggactctaacccaccggcagagtattcttggacaattaatgggaagtttcagctatcaggacaaaagctctttatcccccaaattactacaaatcatagcgggctctatgcttgctctgttcgtaactcagccactggcaaggaaatctccaaatccatgatagtcaaagtctctggtaagtgggatcccagcatccttggcagtaggggtttatgtggagtctatcttggcttttcagagagagtcaggaaaacatttttattcccaacctgtgtcccatgggcacaagcaaatcccaaattctcctcctgaaccctcccaatatgtctctacagactctcttctccttgtgactctgttctcttatggctgaccttgtgcctggcctgaaaaaggtagggagggggctttatcagccctgagccctatgtggtagaagaggcttcagagagggacaagaaggagagtcctcaagatcaagttgcttctcgctgtcaccgacacatgccccttttgccacgtctttgttttcttgtacctattccatggagctacaagggaacatctggagggtctgaaaacaagcttcacactttttcccccaaatgaggagggagggaaggccctttcggtgagggaggagcagctcagactctgctttcctgctctgctccgggctcctctggtgactggcctggccctgcctgactccacctggggtggaaccaacatgtgtggagaaagggccctggtggcctgtcctgaagttggctaaatcgagctgccagttgaagccaagcctcccccgggccaggctgcagggaaataagaagagagggagcttcagggctgactcctgagctgcatcctggctctgaagtcaccagctgtatgaggctttgggcacagcacgtgggacacagcacggaggacagtgactgatgcagagctagagaaatagggagattcacccctggggctctgcatggcaggaaaggggcagtgccaaaaagtgtgtaattatagagagggcaagaccacgagacactttatatatatctaatattagacttaccattaactatttctatgtgtgcaatttagtgttgtgtaaccatcacactatccatttccagaactttttcctcttaccatattaaacctctgtacccaataaacagtaactctcactccttcttcccctaacccttagcacccatcattctactttctgtctctatgtaactggctattctaactatcttttataaatggaattatataataattatccttttgtgtctggcttatttcagttggcataatatcttcaaggttcatccattttgcacgatgtattgtaattttcttccttgttaaggttgaataacatttcaatgtatagatacatctcatttgcctacccacttatctttcaatggacttttcagttgtttccatttttggctagtgtgagtaatgcttctctgtacatcagtgtacaaatatttcttcaaatttctttcaattctatagggagtatgtccagaaggggaattgctggatcaaatggtaatttattgtttaattttttgaaaaacagccacactactttttacattggctataacatttcccattcccatcagcaatgcactagagctccaatttttccatctacttggaaacacctgttgtttagtgttgctgtcattgttgttgtttatcaaagccatcctaaagtgtgtgaggtgttgtaacattgtggttttgatttgcatatctctaagtattcgtgatgctgaggaactttgcatgggctatataaaaggttttgatttttatgaagtctgatttatccattttatttgttgcctatgcttttgttgttacaaccaagaaatcattgtgaaatccactatcatgaagtttttcttctaagagttgtatagtttttactcttacatttagatctttgatctattgtgggttaatttttgtacatggtgttaggtaaaggttccactcttcttgcccttggatatccacctttcccaatatcatttggtgagaacactgtcccttccccattgaacgatcttggcacactcgatgaaaatcatttggccatatatgcaagcatttctttctgggctatgatatttcattaatttctatgtcctcctttatgccagtaccacactgtattgattactggggctttgtagtaaatgctgaaatcaggaagtgtgagtcctccagcttcattcttcctcttcaaagctgtgtgtctatttagagtcatgagatgcaatataaattttaggacagatttttctttttctgcaaaaatgtcactgagattctgataggaattgtattgaatctgcagctcactttgggcagcactgtcctcctaacaatattgagtcttccaattcatgaacacaaaatgtctttcaatttattgatgtcatctttcatttctttcagcaatactttgtagatttcaggtataatcatttcacctctttggttaaacttattcctaaatattttattctttttgatgtgaatataaattgaaattatttttcttaatttcccttcagattgttcatggttagtgtattgaaatacaactgatgtttgaatgttgattttgtattgtgcaacattactgaatttattaattctaataggtttgttccatctttaggattttctacaaataagttcaagttatctataaacagaaataattttactccttccttccaatttgaatgtctttttaaaaattcttccctaatttttctgattagacctttcactactatgttgaataaaagtgtcaatagcaggcatccttgtcttttcctgctcatacagggaaagttttcagtctttctctgttatgtaagatgttagcattgggtttttcacatattgcctttatgttgaggtggttgccttccattcttagaatgtttttattatgaaaaaatactgaatttcatcaaatgcttttattgattcaatcttcttactgattatagttatattcatatttttgtgtgtttctaggagtttgtctatttcatctaggttatccaatttattggcatacaattatttatagtactttcataatcattattttattagaattggtagtaatcgcttcatttttcttttttctttttcttttaagacagagagacaggctctcactctgtaggccaccctaggatggaatacagtggtgtgattatggctcactgcagcctcaacctcctgggctcaagcaattctccttcttcagcctcccaagatgctaggactacaggtgcatgtcaacatgcccagctaattggttttttttttttttgtagagacagcatctccccaggttacctatgctggtccaaacacctggtttcaagaaatccttctgctgtgacctcccaaagtgctaggattaaaacatgacccaccatg

SEQ ID NO: 5803 - DNA, 800 bp, Homo sapiens
  SIMILAR (392)..(535): 951254mologous to Homo sapiens Amino acid sequence of a human secreted protein,accession number AAY19459,Smith-Waterman Score= 238.
  misc_feature (1)...(800): n = a,t,c or g
aatgatcttcctgctcataagtatttggtatcacancaggctattgccccccttagggcgtgatgagagttaggagagtcaatgtaaaatcacataacctatttgtcaaaaataatgttaaatccagatagttctttcaaattaaatttttaaagctgtaataagactgggcatggtgactcatgcctgttatccccaacactttgggagtccagggtggggagtattgcttgaggtaagaagtttgagactagcctgggtcccatagtaagaccctgtctcttaaaaaataaatactatctttctctctggcctctccatccctccagacaatcactgaattacaatatttgcttaacagtagattaatgtcaattttctggaattttatatgactgatataacatgtttcctcttttcatacctgagtactctcatgagccctatttatttagatgttcttcttttatctttactattatttttatttcacatagcaggaatgcatattttgacattcatcaatcatgatatatgagtagttcattctttttatcttagaatatgacatgctatggaaatcactgtatacgaattcatatgtttacggatacgttatccattcaaagccagtaagatcttctcaatgtataacgctacagtacttttccacatttagtgcgacaggtaattgggatcctgaattggtatcctcgagagatctgttggggtatgttctgttatggtatgtatagtcatatacatacgatacgttatatcatcgtccgtcgatgcgccac

SEQ ID NO: 5804 - DNA, 465 bp, Homo sapiens
ttttacaggaacacagatttgatgttttaataaaaatacgatttctacaaaaggtgcttaacacggcccaggacgggctgtccgcgtggagtcagccgtaggacccctgaaggatttacaaagacagagccggctcaccagcacactcctgccagcaccgggacccactgcgaacaagtccacgtggtcctcattctcttccctggggacagggcagcacagtcagatgctgagactgaggccacacacatgggggcgccttcctgccttggcccggcccagctgcctctggagccaggaggccgtggcagccacaccacaagtgtggattccagacacgattctgtggaggggttccgggattccagacagactgaatctccatggaatgatgaaaattaaaatttacttgattatggaagtctctgatttattccagccaaatattagatgagccctcgtgcc

SEQ ID NO: 5805 - DNA, 3638 bp, Homo sapiens
  SIMILAR (1)..(2217): 991254mologous to Homo sapiens leucine zipper-EF-hand containing transmembrane protein 1,accession number AF061025,Smith- Waterman Score=3728.
  misc_feature (1)...(3638): n = a,t,c or g
atggcgtccatcttactgaggagctgccgcggccgggcgcccgcccgcctcccgccgccgcctcggtacaccgtcccgcggggtagtccaggggatcctgctcatctcagctgtgccagcaccctggggttgaggaactgcctgaatgttccatttggctgctgcactcccatccaccctgtgtacacatcctccagaggcgatcacctcggctgttgggctctgaggcccgagtgccttcgcatagtgtcgagagcgccatggacctctacctctgtgggttttgtggctgtgggacctcagtgccttcctgtgcgtggctggcactcttcgcgccctgttcgcgatgactcggtagtagagaagtccctcaagtccttgaaggacaagaacaagaagctggaggaaggcggcccggtgtacagcccccccgcagaggtggtggtgaagaagtccctggggcagcgggtgctggacgagctgaagcactactaccatggcttccgcctgctatggatcgacaccaagatcgcggcacgcatgctctggcgcatcctcaacggccacagcctgacccgccgggagcgcaggcagtttctccggatctgcgctgacctcttccgcctggtgccgttccttgtgttcgtggtggtgccgttcatggagtttctgctgcctgttgctgtgaagctcttccccaacatgttgccatccacatttgagactcagtcactcaaggaggagaggctgaagaaggagcttcgggtcaagctggagctggccaagttcctccaggacaccatcgaggagatggccttgaagaacaaggcagccaagggcagcgccaccaaagacttctctgtgtttttccagaagatccgggaaacaggggagaggcccagcaatgaggaaatcatgcgtttttccaaattatttgaggatgagctgaccctggacaacctgacacggccgcagctggtggccctgtgcaagctgctggagctacagtccatcggcaccaacaacttcctgcgcttccagcttaccatgcggctgcgctccataaaggcagacgacaagctgattgctgaggaaggggtggacagcctgaatgtcaaggagctgcaggcagcgtgtcgggcacgaggcatgcgggccctgggcgtcacggaagaccgcctgaggggtcagctgaagcagtggctggacctgcacctgcatcaggagatccccacatcgctgctcatcctgtcccgggccatgtacctcccggacaccctctctccagccgaccagctcaagtccacactgcagaccctcccagagattgtggcaaaggaagcacaggtgaaagtggccgaggtggagggcgagcaggtggacaacaaggccaagctggaggccacgctgcaggaggaggcggccatccagcaggagcaccgtgagaaggagctgcagaagcgctcggaggtggcgaaggattttgagcccgaacgtgtggtagctgctccccaaaggccggggaccgagccacagccagaaatgcctgacacagtcctgcagtcagagaccttgaaggacactgccccggtgctggagggcttgaaggaggaagagatcacgaaggaggaaatcgacatcctcagcgatgcctgctctaagctgcaggagcagaagaagtcactcaccaaggagaaggaggagctggagctgctgaaggaggatgtgcaggactacagcgaggacttgcaggagatcaggaaggaactttcaaagactggtgaagaaaaatacgtggaagaatctaaagccagcaagagattgacaaaaagggtgcagcaaatgatcgggcagatcgatggcttgatctcgcagctggagatggaccagcaggctggcaagctggccccggccaacggcatgcccacgggggagaacgtcatcagtgtcgctgagctcatcaacgccatgaagcaagtcaagcacattcccgaaagcaagctcaccagcctggccgcagcactggatgaaaacaaggatggcaaggtcaacatcgacgacctcgtcaaggtgattgagctggtggacaaagaagatgttcacatctccaccagccaggtggctgagattgtagcaacactggaattagaggagaaggtggaggagaaggagaaggccaaagagaaggcagagaaggaggtcgcagaggtgaagagctagaaccactggcctgggcacctgtcctcctgctgtgccgtcaccctggcaagggccgtgagggcgattgctttgtggtgattctcagtggctcatctaatattttggctggaataaatcagagacttccataatcaagtaaattttaattttcatcattccatggagattcagtctgtctggaatcccggaacccctccacagaatcgtgtctggatccacactgtggtgtgcttgccacggcctcctggctccagaggcagctgggccgggccaaggcaggaaggcgcccccatgtgtgtggcctcagtctcagcatctgactgtgctgccctgtccccagggaagagaatgaggaccacgtggactccgcccacacagagctggctgctgtgcccaccctcaggggcgtcaggagacacagcctggcctcctcagggctgaagatgcctccattcgcctgtgggaccttgatttctagatttcagtgtcaatagacctgtcttcctggcacactttcagtcggatgtggggtcattgtgggagacagaggtgtctgccatctctgtggcctctggagagtgacgtctccctgctgggagtgctggttctcacgtgcggtttcccttgtgtatcggagctctttctcggctttctatttcccccagttctttaagcagtcaattggcacagagtttcccacgggggctgcagtggattcactgtgtcagggatgagcctggcttgggggttggtggggctctgaagcgcatttggggttctttgtagcttctaatgtgaggtttgagtccagtgcgcccacagcagcatgcccttctcaccccttgcagtgttgcaggctcaggcccctgggctccttcagcaagcaggctagtcaatgaggcatgaggatccggcacagggcatcccctggggcttcaagggcaatacccccgtgcttagggtttgccctgtgccctctgggtggggtggccctcccccgaactcggcaaaacatgcccaggctgncccagggcgtgggccaggtggtgtccctgtggcaacctccatcctcctgcccagccggctgtgtcacactcatctttttaaggtcaggttggttccctggcaaaaatgtacctcccaggggcctcccaagcataggatttggaagacaggaacggcacaggcgtcccaggaaagcagctgcactcagacaatgccttctccattacttgaagcttctttctgttcagccattaaagaaacttgacaaaataggaacaggagatatttctcaattgtaaacctttgtgcagggacagttggcttccagaggctttcagctttcagttatttgagaagtttgttttagatccttaactaatatttatgaattctctcaaaaaaaaaaaaaaaaa

SEQ ID NO: 5806 - DNA, 836 bp, Homo sapiens
  SIMILAR (4)..(198): 601254mologous to Homo sapiens Secreted protein encoded by gene 94 clone HPMBQ32,accession number AAW88627,Smith-Waterman Score=197.
ttggagatggagtctcactctgtcacccaggctggagtgcaatggcgtgatctaggctcactgcaacctccgcctcccaggttcgagcaatcctcctgcctcagcctcccaagcagctgggaccacaggcacacgccgccacgcctggctaagtgtttgctcttaaatacacaaaatgcactgaaccagcaaaaacaaagtcccaggtctgaggagctctgaggatgatgcctgtgatggcctctggccagctctccaggatactgagagagcaggtcaggggaggccttctccaggctgggcagtgggaaggccctctggaccgggggagtgagtattcaggggacaaaggcacttacccgggtctggagccgccacggagccagggcacagcctagtttgggggattcctctgtcactggggtaggatctcccaacaagaggcggctttatgttccactcacgaagaggccagagctctcagatcttccccaaaacctaatcaggcctctcaccagcgtgttggaggccactcctggccatcatctccaactctttaccccaacctggcaccttgtagggggctagaagggtgaggggaggtgtctttcacttatgcttaggtcactcttagaggactatcctcaaacttgaggtgacagggaactcttcacgggggcaggatttgatgttttgtttttagccatgtttgtcaatgacaatgtcaatttctagttccaatttgtacccttgtctcatttctacattaaaaacaaaaaacaatcatctgtcataaaagttcagagtaagctgggtgtggtggcacatctcgtgcc

SEQ ID NO: 5807 - DNA, 217 bp, Homo sapiens
  SIMILAR (21)..(71): 881254mologous to Macaca fascicularis unnamed protein product,accession number AB046020,Smith-Waterman Score=75.
accatgcggaacctggagaacgcctggagaaggcccagatgaaggcgcaggaggccgagcacattaccacgtgtacctgcagctcaaggcctatctaatggtagcagtacctagaggagaccttggttcgagagcgcaagaagcggaacgctacataagtgagtgcaagaagcgcgccgaggagaagaaactgggaactgagcgcattgagcgcaag

SEQ ID NO: 5808 - DNA, 896 bp, Homo sapiens
  SIMILAR (147)..(887): 671254mologous to Mus musculus putative,accession number AK009864,Smith-Waterman Score=790.
aagacaggcggatccatctgaaggtcaggaatttgagaccagcctcgcccaacatggtgaaaccccatctcgaatgcggccacggcttgggcgggactaaggctgggaacgagcccaccgattggttcagaactacgcggcgaatggcggagaagctgaggcgggtgctaaccaggggcggtgcggcctggtccggggaggagaacatgcctgccgccggaccgcctttgctgctgctcggtacaccaggatctggaaaaacagcgctgctatttgctgcggccctagaggcggcgggggagggccaaggcccagtcctcttcctgacacgaaggcctcttcaaagcatgccccgcgggaccggaacgactctagacccaatgcgactccagaagatccgcttccagtacccaccctcaacccgagagcttttccggctcctgtgctctgcccatgaggccccggggccagccccctcccttctgctgctcgacggcctagaagagtacctagcggaagacccagagccccaggaagccgcctacctcattgccttacttctagacacagctgcccacttcagccaccggcttgggcctggccgggattgtgggctcatggtggccctccagacccaggaggaagcaggtagtggggacgtcctgcacctggcactgctccagcggtattttcctgcccagtgctggctgcagccagatgcaccaggtccaggagagcacggcctccgagcctgcctggagccaggcgggctgggccccagaacagagtggtgggtgactttccgatcagatggagaaatgatgatcgctccgtggcccacccaggctggtgaccccagctcaggcaagggttcaagctctggaggccagccctga

SEQ ID NO: 5809 - DNA, 1850 bp, Homo sapiens
  SIMILAR (462)..(1661): 961254mologous to Homo sapiens erythropoietin receptor precursor,accession number M34986,Smith-Waterman Score=2039.
acttagaggcgcctggtcgggaagggcctggtcagctgcgtccggcggaggcagctgctgacccagctgtggactgtgccgggggcgggggacggaggggcaggagccctgggctccccgtggcgggggctgtatcatggaccacctcggggcgtccctctggccccaggtcggctccctttgtctcctgctcgctggggccgcctgggcgcccccgcctaacctcccggaccccaagttcgagagcaaagcggccttgctggcggcccgggggcccgaagagcttctgtgcttcaccgagcggttggaggacttggtgtgtttctgggaggaagcggcgagcgctggggtgggcccgggcaactacagcttctcctaccagctcgaggatgagccatggaagctgtgtcgcctgcaccaggctcccacggctcgtggtgcggtgcgcttctggtgttcgctgcctacagccgacacgtcgagcttcgtgcccctagagttgcgcgtcacaagcagcctccggcgctccgcgatatcaccgtgtcatccacatcaatgaagtagtgctcctagacgcccccgtggggctggtggcgcggttggctgacgagagcggccacgtagtgttgcgctggctcccgccgcctgagacacccatgacgtctcacatccgctacgaggtggacgtctcggccggcaacggcgcagggagcgtacagagggtggagatcctggagggccgcaccgagtgtgtgctgagcaacctgcggggccggacgcgctacaccttcgccgtccgcgcgcgtatggctgagccgagcttcggcggcttctggagcgcctggtcggagcctgtgtcgctgctgacgcctagcgacctggaccccctcatcctgacgctctccctcatcctcgtggtcatcctggtgctgctgaccgtgctcgcgctgctctcccaccgccgggctctgaagcagaagatctggcctggcatcccgagcccagagagcgagtttgaaggcctcttcaccacccacaagggtaacttccagctgtggctgtaccagaatgatggctgcctgtggtggagcccctgcacccccttcacggaggacccacctgcttccctggaagtcctctcagagcgctgctgggggacgatgcaggcagtggagccggggacagatgatgagggccccctgctggagccagtgggcagtgagcatgcccaggatacctatctggtgctggacaaatggttgctgccccggaacccgcccagtgaggacctcccagggcctggtggcagtgtggacatagtggccatggatgaaggctcagaagcatcctcctgctcatctgctttggcctcgaagcccagcccagagggagcctctgctgccagctttgagtacactatcctggaccccagctcccagctcttgcgtccatggacactgtgccctgagctgccccctaccccaccccacctaaagtacctgtaccttgtggtatctgactctggcatctcaactgactacagctcaggggactcccagggagcccaagggggcttatccgatggcccctactccaacccttatgagaacagccttatcccagccgctgagcctctgccccccagctatgtggcttgctcttaggacaccaggctgcagatgatcagggatccaatatgactcagagaaccagtgcagactcaagacttatggaacagggatggcgaggcctctctcaggagcaggggcattgctgattttgtctgcccaatccatcctgctcaggaaaccacaaccttgcagtatttttaaatatgtatagtttttttg

SEQ ID NO: 5810 - DNA, 1197 bp, Homo sapiens
  SIMILAR (934)..(566): 601254mologous to Mus musculus putative,accession number AK009864,Smith-Waterman Score=365.
tcagacccccatgcccttcctttgtcgcccctccccagcggccttgctggcggcccgggggcccgaagagcttctgtgcttcaccgagcggttggaggacttggtgtgtttcttgcgctccatgcgctcgttctccagtttcttctcctcggcgcgcttcttgcactcacttatgtagcgttcccgcttcttgcgctctcgaaccaaggtctgctctatgtactgcagctggttcttggcaatgtcccgggcattgagggcctcttggttcaccacgtgcagtgcctccagctcatgtttggtcctcaccacctcagcctccatggagtccagccggttctccaagttgaggctctcgtccattagataggccttgagctgcaggtacacgctggtaatgtgctcggcctcctgcgccttcatctgggccttctccaggcggttctccaggttccgcatggtcttggccacctccgtgtgtctgttttgccgctccgccatctccagaaggcgcaggctgtgctgcagctggagctcctccagccgcctctgccgcaacaccacctggctgcagccagcactgggcaggaaaataccgctggagcagtgccaggtgcaggacgtccccactacctgcttcctcctgggtctggagggccaccatgagcccacaatcccggccaggcccaagccggtggctgaagtgggcagctgtgtctagaagtaaggcaatgaggtaggcggcttcctggggctctgggttttccgataggtacttttatagaccgtcgagcaccagaaggaagggggctggccccgggtcctcatgggcagagcacaggaaccgaaaaagctcccgggttgagggtgggttctggaagcgcatcttctagaagcagaaacagaaggaaagggccggattcagcacaggaagccagactccttaaaagtaaccttgcctccttgcatactttcattggttccaggatgaaccagttcagagctgttaaatattcttatattcgcccgtttttccagcactcatcactgccgagtattagtcgagggcaagccatttttgcttgtttgtttttggaaaaatctctagcgcagtttttccacggaaaaccctcccccagcattctcggtctgaccccatcgaattccgccgcttggggacagactctagaagcgcgt

SEQ ID NO: 5811 - DNA, 872 bp, Homo sapiens
  misc_feature (1)...(872): n = a,t,c or g
cccgcccgaccctttgtggaaagtattgccacccagtatatgaccaacaagcaagaccatgacagaatggccagccagtggaccaaaggaatccgctccataaatgggggtttcacaattcttacatttttttgtcggtcacagaagagagctgcttatgattttgaaggggtcagggagggtgggagttggtaaagagtagggtatttctataacagatattattcagtcttatttcctaagattttgttgtaacttaaggtatcttgctacagtagacagaattggtaatagcaacttttaaaatggtccattagtccggcaatattagctgaaatgtagtaccagaaaagaatgtaccatttggacatttcgggttcagttgcttgtagtccggtaaatttaaaacgggcttaaatttgggtaccaggttaccacatatgggccatttatgtaaaagtccctctaagacctacatacttttttgtttaaaaacaaaattggaanaaaattgttttttcccccttctgtggaaggggaacattgatatttaaccagagttttttagagattgtcatcctcatatatatataaaatgggacaccgtgggctattaaaacacccttataaggagatgagtagttgcgtttttatttttattatggcccattctactttggtttaaaaaaggtctgaatcaggacttgtgaaaacctgtagtgaaataccttaagctgttaactaactgtaaggccgtggaataggagttgctcagtggattggttctatgttgtggactacttaagtctgcatttgttactgtgctaataaacaatatttaaaaccacctaataaacaaaaaaaaaaaaaaa

SEQ ID NO: 5812 - DNA, 491 bp, Homo sapiens; identical to SEQ ID NO: 5462
  misc_feature (1)...(491): n = a,t,c or g

SEQ ID NO: 5813 - DNA, 462 bp, Homo sapiens
  misc_feature (1)...(462): n = a,t,c or g
tccggaattcctgggtcgacccaccgcccgaagcagtggacaagaaggctgctggagctggcaaggtctccatgtctgcccagaaagctcagaaggctaaatgaagattatccctaatacctgccaccccactcttaatcagtggtggaagaacggtctcagaactgtttgtttcaattggccatttaagtttagtagtaaaagactggttaatgataacaatgcatcgtaaaaccttcagaaggaaaggagaatgttttgtggaccactttggttttcttttttgcgtgtggcagttttaagttattagtttttaaaatcagtactttttaatggaaacaacttgaccaaaaatttgtcacagaattttgagacccattaaaaaagttaaatgagnnnnnnnnnnnnnnggggcggccgttttaagggatccaagtttattaacccgtgcttgcaacgttn

SEQ ID NO: 5814 - DNA, 258 bp, Homo sapiens
  SIMILAR (21)..(110): 1001254mologous to Homo sapiens protein x 0001,accession number AF117230,Smith-Waterman Score=154.
  misc_feature (1)...(258): n = a,t,c or g
agcaggacgctgcgcacaacatgggcaaccacctgccgctcctgcctgcagagagtgaggaagaagatgaaatggaagttgaagaccaggatagtaaagaagccaaaaaaaccaaacatcataaattttnacaccagtctnccgacatcacatacatacctaggtgcggaatttaattcagaaagatagaacctttgctgttcttgcatacagcantgtacaggaaagggnagcacagttttggacaacagcagggnt

SEQ ID NO: 5815 - DNA, 980 bp, Homo sapiens
  SIMILAR (453)..(539): 891254mologous to Oryctolagus cuniculus elongation factor 1 alpha,accession number U09823,Smith-Waterman Score=140.
cggttttcgtccgggcgacccacgcgtccgggagactggtgttctcaaacccggtatgttggtcacctttgctccagtcaacgttacagggggagtaaaatctgtcgaaatgcaccatgaagctttgagtgaagctcttcctggggacaatgtgggcttcaatgtcaagaatgtgtctgtcaaggatgttcgtcgtggcaacgttgctggtgacagcaaaaatgacccaccaatggaagcagctggcttcactgctcaggtgattatcctgaaccatccaggccaaataagcgccggctatgcccctgtattggattgccacacggctcacattgcatgcaagtttgctgagctgaaggaaaagattgatcgccgttctggtaaaaagctggaagatggccctaaattcttgaagtctggtgatgctgccattgttgatatggttcctggccaggcccatgtgtgttgagagcttctcagactatccacctttgggtcgctttgctgttcgtgatatgagacagattgttgcgtgtgggtgtcatcaaagcaggggacaagaaggctgctggagctggcaaggtcaccaagtctgcccagaaagctcagaaggctaaatgaatattatccctaatacctgccaccccactcttaatcagtggtggaagaacggtctcagaactgtttgtttcaattggccatttaagtttagtagtaaaagactggttaatgataacaatgcatcgtaaaaccttcagaaggaaaggagaatgttttgtggaccaactttggttttcttttttgcgtgtggcagtttttaagttattagtttttaaaatcagtactttttaatggaaacaactttgaccaaaaatttggcacaaaatttttggagacccctttaaaaaagttaaatgagaagacaagagatcaaaaccatgggggcggccgctttaaaggatccaagtttacgtacgcgg

SEQ ID NO: 5816 - DNA, 419 bp, Homo sapiens
  SIMILAR (293)..(382): 1001254mologous to Homo sapiens HGTD-P,accession number AF201944,Smith-Waterman Score=143.
tgagaagaaagtataagagaaaaggagaggataaagactgaaagaaaggggccagaagggaagaaaaaggagaggtgtggcacttcttacttatgcttgagtggatgagctgctgttcttggaagcgtacgaggaagttgaagcacatagaggaaactgccgtgctcagtgtccaagcagcagaggactccatgcctccatgcctctgttaacctgctgtcatcagtgcaaggtaaagacaccctcccctgaccagcatacaaatcacctgttcaaatctgttttgctttaggctgcccaaagacacgagactttaacaagcttgaacttagaaaagaaagctcgtctgaaagaggaagcagctatgaaggccaaaacagagtagcagaggtatccgtgttggctggattttgaaaatc

SEQ ID NO: 5817 - DNA, 769 bp, Homo sapiens
  SIMILAR (48)..(659): 461254mologous to Homo sapiens DC16,accession number AF250321,Smith-Waterman Score=311.
ccgtccccggcgaagttctgcgctggtcggcggagtagcaagtggccatggggaacctcagcggtctgcgcctggcagcaggaagctgttttaggttatgtgaaagagatgtttcctcatctcaaaggcttacccagaagctctgattggaaggggtataaatggattttgccacaaaacccacagggaaagtccccggagctcccatccccgcacttaccaacagagtgccctttaacacaaaaccgtacggattggccagaaaaaaagacccctcatatggtccaggtcgccttcaaaaatggaagatgaaatcccccagagacctgtccccgttggaagatgccttgaatgcctgccaaagaaccaagatgccgagtgaaagatccagcctatcccaatggatttgccccgacggtggtatggattgcatccttcatggttattgagggccagaagggctgccccaaagacacgatgactttacacaagcttgaaccttagaaaagaaagctcgtcttgaaagagggaagcagctatgaaggccaaaacagagtagccagaggtatccgtgttggctgggatttttgaaaatccaggaattatgttataacgtgcctgtattaaaaaaggatgtggtattgaaggatccatttcattaaagtatgattttgccccaaacctgtaccatttccgtatttctcctgtagaagtaagaaataaattttcttaaataaaaaaaaaaaaaaaaaactcgagggggggcccg

SEQ ID NO: 5818 - DNA, 398 bp, Homo sapiens
  SIMILAR (1)..(192): 1001254mologous to Homo sapiens cathepsin,accession number M86553,Smith-Waterman Score=367.
  misc_feature (1)...(398): n = a,t,c or g
tatgaaccatcctgtactcagaatgtgaatcatggtgtacttgtggttggctatggtgatcttaatgggaaagaatactggcttgtgaaaaacagctggggccacaactttggtgaagaaggatatattcggatggcaagaaataaaggaaatcattgtgggattgctagctttccctcttacccagaaatctagaggatctctcctttttataacaaatcaagaaatatgaagcactttctcttaacttaatttttcctgctgtatccagaagaaataattgtgtcatgattaatgtgtatttactgtactaattagaaaatatagtttgannnnnnnnnnnnnnnnnnnnnnnnnnnnnnnnnnnnnnnnnnnnnnnnnnnnnnnnnnnnnacttg

SEQ ID NO: 5819 - DNA, 1794 bp, Homo sapiens
  SIMILAR (137)..(1111): 841254mologous to Homo sapiens cathepsin S,accession number M90696,Smith-Waterman Score=1400.
ggggtacctcatgtgacaagttccaatttcttttcaagtcaattgaactgaaatctccttgttgctttgaaatcttagaagagagcccactaattcaaggactcttactgtaggagcaactgctggttctatcacaatgaaacggctggtttgtgtgctcttggtgtgctcctctgcagtggcacagttgcataaagatcctaccctggatcaccactggcatctctggaagaaaacctatggcaaacaatacaaggaaaagaatgaagaagcagtacgacgtctcatctgggaaaagaatctaaagtttgtgatgcttcacaacctggagcattcaatgggaatgcactcatacgatctgggcatgaaccacctgggagacatgaccagtgaagaagtgatgtctttgatgagttccctgagagttcccagccagtggcagagaaatatcacatataagtcaaaccctaatcggatattgcctgattctgtggactggagagagaaagggtgtgttactgaagtgaaatatcaaggttcttgtggtgcttgctgggctttcagtgctgtgggggccctggaagcacagctgaagctgaaaacaggaaagctggtgtctctcagtgcccagaacctggtggattgctcaactgaaaaatatggaaacaaaggctgcaatggtggcttcatgacaacggctttccagtacatcattgataacaagggcatcgactcagacgcttcctatccctacaaagccatggatctgaaatgtcaatatgactcaaaatatcgtgctgccacatgttcaaagtacactgaacttccttatggcagatatagatgtcctgaaagaagctgtggccaataaaggccccagtgtctgttgttgtaagatgcgcgtcaaccttccttccttcctctacaagaaagtggtgtctactatgacccatccttgtactcaagaatgtgaatcatggtgtacttgtggttggctatggtgatcttaatgggaaaagaatactggcttgtgtaaaacagctggggcccccaactttggtgaagaaggatatattcggtatgggcaagaaataaaggaaatcattgtggggattgctagctttccctcttacccagaaatctagaggatctctcctttttataacaaatcaagaaatatggaagcactttctcttaacttaattttttcctggctggaatccaggaagaattaattgtggcatgattaatgtgtatttactgtactaattagaaaatatagtttgaggccgggcactgtctggctcacgcctgtaatcccagtacttgggaggccaaggcaggcattatcaatcttgaggccagggagttaaagagcagcctggctaacgtggtgaagccccgtctctactaaaaataccaaaaaattagccgagcacggtggtgcattgctgtaattcccagctacttggggagggcttgaggcacgagattccttgaacccaagaggtttgaggctatgttgaggctgagatcacaccactgtactccagcctgggatgacagagtggagactctgtttcaaaaaaacagaaaagaaaatatagtttgattcttcatttttttaaatttgcaaatctcaggataaagtttgctaagtaaattagtaatgtactatagatataactgtacaaaaattgttcaacctaaaacaatctgtaattgcttattgttttattgtcccgaattcagttggtttaatatattgtcctctgtaatttcgatccttcttaa

SEQ ID NO: 5820 - DNA, 1494 bp, Homo sapiens
  SIMILAR (2)..(286): 901254mologous to Homo sapiens cathepsin,accession number M86553,Smith-Waterman Score=470.
tgtcctgaaagagctgtggccaaataagggccagtgtctgtttggtgtagatgcgcgtcatcttcctttctttctctacagaagtggtgtctactatgaaccatcctgtactcagaatgtgaatcatggtgtacttgtggttggctatggtgatcttaatgggaaagaatactggcttgtgaaaaacagctggggccacaactttggtgaagaaggatatattcggatggcaagaaataaaggaaatcattgtgggattgctagctttccctcttacccagaaatctagaggatctctcctttttataacaaatcaagaaatatgaagcactttctcttaacttaatttttcctgctgtatccagaagaaataattgtgtcatgattaatgtgtatttactgtactaattagaaaatatagtttgaggcgtgagccactgagcccagcctacttttcagtttttaacataatttttgttttatccacaacttttcaagtattgaaagtagaataaaaacatgggttcttagtctttagctatctgttaaagcctatgaatgccttcttaaaatcatgtttttaaatgcactaaaatatatagggattacaaaggaatctaattatatcgaaatacagttattaaaatgttaaaagataagtttgttatatattacatatgcatgctttctttataaatgcattaaataagagttaatagctatcctaaatttgaaatagtgataagcataatgaaaatagatgcaaaaaactaatgtgatatgaaaatatctgggtttttcttttgatgatgaagtattgctaatattaccgtggtttatgaactatgttcagaattgaagaaaatcctaactttcagctagaggctaggtgacggggtttcaggacaccctacacaaaatacagcactttgacatatttgaatattttaagctgaaggcatttgaggaaattggcagaagcaggaaggtgactctgaccttctgtcctgctgtttctccccagaagcagccataaaacctgggaaggattttctgaccttccccatgaagtagatcataagactgtcatgtaagaggtgctctccctggcacccagagaaaaggagcatccttacctccaaaagcacagggacaccaaagaggaatctaaacaaacaggcctctcagtttcccccagtttattacatttagcttgttcacactttgccctatgacatttctacatcactggctgctcttcatcaaaacctactataaaaaacattcaagttcaacttgtttctttgggcctttatttccttatggagcccctcgtgtcgtgtaaaacttatattaaataaatgtgcatgcttttctcttgctaatctctcttttgttatagagatctcagccctaaacctaggatggatagaaggaaacatatgttctcccctacattagtaaaaataaaaatggaattttttacccataaaa

SEQ ID NO: 5821 - DNA, 316 bp, Homo sapiens
  SIMILAR (2)..(118): 761254mologous to Mus musculus putative,accession number AK003570,Smith-Waterman Score=168.
cccggatcagggccagtactgcatgaagaggatgcccgcctactcaggcccaggcactgcgcctggcgcactggattaccctgcgcactgtaccgcactctacggtgagagcgacttgagatgctgagctactggagacactcatcccatgagaatgctcttacagcggaagtgacagattggctcctggaaactttgacaagctgtattaagttgcgagatatataggggaaaaaaaaagacctttgaaaattcaaaaattgccagcaatataacacggctaaaatgaagtctttacagtatatgacatattgcg

SEQ ID NO: 5822 - DNA, 881 bp, Homo sapiens
ttttttgacagtcttgctctgtcgcccaggctggagtgcagtggcatgaactcggctcactgcaatccagtctaggcaagaagagcgaaactccatctcaaaaataaataaataaataaataaataaataaacaaaaagtaatcctcctaaaggaaagctactagaaaacactttagccaaatgacttcagatttataagcagggcaactggcaacagaatccaaatgaattctaacgttgtcaatcagaaatactttagcttaaaaaaaattaaaacacataaattcagcattttggttcaatctgaaagtctgataatttgaggttactataacccatgaaataaaataatgttaagaaaatgactcacattgtaggtgctaaaatgaacatatgcccaatactgacaatgctctctaagtaaaaaggtgaattttttattaatactaacagtcttgataatctcaagagacaatccagctttacaaatctagaacctggtatacaaagcaaaacgtacattttttaagtatctggggaaaaaaggaggtatctgggcaattcaggtcaagtaaactttgtggggaggagggaaagcaatatatataaattcaggattttgtgcttcaattacctataccagctttgctgatgtggtaagaaagcacacatgcagatacggttagatatttttcctaatttttttccactttcttatttcctacatagctaaagaatgcttaatagaatataattaaaagggtatataccatcttgcttaatcaggtgggttagatcaactttcaatcaggggaagaatttgacttgagccagcagctggagtaggctcagaactgaatttaatcaaccaaaaacataa

SEQ ID NO: 5823 - DNA, 2031 bp, Homo sapiens
  SIMILAR (14)..(502): 981254mologous to Mus musculus putative,accession number AK016972,Smith-Waterman Score=869.
gacccacgcgtccgactgcctctaccgagctgtcagcaagacggtgtatggggaccagagcctgcaccgggagttgagggagcagacggtgcactacatcgccgaccatctcgaccacttcagccccctgattgagggcgacgtgggggagtttatcatcgctgctgcccaagacggggcatgggccgggtacccggagttgctggccatggggcagatgctgaatgtgaatatccatttaactactggagggaggctggagagtcccacggtgtctaccatgattcattatttgggcccagaggattccctgaggcctagtatttggctcagttggctcagtaacggacactatgatgctgtatttgatcactcctatcctaacccagagtacgacaactggtgcaaacaaactcaagtgcaaaggaaacgcgacgaagaacttgccaaatctatggccatatccttgtctaaaatgtatattgaacaaaatgcatgctcttgaaatgtctcaaaaccttacaccctgggaataattgcatatataacttgtgtttggagaatcacatgaactttaatcagggtaatagcactttcaaacttgctagtagattttactgtaggtgtaatgccttaatcatctttttgaatgttttctcagagctggaggttgctgggcaccctaaatgatgtttcatgatagctttgggtgattttactgctatttataacttgcctgtataaaagtgagcattacttaatttgcaagctgatgtctcacagtggtaaattttggttcattcctgggtagtctattttctataaaaatgtatttttgcacaacatttttaaaaactgggtgtaccttcatctatgacgtgttcccattttgacaaacagctttccaggcgtaaaatccagaggaagtgcttttattatggaaatgtattattttgaacagagtttgtgatttggtagttattttatgttgttgaaatttgaatttcacaattcttagataattatttcaaatggatattgatgcattcttgttaccagatgtttggcccattccattttgatgaaacagagctgttgttttggaagtcattatttttctagaaatggcgaatcttttaaagaaaattacttaatggaaggttgtggggaaggtgtttttttgtgttttttttttggtttttgttttgtttttcctcttttaagggatagtaagcaggtcttacttgaatgaaagtctgatatttggctgatggcagaatgattattctggtaccctggttgatgtgtagagtagattgtctggtgctctcagttggtttttatttaccattggtccacgttgttgtaagggaaatgttaccatggtataaaactctgtgaccaggataagcctccggctttatataaccttcttgaatccagctaagagatttataaactaatgggcataaatgtcctggagccaacccttggcagttatagcaggagaacactggtcttaatatttcctttacattcctttcaaaaggcaaaataggattgccctgtattgatgtagaaatgtctggtaaccagagcttgtatggtttgctgggtcaaacaatgttttccaaccttaaaatcaatctcattgccactttaaactacttttagtcatatttattaagtaatgcagtttgtactttttttattttgtaacattttgtgatttttttgtacaaaactgtatttgtacaatagagcaattcccagctgatggaatgaatggattaaattcaaaatttatacttttacaatgcctttttggatagagtggtttttaaattgtgatgtttgtaggaaactttcttgcatgtatgcatgtacacaattttttttttccataaagatgccccagcaatagagaggtttcctaaattatcacatgaagaggataggctaatcatgagtaatttcaaaggataagtctgaataaaatataatttaaaagtggagtaaaaaaaaaaaaaa

SEQ ID NO: 5824 - DNA, 332 bp, Homo sapiens
  SIMILAR (1)..(102): 1001254mologous to Homo sapiens ribosomal protein L38,accession number AB007185,Smith-Waterman Score=171.
  misc_feature (1)...(332): n = a,t,c or g
cgatgcagcagatacctttacaccctggtcatcactgacaaagagaaggcagagaaactgaagcagtccctgccccccggtttggcagtgaaggaactgaaatgaaccagacacactgattggaactgtattatattaaaatactaaaaatcctnnnnnnnnnnnnnnnnnnnnnnnnnnnnnnnnnnnnnnnnnnnnnnnnnnnnnnncnnnnnnnnnncactgtttgaataaagagcgagacggaattaatattggtttttcttttgaaaagaccatttgatttttatgttgctccagctaaggcattttttttgattaaaatttctata

SEQ ID NO: 5825 - DNA, 431 bp, Homo sapiens
  SIMILAR (1)..(237): 971254mologous to Mus musculus piL,accession number AF229032,Smith-Waterman Score=409.
cagctacgtgaatgggatgaaaatctaaaagatgattctcttccttcaaatccaatagatttttcttacagagtagctgcttgtcttcctattgatgatgtattgagaattcagctccttaaaattggcagtgctatccagcgacttcgctgtgaattagacattatgaataaatgtacttccctttgctgtaaacaatgtcaagaaacagaaataacaaccaaaaatgaaatattcaggtatgcctggactgttgcccagtgtaagatctgtgcaagccatattggatggaagtttacggccaccaaaaaagacatgtcacctcaaaaattttggggcttaacgcgatctgctctgttgcccacgatcccagacactgaagatgaaataagtccagacaaagtaatactttgcttgtaaacagatgtgag

SEQ ID NO: 5826 - DNA, 334 bp, Homo sapiens
  SIMILAR (1)..(108): 971254mologous to Homo sapiens ribosomal protein L38,accession number AB007185,Smith-Waterman Score=175.
  misc_feature (1)...(334): n = a,t,c or g
aaagttcgatgttgcagatacctttacaccctggtcatcactgacaaagagaaggcagagaaactgaagcagtccctgccccccggtttggcagtgaaggaactgaaatgaaccagacacactgattggaactgtattatattaaaatactaaaaatcctnnnnnnnnnnnnnnnnnnnnnnnnnntnnnnnnnnnnngnnnnnnnnnnnnnnnncaaattaaaaatgaaaaaatggcgaatacgatagatgggggagtgcacgcggcggtcgataagaagacaaaggagatgcttgggcgcagcctcattgagagaacaccctacacgctcag

SEQ ID NO: 5827 - DNA, 446 bp, Homo sapiens
  SIMILAR (99)..(308): 971254mologous to Homo sapiens ribosomal protein,accession number Z26876,Smith-Waterman Score=332.
  misc_feature (1)...(446): n = a,t,c or g
cccacgcgtccggttgctgcttgctgtgagtgtctctagggtgatacgtgggtgagaaaggtcctggtccgcgccagagcccagcgcgcctcgtcgccatgcctcggaaaattgaggaaatcaaggacttcctgctcacagcccgacgaaaggatgccaaatctgtcaagatcaagaaaaataaggacaacgtgaagtttaaagttcgatgcagcagatacctttacaccctggtcatcactgacaaagagaaggcagagaaactgaagcagtccctgccccnccgtttggcagtgaaggaactgaaatgaaccacacacactgattggaactgtattatattaaaaaactaaaaatcctnnnnnnnnnnnnnnnnngggcgccccgtttaaaagatcccttggggggcccaagcttaccccggcgtgccgaccgtttaatttttg

SEQ ID NO: 5828 - DNA, 705 bp, Homo sapiens
  misc_feature (1)...(705): n = a,t,c or g
gggtgagaaaggtaatctggggcaatccactgccaggtgaaatctggggaccccaggtccgcgtggagggtgtcggggaggagaaggggagtgcgatggggccgatatttcgggggagagcgggaaaacggggttcgctgccagcccccgcgccgtgttaacgccgaggactgtttcccgcaggtcctggtccgcgccatgagcccaggcgcgccatcgtcgccaatgccctcggtaaaattgtggaaatcaaaggacttccctgcgtcacaggccgacgaaaaggatgccaaattcttgtcaagatccaagaaaaataaggacactcgtgaagtttaaagttcgatgcagcagatacctttacaccctggtcatcactgacaaagagaaggcagagtaaactgaagcagtccctgccccccggtttggcagtgaaggaactgaaatgaaccagacacactggattggraactgtattatattaaaatactaaaaatcctaagtgtctttcgtctttgcggatgggaaagggaaaaatgctacctcgtagtggcttctgatgggaacaggacgcgggttctgttgctgccttcctgggncannnnnnnnnnnnnnnnnnnnnnnnnaaaacggagctttgttttggggttaatctggaacccaaggggggcaatataagttaattaccccctccgcctcgggggt

SEQ ID NO: 5829 - DNA, 332 bp, Homo sapiens; identical to SEQ ID NO: 5824
  SIMILAR (1)..(102): 1001254mologous to Homo sapiens ribosomal protein L38,accession number AB007185,Smith-Waterman Score=171.
  misc_feature (1)...(332): n = a,t,c or g

SEQ ID NO: 5830 - DNA, 334 bp, Homo sapiens; identical to SEQ ID NO: 5826
  SIMILAR (1)..(108): 971254mologous to Homo sapiens ribosomal protein L38,accession number AB007185,Smith-Waterman Score=175.
  misc_feature (1)...(334): n = a,t,c or g

SEQ ID NO: 5831 - DNA, 446 bp, Homo sapiens; identical to SEQ ID NO: 5827
  SIMILAR (99)..(308): 971254mologous to Homo sapiens ribosomal protein,accession number Z26876,Smith-Waterman Score=332.
  misc_feature (1)...(446): n = a,t,c or g

SEQ ID NO: 5832 - DNA, 705 bp, Homo sapiens; identical to SEQ ID NO: 5828
  misc_feature (1)...(705): n = a,t,c or g

SEQ ID NO: 5833 - DNA, 508 bp, Homo sapiens
  SIMILAR (29)..(310): 611254mologous to Mus musculus putative,accession number AK014834,Smith-Waterman Score=286.
ttacgggccgacccacgcgtccggagccatgctgaggagctgcgccgcgcgcctccgcacgctgggggctctgtgcctgccgccagtaggccggcgcctgccgggaagcgagccgcgacccgagctgaggtcattttcttctgaggaagtcattcttaaggactgttctgtccccaaccccagctggaacaaggacctaagactgctctttgaccagtttatgaagaaatgtgaagacggctcctggaaacgtttgccttcatataaacgtacacctactgaatggattcaagacttcaaaacccatttttcttggtagaaacacgccactttcccattaatatatctgaggcatcaaaatataaagctaagaacagattgaagtactagttactacctgaaaaaaagaaagaatataatgcaggattatggttctatagtcaccaattttatagaccagaaatcacaataaattttgcagattggagagcataaaaaaaaaaaaaaa

SEQ ID NO: 5834 - DNA, 1231 bp, Homo sapiens
  SIMILAR (1)..(495): 511254mologous to Mus musculus putative,accession number AK014834,Smith-Waterman Score=367.
atgctgaggagctgcgccaggcgcctccgcacgctgggggccctttgccagccgccaccggtaggcaggcgcctgccgggtagtgagccgcaacccgcgctgaggtcattttcttctgaggaagtcattcttaaggactattctgtccccaaccccagctggaacaaggacctaagactgctctttgaccagtttatgaagaaatgtgaagacggctcctggaaacgtttgccttcatataaacgtacacctactgaaaggattcaagactttaaaacccattttctatagacccaaagcttatgaaagaagaacaaatgtcacaggcccagctcttcaccagaagctttgatgatggcctgggctttgaatacgtgatgttctacaatgacattgagaaaaggatggttatgcttatttcacggaggcccttacctgtaaggaccacctggattcattcatggaggagccattgcacccatgattgatgctactgttcggtatgtgtgcaatgatggctgggggaatcgtcatgactgccaatctcaacatcaattataaaagacctatccctctttgttatgttgttatgataaatagccaacttgataaaagtttgaaaggaaggaaattttttggtttcctgtaatgttccagaagtgttggatgaagaagaccctatactccagaggcgacaagcttaatttataaagccgaatcccggctaaaaagtctgacataaagagctgctggtgaactccatctcattctcgcccctccagaagaagcagttgtcccccaaatactgtgctccctcactgctgaatccctgtagggagaagcctgccaacagtgaccttccgaaacagccttctgaatacaaagaggattcagtttccatcttctcaactttttaacacagaaacacttcctgcgagcatatcgacaactctcgggccactacaccctggccttgttcatcttctaattaaatatcctttgaatgttttgtaataattttaatgttgacaataagagtttaaaaaataatttgattttggactgtatttagatttctctttaattttgctgtagaaatagtaaatgatttaaagtggttatgatgtgttttatgaaggcttactattttatattgtacttatttaatttgtatttgagtctgtctaattttaaataaaaggtttatacatttgaaaaaaaaaaaaaaaaa

SEQ ID NO: 5835 - DNA, 496 bp, Homo sapiens
  SIMILAR (112)..(417): 981254mologous to Mus musculus putative,accession number AK010432,Smith-Waterman Score=528.
  misc_feature (1)...(496): n = a,t,c or g
ccggnaggaggctcatgcgggatttcaagcggttacaagaggacccacctgtgggtgtcagtggcgcaccatctgaaaacaacatcatgcagtggaatgcagttatatttgggtacttttaaactagtaatagaatttnctgaagaatatccaaataaaccaccaactgttaggtttttatccaaaatgtttcatccaaatgtgtatgctgatggtagcatatgtttagatatccttcagaatcgatggagtccaacatatgatgtatctnctatcttaacatcaattcagtctctgctggatgaaccgaatcctaacagtccagccaatagccaggcagcacagctttatcaggaaaacaaacgagaatatgagaaaagagtttcggccattgttgaacaaagctggaatgattcataatagacaactggtctgttaatctttttcatcattgttgtgtataatttacctctcattagaaaggctancaaatttt

SEQ ID NO: 5836 - DNA, 838 bp, Homo sapiens
  SIMILAR (226)..(735): 731254mologous to Mus musculus piL,accession number AF229032,Smith-Waterman Score=610.
  misc_feature (1)...(838): n = a,t,c or g
aatccctcaataagtgccagatatttccttcaaaacctgtctcaagagaagaccaatgttcatataaatggtggcagaaataccagaagagaaagtttcattgtgcaaatctaacttcatggcctcgctggctgtattccttatatgatgctgagaccttaatggacagaatcaagaaacagctacgtgaatgggatgaaaatctaaaagatgattctcttccttcaaaatccaatagatttttcttacagagtagctgcttgtcttcctattgatgatgtattgagaattcagctccttaaaattggcagtgctatccagcgacttcgctgtgaattagacattatgaataaatgtacttccctttgctgtaaacaaatgtcaagaaacagaaataacaacccaaaaatggaaatattcagttttatcccttatgtggggccgatgggaggcttatgtggaatcctcatggatatgtgcatgagacacttactgtgtataaggcttgccaacttgaatctgataggccggccttctacagaacacagctggtttcctgggtatgcctggactgttgcccagtgtaagatctgtgcaagcccatattgggatgggaagtttacggccaccaaaaaagacatgtcacctcaaaaattttggggcttaacgcgatctgctctggtgcccacgatcccagacactgaagatgaaataagtccagacaaagtaatactttggcctggaaacagatgtgatagagataaggtagttanctacaaatgggtanatccaagatctgccttgggaattatgccccggaacaaccnaagtaacatac

SEQ ID NO: 5837 - DNA, 444 bp, Homo sapiens
  SIMILAR (3)..(116): 1001254mologous to Mus musculus putative,accession number AK010432,Smith-Waterman Score=200.
cggcccggaggaggctcatgcgggatttcaagcggttacaagaggacccacctgtgggtgtcagtggcgcaccatctgaaaacaacatcatgcagtggaatgcagttatatttggtgtatgctgatggtagcatatgtttagatatccttcagaatcgatggagtccaacatatgatgtatcttctatcttaacatcaattcagtctctgctggatgaaccgaatcctaacagtccagccaatagccaggcagcacagctttatcaggaaaacaaacgagaatatgagaaaagagtttcggccattgttgaacaaagctggaatgattcataatagacaactggtctgttaatctttttcatcattgttgtgtataatttacctctcattagaaaggctaacaaattttaaagtgcacagggttttaaggattctgcagaaaaa

SEQ ID NO: 5838 - DNA, 418 bp, Homo sapiens
  SIMILAR (78)..(416): 831254mologous to Mus musculus putative,accession number AK010432,Smith-Waterman Score=486.
  misc_feature (1)...(418): n = a,t,c or g
acgcgagcggccgctcgcgatctaaaactagtcgggacnnnnnnnnnnnaaaactgaccgcggggcaattgcggagcatgtcaaccccggcccggaggaggctcatgcggaatttcaagcggttacaaaaggacccacctgggggggtcaggggcgcaccatttgaaaacaacatcatgcaggggaatgcagttatatttggaccaaaagggacaccttttgaaaagggtacttttaaactagtaaaagaattttttgaaaaatatccaaataaaccaccacctgttaggtttttatccaaaaggtttcatccaaatgtgtatgctgagtggagcatatgtttaaatatccttcaaaatcgatggagcccaacatatgagggatcttctattttaacatcaattcagcctctgctgaa

SEQ ID NO: 5839 - DNA, 637 bp, Homo sapiens
  SIMILAR (36)..(125): 1001254mologous to Mus musculus putative,accession number AK010432,Smith-Waterman Score=156.
cagagtgtgtaactaattttagtattgtctttgcagtgtatgctgatggtagcatatgtttagatatccttcagaatcgatggagtccaacatatgatgtatcttctatcttaacatcaattcaggtaagtgtgtgttaggatgtattataatttgtcagtattctgtaggatatagtcagctccttagcacacaggtaaccaatggcagagcttggacaagaatccatgcttttcagctaacttttctctttcagtagtgcctacttgggatccagtctgcagtccctttcctgattgtgtaagttacatgttctcacaggtcaaacctaatttgtgtccatgaagcatagccaagggttgtggaaaagaaaaaatggcttggaaaaaccataggaacctaaagaaactgccaagtgtagataagcattgagtatgttaccccatccaagaaattctattttaaaaaaagaaaggaaaactaatgtaaccatttgtcgaagcagtctggcagaatatttcagaatagatctttgaatgaaaatttaggaggggtggagtgaggggtgttccggttttgcggatttgagaggagcattactaatatgttggtttgtgatgtactttttaaagttttt

SEQ ID NO: 5840 - DNA, 1011 bp, Homo sapiens
  SIMILAR (116)..(541): 451254mologous to Mus musculus putative,accession number AK010432,Smith-Waterman Score=184.
  misc_feature (1)...(1011): n = a,t,c or g
cacagtgattcggccgccgcgccggggggtgggggggctgcgcgggacttttttttttttcagactgaccgtaggggcagctgcggagcatgttcgaccccggcccggaggagcgctcatgcgggatttcaagcggttacaagaggacccacctgtgggtgttcagtggcgcaccatctgaaaacaacatcatgcagtggaatgcagttatatttggacccgggagggacaccttttgaagatgggtaccttttaactaagtaatagaattttctgaagaatatccaaattaaaccacccaactgttagggtttttatccccaaaatgtttccatccccaaatgtgtatgcctgatgggtaggcatatgtttaagatatcccttcagaatcgatgggagtcccaacatatggatgtatccttcctatccttaacattcaattcagtctctggctgggatgaacccgantccctaacagtccagcccaatagcccaggcagcacagctttatcaggaaaacaaacgagaatattgagaaaagagtttcggccattgttgaacaaagctggaatgattcctaatagacaactgggtctgttaatccttttcatcattggttgggtataattttacctctcatttagaaagggctaacaaattttaagtgccacaggttttaaggattctgcagaaaaaaaagaaaaaagtccttcagtttagaacctacaaaagcttgtgtatcttgattaatgtactttttattgcatggtgtgaactaagttattgctgcataaatttgtaatatatcctgtttgtatttttttccaagtgtataatgttggtgtggagttttcatgacagaatatacacattttgtaaatctgtacttttttcaaatattgaatgccttatttttgaattctttagatttttaaattggagaaaagcacttaaagttttttatatatgaatattacatgtaaagctgttaaaatacataacttcagtgca

SEQ ID NO: 5841 - DNA, 669 bp, Homo sapiens
  SIMILAR (2)..(127): 881254mologous to Mus musculus putative,accession number AK009895,Smith-Waterman Score=193.
ctactgtggaccactctgaagtgtgtgggttgctagaaaccctcctggctttgcttttgttgaatttgaagatccccgagatgcagcaggtgtggtctgagaactagatggaagaacactatgtggcccctccctcttggggtcatcgtccttgagatgattattgtaggaggggtcttccacctcgtcgcagacctccaagaaggagaaacttgtcttgtagccggagcaggtccctttattctccttggaccttgtctctctgaactgcatgcagaacttcacataactttcatctgtatttcctctcattactagttcttctacatcttttagaattcttttatgagcagtattgtgtgctgtgctccgagatatttcacagccagtcctttctggcaacaggcagcaactatcaaaagaaatcttctcaaagttctgattggtcatagcctttagtgaaacaaggctctcgtagttcatggcagggagccatatttcaggtgaagttccctgtggcccttcaccactcacagacagctggagcaaatttccaaagccttttccgccctttctggagaggcagccccatctaaccgtgtgttcatgggattcctccgcatcgagaagactgcagttagtccacactagctgcttactgtccaccat

SEQ ID NO: 5842 - DNA, 519 bp, Homo sapiens
  SIMILAR (6)..(140): 861254mologous to Mus musculus alternatively spliced; truncated,accession number X91656,Smith-Waterman Score=207.
gcggccgctcccacctgtcgaatggtgaaaaaagaagtagaaatcgtggcccacctccctcttggggtcgtcgccctcgagatgattatcgtaggaggagtcctccacctcgtcgcaggtacttgagagaaagcttgttaagaggtattggtgtaatggagtagctagtaggagcaggtatttctcttaagtttgttggtgggttttaaactttggaagaatcggaggtttctgtgaaacatttgttgggtgtaatttggggtatgtgagttgtgctgagtgttggcttttgtctttaggtcactgttcatgttggtagtcagtaacttctatcttggatctgtcttctagttcatctttctagttgcatctttccaaatcttcccttatacttcagtttaggcctttttccatttcttggctccataatgacaaacattacattcaactctagctcttcacaaatttgtgttttctactattagcacaattgtaatatttatcaaacaggcagctgtt

SEQ ID NO: 5843 - DNA, 1046 bp, Homo sapiens
  SIMILAR (651)..(800): 1001254mologous to Mus musculus putative,accession number AK011657,Smith-Waterman Score=244.
atatttttggtatttttcattacagaaatgcatcgtgattcctgtccattggactgtaaggtttatgtaggcaatcttggaaacaatggcaacaagacggaattggaacgggcttttggctactatggaccactccgaagtgtgtgggttgctagaaacccacccggctttgcttttgttgaatttgaagatccccgagatgcagcttaagtttaatatctttgccccctcagaacactatgtggctgccgtgtaagagtggaactgtcgaatggtgaaaaaagaagtagaaatcgtggcccacctccctcttggggtcgtcgccctcgagatgattatcggttcccgagcatgctgttttctctcagccttctctccaaccttaaccaaatcggcagcagccacctcgaccgcccacacattcctggccaatcagctcagctgtttatttaccaaatgtcttcacaacaactacagcagcagccttcggctaacaaaaaagcaggaaaaatccacaacacccccttcgccaaccaactaaatccaacggcaacatctgggcaaaaccttttcaggcaaattcttcctgggccgtcagtccgggcaggcctcaccttcaccatttctagcttgttgaaacccaaaactaatctccaagaaggagaagcttctctcgcagccggagcaggtccctttctagagataggagaagagagagatcgctgtctcgggagagaaatcacaagccgtcccgatccttctctaggtctcgtagtcgatctaggtcaaatgaaaggaaatagaagacagtttgcaagagaagtggtgtacaggaaattacttcatttgacaggagtatgtacagaaaatttcaagttttgtttgagacttcataagcttggtgcatttttaagatgttttagctgttcaaatctgtttgtctcttgaaacagagacacaaaggtgtaattctctatggtttgaaatggatcatacgaggcatgtaataccaagaattgttactttacaatgttcccttaagcaaa

SEQ ID NO: 5844 - DNA, 1407 bp, Homo sapiens
  SIMILAR (1)..(270): 1001254mologous to Mus musculus alternatively spliced; truncated,accession number X91656,Smith-Waterman Score=486.
  misc_feature (1)...(1407): n = a,t,c or g
ccactccgaagtgtgtgggttgctagaaacccacccggctttgcttttgttgaatttgaagatccccgagatgcagctgatgcagtccgagagctagatggaagaacactatgtggctgccgtgtaagagtggaactgtcgaatggtgaaaaaagaagtagaaatcgtggcccacctccctcttggggtcgtcgccctcgagatgattatcgtaggaggagtcctccacctcgtcgcagagtcaccatcatgtctcttctcaccaccctctcgaatctgcattagccagtcaactagccctttcagcgtcatgtgaccagcgcgccccattcagcttggctggtcgtcgtttcacatgacccaggctggccagtcgtcaggttgcaccgccctttggttcccgagcatgctgttttctctcagccttctctccaaccttaaccaaatcggcagcagccacctcgaccgcccacacaattcctgggccaatcagctcagctgtttatttaccaaatgtcttcacaacaaactacagcagcagccttcggctaacaaaaaaagcaggaaaaatccacaacaccccctttcgccaaccaactaaatccaacggcaacatctgggcaaaaaccttttcagcaaattcttcctgggccgtcagtccggcagcctcacctcaccatttctaggcttgttgaaacccaaaactagtaagtttttcctgcttatacagtttactgctggttaaaataaggagtaagcggcttaaagtaattcttttttctggatcaaaggctggctgtgcataattgaatggtaacgtacatatatattgcttgaaaaacttttaagggtgatagggaactcgtaatgtaactaggccttcaagtgaaacttatttgcatgtgcaagatgccaaactaaaaattttaatatctctaacagattagcttttctggcaaaaatttgttgaatcctatcacctttaaatggttttactaacagtttcaaaatttaaaattttggggttgaagtgtgggccaagctaaggtaattttggtaagcctaaacacactcttaaatgtgacgatcacaaatgcagttctaatgtagcacttaatggcatcaatatttacacctaccgcgttttcacaaaattacactatccacctggtacctaagtcttgtcatggacttacaggtttgcatgggttccaaatactggtttatggtactgtttttggaactactbgtgggacnatattttggtgtggtgtttgggtagtgaagttagtttgacatgragttttgcattggacagatctgctgtgaagcattctttgttaaagtgaatccatggttggaatacctgcttttcacttgagctttttgattcttaatccttctgtg

SEQ ID NO: 5845 - DNA, 990 bp, Homo sapiens
  SIMILAR (199)..(672): 431254mologous to Mus musculus putative,accession number AK011657,Smith-Waterman Score=166.
cccacgcgtccgatttcgtggacgccgggtgagtgagagagttggttggtgttgggccggaggaaagcgggaagactcatcggagcgtgtggatttgagccgccgcattttttaacccctagatctcgaaatgcatcgtgattcctgtccattgggactgtaaggtttatgtaggcaatcttggaaacaatggcaacaagaccggaattggaacgggcttttggctactatggaccactccgaaagtgtgtgggttgctagaaacccaccccggcctttggcttttgttgaatttgaagatcccccgaggatgcagctggatgcagtcccgagaagctaagatggaaagaacactaatgtggcttgcccgtgtaaagagtgggaacttgtccgaatgggtgaaaaaaagaagtaggaaatcgtggcccacctccctctttgggggtcgtcgcccttcgagatggatttattcgtagggagggagttcctcccaccttgttcggcagatctccaaggaagggaggaaggtttcttttcgcagcccggagcaggtccctttcttaggagatagggagaaagagagagatcgctgttttcggggagagaaaatcacaagccgtcccgatccttctctaggtctcgtagtccgatctagggtcaaatgaaaggaaatagaagaccagtttgcaagagaagttggtgtccaggaaatttcttccttttgccaggagtaggtacagaaaattcaagttttgtttgagacttcataagcttggtgcatttttaaaatgttttagctgttcaaatctgtttgtctcttgaaacagtgacacaaaggtgtaattctctatggtttgaaatggatcatacgaggcatgtaatacccaagaattgttactttacaatgttccctttaaccaaaattgaatttgctttgaacatttagttatgcacagactgataataaacctctaaacctgcaaaaaaaaa

SEQ ID NO: 5846 - DNA, 555 bp, Homo sapiens
  SIMILAR (390)..(160): 961254mologous to Homo sapiens Human secreted protein encoded by gene 40 clone HNEDJ57,accession number AAW75096,Smith-Waterman Score=380.
  misc_feature (1)...(555): n = a,t,c or g
ttttaatataacccactatataatagtgaactaaatatgtttgtttcatagaaacaacttacatttgccaatataaggcaaatggtctatgtacagatacatcaggactgcctaactgacagtgagtgttgctagccaggctccaagctaatggagctaatacggtggagctctctgctgaatggactttcccttcaggatacgtcggatctgttctcccacagggccatcgggaaccaaatgcactggcttgtcgttctccaagttccgagtacttgggtctgctcccttcctcatcaacaggcggacagcatctaattgtgtcaaccgatactgcaggctggcagcaacatggagggcagtgttgccattgtaagccttcgcttccaccgctgctcccatttgaattangcacttaatggtatcaaccagactcttattctttagtaaaagctcctgaacttcaggtgaatgaagctgttgatttctttggagttcatggaccacaacattgtgggctatgactgcacagtggaagggagtcagcccatcata

SEQ ID NO: 5847 - DNA, 3462 bp, Homo sapiens
  SIMILAR (3456)..(2680): 911254mologous to Homo sapiens putative p150,accession number U93570,Smith-Waterman Score=1208.
ttaattagcattctggctgcaagtgctttgcaaaacaatacgttggtgttgaacgctgttgtccataagtaaagtctgagaaaatacattctgggtcacatcagaatctttgtcatccagaaacagcatgggaaaattacttttatgctttccaaagagatcttttattttattcataatgtctaattcacagcgaagtcgctggatagcactgccaattttaaggagctgaattctcaatacatcatcaataggaagacaagcagctactcctaggtatgtttcatacctagtcatatgatcttgcaagtgccggagtaagatcaccggctgtgcgtcccggttcctaacaggccacagaccagtgctggttcgtgggccaggatttggggacccctgattgggtagcttctccttgggaccccaaacatgaaggtgttgatgactgtccctcccagtgccatggcattgctgacctatccttctagggatggctccactgattgcatctggagaactataatttagaatcagtggcagccctgagctgcttttcctgcaactagatgatcccatctcctccacctcttctacctgagacagcaagatcaacctctcctcttcctcctcctcctcggcctgctcaactgtgtgtttttcaattttgtttttaaaccctgggcctatgacaccaacagacattatcaggcatatcactgtatcatctcccagggaggaggtggcctcaggaccagcagacaattttgtctgagctgccaagtgcttctgagtcattgcatctttgctgctctccaccctgaggaacttggttaagtaaaacccatctgactgtgttcttagctcaaggactttgaacctttgtcttccaattgctttcactttcactatctcaattccaaaatcctgttcttctcgataggcatatatctctgctgttgttccaaactgtgcttccctttcctgtacattgctgtatgcaagaacagcaaaggttctatctttctgaattaaattccgcaccatactgacttcttgagggtgaaaaagctgaagaggtaatgtctgtccgggaatcaggatcatcatcacttgtggaagaactggaatcacctgacagctgtcgtcatcgtgcaaagtcctgccatgaaattcttccatatcagcacctaggtatgtatgtgatgtcggcagactggtgtcaaaatttatgatgtttggttttttggcttctttactatcctggtcttcaacttccatttcatcttcttcctcactctctgggctcggggcaacagagcagcgaagaaagcgccgcgactccatcgctggccgagggccgacgtgaagcagctttccggtgcggccctgctgggctggctcgccaggcttggcgcccccacgcccgcctcccaggcccagctgcaccgctagcggctccgagcctcgccccactcccgacaggcaggagcggcaggtggttgcccatgttgtgcgcagcgtcctgctgatctccttcgccggccatgtctgtttacccgcaaaggaggctgggacagggcggtgccgaagactccgagggagggcccgtgtcgcgcggctgccgcgcaccggggccacagcgccccctggcggccccaggggagcagacggcggcgcgtacccaagccatttgtttaatttggtaactttatcctgaaagaagatatcatactgagttgttcctaacatttcctcttgcttgcgtgcagtatcaatggataaggagctctgtaactttggttggggtatttcaatgtcttcctccctggacttgtattcttggtcttgcacataagggtttacaaaggccaggatatgtgaagttttgtccttcctgtctgcttctgctcctgggacatcatgctcgtcccacttcttcatgtcattgtgttccttgcccttccagtgtctagaggctgcccagattctttggttcatggccttcttctcagtcttcaaagcagcaatatcccatctctgtgacccttcttccatcctcacagctccctttcgctctgtgatcccaggtggcaaaggttctctgattttaaggtgctgggctctgtggagctccttgccacacttccctgagctggtaccgttatctggcccttggtatatgtgtttcaggagcaacacaaagtagcccattggcctccttggtggattgggaactccttcctcccttcttgccctgtgcaactcatagtcattctttgggaacccgtaaccatcatcacttcctccatgaagcttttctcctagagcctccacagccacgggatcagaacaaacatgcttttccaagatatccgttccaatagggatttttagcccaatttctttccttggcatttggaattcactgcgtgcagcatgggggagtgttgatatctttggaattcgaatttgttcactgctgctgccatctcctccgtcgctgaatggcttaatttctattatataatcttcatcgaaaggcaaagaaagctccaccgatgttttatttgtttcaatgacagatgtgctgctttgtctgttccatctgtacaagaccttccttggggtgtagttgaggaggtgtagggtgtctggctcttccagtaccactctctcaagggtggtgatatccccttgatcattttttattgcatctatttgattcttctctcttttcttctttattagtcttgctagcagtctatcaattttgttgatcttttcaaaaaaccagctcctggattcactgattttttgaatggttttttgtgtctctatctccttcagttctgctctgatcttagttatttcttgccttctgctagcttttgaatgtgtttgctcttgcttctctagttcttttaattgtgatgttagggtgtcaattttagatctttcctgctttctcttgtgggcatttagtgctataaatttccctctacacactgctttgaatgtgtcccagagattctggtatgttgtgtctttgttctcgttggtttcaaagaacatctttatttctgccttcatttcgttatgtacccagtagtcattcaggagcgggttgttcagttgccatgtagttgagcggttttgagtgagtttcttaatcctgagttctagtttgatcgcactgtggtctgagagacagtttgttgtaatttctattcttttacatttgctgaggagtgctttacttccacctatgaggtcaattatggaataagtgcgatgtggtgctgagaagaatgtatattctgttgatttggggtggagagttctgtagatgtctattaggtctgcttggtgcagagctgagttcaattcctggatatccttgttaactttctgtctcgttgatctgtctgatgttgacagtggggtgttaaagtctcccgtcat

SEQ ID NO: 5848 - DNA, 801 bp, Homo sapiens
  SIMILAR (600)..(286): 891254mologous to Homo sapiens Human secreted protein encoded by gene 40 clone HNEDJ57,accession number AAW75096,Smith-Waterman Score=472.
tcaagcccaggctaactttgaactgtgttcaagggaaacggggctgcattcattcttaatgttgataatgttctgaagcagatcagcactgctctcctgtttgggttcattgagatgaacatcttccatgctctccccgggcgttggtgtttgaggtggtgtcaaaaattgggaatgcaacagagctggccttttgcaagcaggtccatcagacaacgaatcgggccctttccttttcccactgtatgatactgtgttcttcaattctctgaactgttctatgttcacaccttgtgtctgttctcccacagggccatcgggaaccaaatgcactggctgttcgttctccaagttccgagtacttgggtctgctcccttcctcatcaacaggcggacagcatctaattgtgtcaaccgatactgcaagctggcagcaacatggagggcagtgttgccattgtaagcctttgcattcacaaaagacaggcaactgggcagctccaaaaagaggcgaatgagttccagatttgcttcttcagctgccaaatgcagggctgtgcggccacttttgcgatccaggagattccctccagtgcctatgccaccagggccctgggtttcaagcacaaaactgggcagccgtttgggcagacaccaagccagctgcaggggctgaagccagagagccaggtgatctggcttgactggtcccacccacatggagcccaacaaggtaagatccactggcttgaaattcttgctaccagcacagcagtcataatgtcttcccatttcatccat

SEQ ID NO: 5849 - DNA, 445 bp, Homo sapiens
tgtttactttcttgaactcaaagattattataagagatctgaaataagctttaaaaggagtttagtatttttaaaagtcacctcaaaatcttgagaaatattgtgtgtatttcttcgtatacttacaagttaataggagtagtgtagatggtataagaaaggaatgaaactcagaaggaaatacaccacattggccataagaaataaacctcacaaattttatttgtttctcttccagatccgacgtatcctgaagggaaagtccattcagcagagagctccaccgtattagctccattagcttggagcctggctagcaacactcactgtcagttaggcagtcctgatgtatctgtacatagaccatttgccttatattggcaaatgtaagttgtttctatgaaacaaacatatttagttcactattatatagtgggttatatta

SEQ ID NO: 5850 - DNA, 3688 bp, Homo sapiens
  SIMILAR (1456)..(1704): 871254mologous to Homo sapiens MAIL,accession number AB037925,Smith-Waterman Score=386.
  misc_feature (1)...(3688): n = a,t,c or g
atgaagcttccagaggaaggagcaggcagcaacatttgctgttctgcaatttttgctgttttgcagcctcctctggtgatacccaggcaaacagtgtctggagtggacctccagcaaactccaacagacctgcagctgagggtcctgactcttagaaggaaaactagcaagcagaaaggacatacacaccaaaaccccatctgtatgtcaccatcatcaaggaccaaaggtagacagagggataaattggaagaaatcttgcggggattaactccaaggaaaaatgatattggagatgcaatggttttctgtcttaataatgctgaagctgctgaagaaatagtggattgcattactgagtcgttgtccatcttaaagacaccccttcctaaaaaggcgtgcgcgccccgagtagtcagcggtgcggggccggcgggtacctggctggcgctcggcgcgggcgccgcctttcgaccgggactccacggcgccgcgggaggacacccgccaggcagaggagaagtcggaggagtccggacccggcgaacccggcccccgagggccccagaccgagcaactggcgtctcaagccccccggggccggcgtccgccggcaaccccccaaaaagttatagggtacatgtgcacaaggtgcaggtttgctacataggtatacatgtgccatgttggtttgctgcagccgtcaaattgtcatgtacattagatatttgtcctaatgctatggtgtcggcagcgcgccaggtcccaacaggagccggcacccccgtgaggagacaggaaggcagcattgaggtttatgaagatgctggctcccattacctctgcctgctgaaagccggacccagggacagtgggacatacagctgcactgcttccaacgcccaaggccagctgtcctgtagctggaccctccaagtggaaacgcaccctagtttcctaattccccatctgagcctaagaccaagcgcaacccggaaccctgggtttcggttttccagcttcagccaccgtccgaggcctttgcccctcgcacttggccctcgcactcgccacgtgcccctttccagcctaacccttcaggtttgcttcaggtggggtcgtgggcgccaggttctttctccagctggggggctctgtgtgcccagggcgctcctgcgctgggatctgcgaggagatacccagagccctgaaaagctgtatatgccaaaaacaattaaagaaacttctctgagtacttaccatgtaccaggaattacactgaatgaccgcagtataataaacaaaatagatcctggtgtagaagagagtcccttggatcttcatgtttgtcatggaaataactatgtggatgaaaaaccagcactactgctgctgagcgggaagcttggatgcccctccctcacctcttgctacagcaactgcctcagctatggaaaccgctgtcgactattgcaggaacttgtagtcaaccagcatgtagagcagcagccacactacacccacaaaccaactctggaatacagtccttttcccatacctccccagtcccccgcttatgaaccaaacctctttgatggtccagaatcacagttttgcccaaaccaaagcttagtttcccttcttggtgatcaaagggaatctgagaatattgctaatcccatgcagacttcctccagtggtcaagcagcaaaatgatgctcacttgcacagctttaacatgaagcccacaagcgcctgtgaaggcatggtggggcacgagatggcctctgactcttcaaacacttcactgccattctcaaacatgggaaatccaatgaacaccacacagttagggaaatcactttttcagtggcaggtggagcaggaagaaagcaaattggcaaatatttcccaagaccagtttctttcaaaggatgcagatggtgacacgttccttcatattgctgttgcccaagggagaaggttcactttcctatgttcttgcaagaaagatgaatgcacttcacatgctggatattaaagagcacaatggacaggatatccacagagtgcctttcaggtggcagtggctgccaatcagcatctcattgtgcaggatctggtgaacatcggggcacaggtgaacaccacagactgctggggaagaacacctctgcatgtgtgtgctgagaagggccactcccaggtgcttcaggcgattcagaagggagcagtgggaagtaatcagtttgtgggatcttgaggcaactaactatgatggcctgacttccccttcactgtgcagtcatactcccacaatgctgtgggccatgaacttgagagaaatgaacagcctcattcacctgaagttcaggagcttttactgaataataatagtctggttgataccattaagtgcctaattcaaatgggagcagcggtggaagcgaaggatcgcaaaagtggccgcacagcccttgcatttggcagctgaagaagcaaatctggaactcattcgcctctttttggagctgccccagttgcctgtcttttgtgaatgcaaaggcttacaatggcaacactgcccctccatgttgcctgccagcctgcagtatcgggttgaccacaattaagatgctgtcccgccctgttgatgaggaagggagcagaccccaagtactcggaacttggagaacgaacagccagtgcatttggttcccgatggccctgtgggagaacagatcccgacgtatcctgaagggaaagtccattcaagcagagagctccaccgtatttagctcccattaagcttggagcctggctagcaacactcactgtcagttaggcagtcctgatgtatctgtacatagaccatttgccttatattggcaaatgtaagttgtttctatgaaacaaacatatttaagttcactattatatagtgggttatattaaaagaaaagaagaaaaatatctaatttctcttggcagatttgcatatttcatacccaggtatctgggatctagacatctgaatttgatctcaatggtaacattgccttcaattaacagtagctttcgagtaggaaaggactttgatttgtggcacaaaacattattaatatagctattgacagtttcaaagcaggtaaattgtaaatgtttctttaagaaaaagcattgtgaaaggaaaaaggtaaatacagcattgaggcttcatttggccttagtccctgggagttactggcgttggacaggcttcagtcattggactagatgaaaggtgtccatggttagaatttgatctttgcaaactgtatataattgtcatttttgtccttaaaaatattgtacatacttggttgttaacatggtcatatttgaaatgtataagtccataaaatagaaaagaacaagtgaattgttgctatttaaaaaaattttacaattcttactaaggagtttttattgtgtaatcactaagtctttgtagataaagcagatggggagttacggagttgttcctttactggctgaaagatatattcgaattgtaaagatgcttttcctcatgcattgaaattatacattatttgtagggaattgcatgcnnnnnnnnnnnnnnnncccaaaaaaggtttttgttttggccccaaggctgaaaaacaggggcataattttggttact

SEQ ID NO: 5851 - DNA, 792 bp, Homo sapiens; identical to SEQ ID NO: 181

SEQ ID NO: 5852 - DNA, 6481 bp, Homo sapiens
  SIMILAR (6457)..(5090): 1001254mologous to Homo sapiens Human cerebral protein- 1,accession number AAW82841,Smith-Waterman Score=2391.
  misc_feature (1)...(6481): n = a,t,c or g
tcccctgagatggagtctcatcctatcacccaggctggagtacagtggcacaatcatagctcactacagcctgaaattcctgggctcaagcaatcctcccacctcagccttcctagtagctgggatcacagataagagccactgcacttggcccaaaaacatatttaaaatgttaatactttagattggtttcagtcatgttatagggaataatggaacgtatttataccagagtattaacaatgtagaaggacccttgaaacgaagccaaaaagataggagctgtggcaattaaggagacttccaagaagtctaatactaagtagggcatccctgcttaatcaataacacttcatttcgtgaccatgagacaagaaaactacagagacttcatccctaacatccttcagctccagaaccaatgccaaatcacctaactccaggttatatgacaaaaaaaaacatctgtttaggacattctttagtgggatttgtttttctggtcacagtcacaatgacggatttaaaaaaaaaagagtatctcaacttcctattgggagtacatgttttcccctgattttaaactcatgggacaaaaagaaagtgttgactggcatctggcaagataattaaatatctgaaacaccctgaaggaaacaaagagggtactgtggtcaagagtaaggtggacaggataccatagaagatatatccagtgtatataatgataactgctaaaacaccctcaaaactcactagcagaatgtaatcaagtttattttcttgttcaaagtccaatatggatgtttttggtcaagtagctattatgccctaaatagtaactcaggtattcagacttcttctatgctatgactccatcaccgtcaaaacatgtgcttcaaggttaccttgaagaggaaggaggaagagaataatggaaatggctcagccaccctttaactgccttggtctagtattgaaacatcacttccactcattttccactgttgagaactactcacataggcctagatgcatggagctgggaaatgcagtttacctgtgtccagaaagaggacatttgggtgagcatctggccagtttcttccacagaagcaaaggtaatagtggtatgaattcaggaagatgaaaatgagctcactggggaaagagtattcaaggaagatggagcatgtgcaaagactctcagtacaaacagtttggaaagcttgaggaataaaaagcaagtctgtgtggctggagttttgtgaaaggggaggagtgggttaagatgcagatggtgatggtgacggaggcctgggcaagatcacacggggcctgaaaagtttgtcttttgttctcgaggcagtgagaatccattgaaggattttaagcagagaagtgacataagctgatttacattttaaaaagatcacatggctgtgtggaaaattaattgctttagggacacgagtagaagcaattagaccaccagtaaggcagttactgcaggagttgggtatcctaaaaccagatggctggtcagagaattcacctgggaaggaggatgaccaggggatgaaaggttctaattactggtctctgtgaaaagctgtagagagttttgtgcagttacataaatggttgggtttggagctgagcggtgtctctgccaagatcatgttgtttcttttagaactgtgttcccttaggactggactatattatgggaacagaagctggagcacaccaataactgcagaagcagtaactatttatttggagaactctcaaagggatgctgaacaagcatgaggcacggataaccaaacccaattttattcttgtctcttaccaccctccaaattttattcactgggaggtactctccctgctatggagaaaagctgcagcgaggttgtgatgttcttaatagatagtcctgtgatcagtttaaggaacaaacataatctcaattaattagaatgtctaatcctgtgtaacaataatctgcacctgttgcagttttaaatccctttttcctctcccagctctgccccagctaagtctaggagcctgcactgggaaagggaggagtgattggtatgctcttccctctcctcggctcctctctacctaatcactgctgattgctctgggcccaagtgatgaggagaggtaaacagataaatcattttgccctgactgggtatttctatgcactgtgggcctggaagatatttcctctcccctattctcactctcaaatgataaactggcttcctgctcccctgaaaaaaaatcaaagcaatcagaaatgaacttctggggccctatcaggaactctggaagagggctttcataatggagcaacctcttaccactgccatttacctcaaacaggccctccacattactcagcaatccttaccccactgcattctgagttctctctcatctcaatagcactcgacagctaacaacctgcccatcctcccataaaaaaaaaaaaaaaaaaaaaaacactggctgggcgcggtggctcatgcctgtaatcccagcactttgggaggccaaggcaggacagatcgtctgaggtcgggagttcaagaccagcctgaccaacatggagaaaccccatctctacttaaaaaacaaaacaaaacaaaaaacaaantttangccagtgcgcatgcctattaatcccagcttacttcaggaggatgaggcaggagaatcactttgaagctggggaggcagaggttgcagtgagccgagatcacgccactgcactgcagcctggggcaaccaaggagcaaaactctgtcttaaaaaaaaaaaaaaaaaaaaattaactctcctggttttactcctacatctctgggtgaaccttctcctcttccatcaccttcactgcttcattttcctttacccatccatgacatgctcctcagttctattctgagccattttctcttctcattatcttaccctgaatatctcatctattctgactttaattaccacctctaggctgctgattcccagacccccagcacagatttcacgcatgtcccacttcctaaaatccaacactttgaatggcatcaccagcctacccacagttgagcaacctggaacttacttcagattcctctcttaccaacctcaacatcccaccaattctacctaatgaagttctcctgtctgcctacttcttccatcatgactagtcaacagtgccctcatcttgtgccctagtacctgggtttctataacacccctgttctcatctatcccactcaactggaccctgtcattccttatctctccctaggtgaataagtacactggctatatctcaaatgacaagctccgggaatacaaagataaacatggcttgagaaaacaacagccaaatgcacaaaggaatcacaatgcaatatttagaagctgaagtagcactcttcacatagtactttgagagtacagatgaagaactgattttgctttgggagtagaataggaaacaactaggctgttcggaaagatgagcaaactgccagtccgatgaatatccagcagaaagaacagtacgtgtagaggcactgtgtagtgcctgcctaatgattcacagcccagcctccaaacatgccctctggactacagcctgtttcaaaacctccatccccttattagaggcatccaactggctcagggcatagaacctatgatctcccaatgggtactgtcaggtattcctggaaacaagtacaagaggccatatctttatacctgggcacatggcagataccttttgggggaggcctagaatctatcattcaaactcaccttccctcagcaccttgcctatagctttcccaggacatgctgatctgagtccactgcaaggcagagatagtggacagactcttccgccaatgaacagcccaatgcccccaagcccacatggcatcaacaagttgtttatgaacagagacccagctccctcactacccctccaaggacagaagctcagaatctattaaaagtcattaaatagcctatgaagcaggcctgttgaaaggtctagcctctcccagaggcttccttagtcaacaaatccattctttacccctcagcctccaaccagcctagggaagatcttcaaaaaacaataaggcttacaacacataatagtcatagctagtttactgagcacctcctatgttcccagccctggctacagatttctccagttaacccacacaaccaccctgcaagacaaaaattctaccattttccaaatgaggaatgtgatatacagagattaaatgactttaagtgcctctgggtagcaggccaagaattaaatccaggtctacctgattccaaaatctgtgctctcagctatatacatcccaaagtcccacaggacaataggtgttgggagtggcttgatgctatatggttccaaaaatggagatgaggggagaggggaaagataaaccactagaaatgctcggtatggggacaaccaaacagtctcaagttggtggctcagactgatgtcttgagccaagatgttggtggacaaccagttgcctcagagtcaaacagcaacagctgcctgtctgcaaccttgaaggcctgggcaaactgaagctgaaggagcagaagctatgggtgagcagaggaagctgatctgtagacagatcagatgacagcagagtggagatggcaggacaggaaggccatgtggcttcttagttggaaagaagagcaaaacctaaagatgccttgaattccaaaccatctagttttcataacacctgaagtgtcatgagacagatatccccatgttctcacaataaactctttattgtttagctagccccagtgactttatgcatcttataaccaagaagccttcagtagagcaagtctgagccagaggttttatcacactttgtcctcagggtccaccaggaaccaggtcttggctcacagccaggctggaaacagtcttcacagttctgagcctggagtttgagatctgcctcccctttcaaggaagatccagaggtcacctgcgcttgtagagacatggctgaagctgcaggcctgaaagctgagccttgggccctaccagagggggcccagtcttttggaaatcaaacaagaagaaatggctgttggtcaggtccttggagacaatcttgaagcctagcttggtcacagcccgcagaaaggttcgaacatcctcaaagcggctgctgacctcagccactttcaggagaccccctggcttcagtactctatttgcctcctctaggaagtccctgatgttggttcccatcagtgaaaggcaaaacacagccacatccacagactcatcctccagaggaacctgggccatgtcacacacagtgaccctagggtccagagaagccaagtcaaagcaatgcacagggttccggatacttgaagccaagcggcaatccccacagccgaagtcagccaccactagggatgcaggccgctggcgaagatccctggcgatgcggtccactggctgcagtggccacttcttcacttggctctggaagccgcggtggtagagaagaaaagcctcagggtcttcctggaagagacgctgtgcagcactgctgggccctgagtacaactgttcattgaggtagcgaaatcgggccccatccagccgctgtgccatgcgggctcgcaaagcccctgcccgagcctcatggctgtctgtcctgggaacaggagacacctctgtcttctctgtgggggcctcagctggggcctggtctggcacctgaggtggctgaaacttgttcttacatcttctcttgttcttttgccggttccgccactgcttgcggcttaatgtatgagggggtttaggggaagtggacccagggctttgctttggtggatcatttgtagtactacccttccaggctttgggacctgtttggtcaacattgtccaggtgctgggctgaatttataggggcatgtttctggcatttcctctttcttttctcatcttcagcagagtcactgccaacaagagcctgtttgtggcatttcttcttcctttctacttcttcctcagagtcactgcaaggtgggccctgtttttgacatttcttcttccctttcttccctacttcagcagaggcactggcaaatgatgcctttttggggcatttcttcttcctttcctcctcctcctcctcagagtcacttatacataggctggggggatgctgggaaagagatgctgcctctagggcccgtaatgtggccaagagctggcggcgcttggagcccttgttttgcgaggaggccgcaggcggaggtcgtgagattacgggcccaaggcccgcggctactggggccgcctcggcccactcaggctcttcgaacatgagggtcgggagggcagggtcgcc

SEQ ID NO: 5853 - DNA, 906 bp, Homo sapiens
  misc_feature (1)...(906): n = a,t,c or g
ggtctcactttgccacctaggctggggtgccatgccacgatcacggctcactacagcctcaaccttccaggctcaagcaatcctcccacctcggcttcccaagtagctgggactactcactctaggccatgtcctgagattacccaaacagctctacagagaggtcccacaggattaacaactaaggcttcccggccaaaagccagaagaggaagtaaagtctcctggacaatagccatcctcccaccccaaagngggccttcagatgacttcagccttgccaacatcttgcctacaatgttatgaggaatccctgaggccaggaacaactctgcttaaggtgggctccttaaattttctggatggcacaaaactatgtgaggataataggattaaatgtttcattgttttaaggctgctaaggtttagggggtagtttgttatacaggcaataggataaaaatttaaggtatctctcaattattaaatttctcacattgtttgcacctcaacttttttcctttcccaacattcatcagaatcttgaggagcaaggcagctattaattagaaaaggtatctccacatgatcgtcacacccttccctgattggacagtcaccccataaagaacataattagcctgaaaataaatgaggtgcccctttagatgttaagtacagtaagaaagagaggcactgacaaacttagcactattacttactggtttgacttatttaaacctcagggggattccctctactctctcttttatatttgccctgtggaaaggctttcattgggagcagggcaagagccctaaccagaatttttatgaaaacctaataaccctaaagtacctaatcacatatcagacaaattttcaaaactttgttagacagtgagtt

SEQ ID NO: 5854 - DNA, 1977 bp, Homo sapiens
  SIMILAR (1)..(1134): 871254mologous to Homo sapiens golgin-like protein,accession number AF266285,Smith-Waterman Score=1612.
atggagcggttagagacaatcaacatcctcacattggaaaaggcagacttgaagaccaccctttaccatactaaacgtgctgcccgacacttcgaagaagagtccaaggatctggctggccgcctgcaatactccttacagcgtattcaagaattggagcgggctctctgtgctgtgtctacacagcagcaggaagaggacagggggcactgcctgagctccccagatcaaaacttctcactcttcaccatccagtcctcgagctgcagagaagcggtcctccaccggcggttacagcagaccataaaggagcgggcgctgctgaacgcacacgtgacacaggtgacagagtcactaaaacaagtccagctagagcgagacgaatatgctaaacacataaaaggagagagggcccggtggcaggagaggatgtggaaaatgtcggtggaggctcgaacattgaaggaagagaagaagcgtgacatacatcggatacaggagctggagaggagcttgtccgaactcaaaaaccagatgggtaagatggggctgctacaagatgaggccaaacacctgaggcaggaggtggaaggtctggagggaaagctccaatcccaggtggaaaacaatcaggccttgagtctccttagcaaggaacaaaagcagagactccaggagcaggaggagatgctccgagagcaggaggtgcagagagtgcgggagcaggagagactgtgtgaacaaaacgagaggcttcgggagcagcagaagacgctacaggagcagggtgagaggctgcgaaagcaggagcagaggctacgcaaacaggaggagaggctgcgaaaggaggaggagaggctgcaaaagcaggaaaagaggctgtgggaccaggaggagaggctgtggaagaaggaggagaggctacaaaagcaggaggagaggctcgcgctctcccagaaccacaagctcgacaagcagctggccgagccacagtgcagcttcgaggatctgaacaacgagaaaaagagcgcactgcagttggagcagcaagtaaaggagctgcaggagaagctagacgaggtgaaggagatgcagtacgtggccacctatcagcagctgacctctgagaaggaggcgctgcacaggcagttactgctgcagacccagctcgtggaccagctgcagcagcaggaagcttggggcaaagcggagcacctagaagctgccagccagcagaaccaacagctagagacccagctaagcctcgtggctctcccgggagaagacccccttatgctcttggtttcccaccttctgattgctctggcccctcaccccttccgggagccagtggtcagacactttgtcacctgtgaccaacagctcggcatttaccagaaggcatttgaacatcttggcaatgcactgacttatgaccctaccaactacaaggccatcagctgcctgaaacgagccaactacttggcaccctttgattggaagattctgtataatttgggccttgtccatttgaccatgcagcagtatgcatcagcttttcattttctcagtgcggccatcaacttccagccaaagatgggggagctctacatgctcttggcaggtctgcttagcacgtgtaaccctttagtaaacctgaactatgctgtgctgctgtacaaccagggcgagaagaagaacgccctggcccaatatcaggagatggagaagaaagtcagcctactcaaggacaatagctctctggaatttgactctgaggtatgtcttttattagctcccaagagtcataaccagagcaatcagacaagagaaagaaagggcatccagatcagtaaagaagaagtaaaactgtcgctgtttgctgatgacatgatcgtatacctagaaaaccttaaagactcatccaaaaagctcctagaactgtatctaagtgaatattggagcttttctgtgtaa

SEQ ID NO: 5855 - DNA, 320 bp, Homo sapiens
  SIMILAR (6)..(158): 941254mologous to Homo sapiens Human transferase TRNSFS- 3,accession number AAY79211,Smith-Waterman Score=243.
gtctgcttagcacgtgtaaccctttagtaaacctgaactatgctgtgctgctgtacaaccagggcgagaagaagaacgccctggcccaatatcaggagatggagaagaaagtcagcctactcaaggacaatagctctctggaatttgactctgaggtatgtcttttattagctcccaagagtcataaccagagcaatcagacaagagaaagaaagggcatccagatcagtaaagaagaagtaaaactgtcgctgtttgctgatgacatgatcgtatacctagaaaaccttaaagactcatccaaaaagctcctagaactg

SEQ ID NO: 5856 - DNA, 497 bp, Homo sapiens
  SIMILAR (94)..(62): 901254mologous to Homo sapiens Human transferase TRNSFS- 3,accession number AAY79211,Smith-Waterman Score=49.
gttcacatatcccctcaattttcttagtttctcacggttgtaaaggaaacagatacacttactccactgctttcttgtagacttcaatggcccttgtccaagtctccctccagcaagtggatcttccccagcattatataagtcagatcgtgccctattaagaattcagggcattgtgccaactggttcttgtgccttgttgaactgcttcaggtatatgtagcaaactcctaggttatggctgatctcccaatctttctggttgagtttagctgcttcattatatacttcaatggcagctttatgttttcccaaaagaaataaagatctggccacctgcttgaggttatcagcactctgaggactaagaactgcacatgtctggaagagttctagggattcttggatatttccttctaggcgaaatatcaatgcttggacatagatagcatattcacacaatccctgagtctcttgaagctgttctttgatacaca

SEQ ID NO: 5857 - DNA, 2195 bp, Homo sapiens
  SIMILAR (127)..(1245): 861254mologous to Homo sapiens Human transferase TRNSFS- 3,accession number AAY79211,Smith-Waterman Score=1598.
  misc_feature (1)...(2195): n = a,t,c or g
atgcagggctttgtatataatcaccaggtgaacttggaaaccactaaggttctaacttcgacaggttctaccttgcagaccagtggttctcaaaaggaggttctcagacctacaggatcaaccaggaaacttgctggaaaggcacaagaccagttgcacaatgccctgaatcttaataggcacgatctgacttatataatgctggggaagatccacttgctggagggagacttggacaaggccattgaagtctacaagaaagcagtggagttctcaccagaaaatacagagcttcttacaactttaggattactctacttacagctcggcatttaccagaaggcatttgaacatcttggcaatgcactgacttatgaccctaccaactacaaggccatcttggcagcaggcagcatgatgcagacccacggggactttgatgttgccctcaccaaatacagagttgtggcttgtgctgttccagaaagtcctccactctggaataacattggaatgtgtttctttggcaagaagaaatatgtggcggccatcagctgcctgaaacgagccaactacttggcaccctttgattggaagattctgtataatttgggccttgtccatttgaccatgcagcagtatgcatcagcttttcattttctcagtgcggccatcaacttccagccaaagatgggggagctctacatgctcttggcagtggctctgaccaatctggaagatatagaaaatgccaagagagcctacgcagaagcagtccacctggataagtgtaaccctttagtaaacctgaactatgctgtgctgctgtacaaccagggcgagaagaagaacgccctggcccaatatcaggagatggagaagaaagtcagcctactcaaggacaatagctctctggaatttgactctgagatggtggagatggctcagaagttgggagctgctctccaggttggggaggcactggtctggaccaaaccagttaaagatcccaaatcaaagcaccagaccactttcaaccagcaaacctggccagtttccagcagcctctgggctctaatcaagctctaggacaggcaatgtcttcaagcaagctgcatacaggacgctcccctcaggtgctggagggaacatcccagttcacaaagcccccatctcttcctcagcatcccgatgtctgcggtggaatcaagtccaactgaaacatcagaacaaataagagagaaataagaatagaatgaatgaccccaaaatagggttttcttgggcgaggatgtgctggattaggaaaggtgacatgacacaggcagagcagagtggcacccaccacagaatacagtgtgtgttattacgaggagccagcagttgagcctaaggtccttcgtacctacctggtattggcatttgaggtcggaaaccctctactgccccccataagccagggaaaagtgaaaagagaacaccagttccttttaagaactgggcagcaaaggcttgagggcttattgtatgtagctgagtcagcaaggtacatggatgcttgtctgcttttcaaaagggacttttcttttcctaggctggactgactccttccttagtttcaagggaacagctgagacagacctctgctgagtagctctgtgatgacaaagccttggtttaactgaggtgntccctcaggttgtgaggtttattagtccccaaggcaaacacaaatattagattaataatccaactttaatagtatacatttaaaagaaaaaaaaacaaaagccctggaagttgagcccaagccctgcctgagtaattgcagcctgcattttggccccaaagggaatcccagaacaagtcccctcccctgtattttgttccttgagaggggtcagtcctagaagctagatccctatcaggatgaggagcagcagccccagggcttgtctggatcagcaccaacggattttaaagaaaaaaggaagagtttcttagatgagtaattgttattgaagatagtcagtgataaccactgaccagatgctatcaatacactatgtgtcctttttagaataaagggttacatatcatcattcctttggggaaaattgttattcaggtataaaaacaagagatcataataaaaacctaaaagaacctatgaaaaaaaaaaaaaaagtcgacgc

SEQ ID NO: 5858 - DNA, 1159 bp, Homo sapiens
  SIMILAR (681)..(211): 461254mologous to Mus musculus piL,accession number AF229032,Smith-Waterman Score=254.
ttagtctatcattgctttgtaaacattctccggttttacattactacagaatatggtccagatataaagttctactgtgtcataagacagctgattttcagaattacgtgatttattcataatgtctaattcacagcgaagtcgctggatagcactgccaattttaaggagctgaattctcaatacatcatcaataggaagacaagcagctactccatctgactgtgttcttagctcaaggactttgaaaccctttgtccttccaattgcctttccactttccactatcctcaattccaaaaatccctgttccttcctcgataggcatatatcctctgctgttgttcccaaactgtgcttccctttcctgtacattgctgtatgcaaagaacagcaaaggttctatcttcctgaaattaaattcccgcaccataactggacttcttgaagggtgaaaaagctgaagaggtaatgtctgtccgggaatcaggatacttcatcacttgtggaagaactggaatcacctgacagctgtcgtcatcatgcaaagtcctgcccatgaaattcttccatatcagcacctaggtatgtatgtgatgtcggcagactggtgtcaaaatttatgatgtttggtttttttggcttctttactatcctggtcttcaacttccatttcatcttcttcctcactctctgggctcggggcaacagagcagcgaagaaagcgccgcgactccatcgctggccgagggccgacgtgaagcagctttccggtgcggccctgctgggctggctcgccaggcttggcgcccccacgcccgcctcccaggcccagctgcaccgctagcggctccgagcctcgccccactcccgacaggcaggagcggcaggtggttgcccatgttgtgcgcagcgtcctgctgatctccttcgccggccatgtctgtttacccgcaaaggaggctgggacagggcggtgccgaagactccgagggagggtccgtgtcgcgcggctgccgcgcaccggggccacagcgccccctggcggccccaggggagcagacggcggcgcgtacccaagcatctgtgtatcttttactcccccattctcctcctctcctctccgctcttcacattcatcacctgctccctccttcat

SEQ ID NO: 5859 - DNA, 368 bp, Homo sapiens
ggcacgagcctgaagcaagaggaagccttccgcagctactttgagatcttcaatggtcctggtgaggtggatgcacagagcctgaagaatatcctgctcctaatgggcttctctgtgacgctggcccaggtggaggacgccctgatgagtgctgatgtcaatggagatggtcgtgaggacttcaaagacttcttggctgtgatgacagacaccacgcgcttcttctgctttgcggaacagaacgccctgtccgacatggctctttccaacccacacactctactctttgagatactgcacctgccgctatacatgctggccttaccaaatgctcgcctatgcgatattcctgactgcatcctcatacg

SEQ ID NO: 5860 - DNA, 358 bp, Homo sapiens
  SIMILAR (18)..(233): 841254mologous to Homo sapiens inter-alpha-trypsin inhibitor heavy chain old gene name 'ITI',accession number M18193,Smith- Waterman Score=312.
ggcacgagcggaacgagtatttccgaagtgaggacttaaaactacaaatcagcactgagaccatcaccctgagccatggttctagcacattctccttgtcctggtccgacacggctcaagtcacgaatcagagggtgcagatctcagtgaagaaagaaaaagtggtaactatcaccctggataaagagatgtcctttactgttgtacttactcgtgtttggaatcacgcaatctttatatgatgactctctcagaattcaactatcctactacatactagaatctgattcctactcctatgtatggcttaaccagatcatgcacatactcgtaaattacatgtccgatatgagtacgg

SEQ ID NO: 5861 - DNA, 709 bp, Homo sapiens
ataatatgtgtctgaaaagatgagttttagaaattaagaaaaaagagatcattcccacttcaactccttactctactctacccccattgaaaacagaccttcctccgctttacccacaggttcctccaccaagccaatgccagactcctgcaatccataggatggcaacaccacctctaaagccacagaactttaaggctttgcttcggaagtggcaccatggtctcttcattttccctttcttcaagggaaaatccttgaagaaatttccttcagaaaactcctgaagctgttaggagttttagtgttaagttccttccgaggatgttaattaggcttcaaactgttttgttctgagaaataaaaactaaactccagtcattcaagctaacagttgaggtgttctatggcttcaaaatcaagtaagatttgtaaatgaattgctaggtgcaaccattacttattatatgcccacaccaaaccagtggagaaaattatggacaccgccatccaagtgattgagattattaattttaggtagcaggccaattcagacatgtccacttatcctcaatggcagggggcctctcacatcccctccctgtaacccagttcaatacttctgtctaaagtctagaatttcaatgttgaaaggagagcgtggttagtgagagaaaatccacaaagtttatcctgatgatccttttct

SEQ ID NO: 5862 - DNA, 466 bp, Homo sapiens
  SIMILAR (23)..(271): 1001254mologous to Homo sapiens dJ402G11.7 (novel protein similar to KIAA0901 and mouse histone deacetylase MHDA2),accession number AL022328,Smith-Waterman Score=434.
  misc_feature (1)...(466): n = a,t,c or g
cccggatcgacccacgcgtccggctgtgccgatgagccccagcagccactccccagaggggaggcctccacctctgctgcctgggggtccagtgtgtaaggcagctgcatctgcaccgagctccctcctggaccagccgtgcctctgccccgcaccctctgtccgcaccgctgttgccctgacaacgccggatatcacattggttctgccccctgacgtcatccaacaggaagcgtcagccctgagggaggagacagaagcctgggccaggtgaacagtggtatagcagccactccagcctctgctgcagcagccaccctggatgtggctgttcggagaggcctgtcccacggagcccagaggctgctgtgcgtggccctgggacagctggaccggcctccaaacctcgcccatgacgggaggagtctgtggctgaacatcangggcaaggaggcggctgccctat

SEQ ID NO: 5863 - DNA, 5160 bp, Homo sapiens
  SIMILAR (1409)..(2083): 551254mologous to Homo sapiens stress-activated protein kinase-3,accession number Y10487,Smith-Waterman Score=497.
ggcgcggggcgcggggctgggcccgggcggagcggcggctgctccggacatgtcgggccctcgcgccggcttctaccggcaggagctgaacaagaccgtgtgggaggtgccgcagcggccgccctcggacccctcccggcgccgcctcactcgcccgccttccagttcggcctacgacgcccggctgcgccagaaggtggcggtgaagaagctgtcgcgccccttccagtcgctgatccacgcgcgacgacagccgggggttcgtcgcccggccctgacgccccccgccacctaggtcatcgggctcgcggtggggcggtggggccctgtcctgaccccctgaccccgccccaggtacttggtgaccaccctgatgggcgccgacctgaacaacatcgtcaagtgccaggcgctgaggggggcgggcgggccgggcccggcgctcacgcagggctccgtcccagcctcctgtgctcacgctccgcgtgacctgcaggacctgaagcccagcaacgtggctgtgaacgaggactgtgagctcagggtgaggcccgtgggcaggggtgggcagggcggcggcggagcccgtgcggagcttgagaacaccacgtggtcgccccagatcctggattttgggctggcgcgccaggcggacgaggagatgaccggctatgtggccacgcgctggagggacgtggggtgggcacactgatggaggtcccctcgccctcgcacagtggatatctggtccgtgggctgcatcatggctgagctgctctgccccccatgctatgctactttgggctggccatcctcacctataggagagcgggctctgggcagcgccccaaagttttgggtctgggggcccaggaggggtctgtggctggcccgtgggtgtttcctgagtgacacagacattgaccagctgaagcgcatcatggaagtgggaggcagagagtgagcagcctccccaggtgttcttgtgtgcccccaggcccggacatatatccagtccctgccccccgccctggatgtacagctgacccccctccccaccactggcttccctgcagccatagacctccttggaaggatgctggtgctggacagtgaccagagggtcagtgcagctgaggcactggcccacgcctacttcagccagtaccacgaccccgaggatgagccagaggccgagccagggccgggctgtgggaggcacaagctcaccctttcccttcacctcctagagctcacttaccaggaagtcctcagctgggacgaagctgcggggcggcgctcccctccccctgcgcttccccccaggctccggccctccccaggctccggccctcccccggcggcggccgcctcgggtttccggaggtgggcagctcccgggcctgccatgagctctccgccgcccgcccgcagtggcttttaccgccaggaggtgaccaagacggcctgggaggtgcgcgccggggcctgcgcggggtgcccggccttcccgctaagcggtccgccccgcagctcggccgtggacggccgcaccggcgctaaggtggccatcaagaagctgtatcggcctttccagtccgagctgttcgccaacccagcccgtgtcctctgctgcattctcaaccctatgtggcccccccaggtgatcgggcatgcagaggctggctctgtccgctgacagcgctccggcccctcccacagttacctggtgatgccgttcatgggcaccgacctgggcaagctcatgaaacatgagaagctaggggctctgagagggtgcgctgaagcctgccaccatgcttgggagggtggggcacagtggccacctttcctctgcccccaccgctccttgggagtcccctagaacccacctccccaattcttcccacagatcctggacttcggcctggccaggcaggcagacagtgagatgactgggtacgtggtgacccggtggtctcatcctgtccccctgcccacggagctgaccagggcttctatctcagtggacatctggtctgtgggctgcatcatggcggagatgatcacaggcaagacgctgtgctcctgcccaggtgggggcagtgggggccctgatctctggcccccgagctgtgttcctgacctcggtgcagacctggaccagctgaaggagatcatgaaggtggcggacctgggccttggtgttggcccctcaccctttcttcccacacaggccaagaactacatgaagggcctccccgaatggagtgtggggcctcccgtggtctggcctgatgcaccttcccccgcagctgtgaacctcctggagaagatgctggtgctggacgcggagcagcgggtgacggcaggcgaggcgctggcccatccctacttcgagtccctgcacgacacggaagatgagccccaggtccagaaggccacgacagatgggccttctctgcccagcgaccctcatgcctctccagggcatccgggcctgggggacgtgatcgccatcagttccggagccacgctgacttgtggcatggctgctgtccacactgggcccaaagtgtgggcccataggtggcctgaggactggggcgtggcctttgccctgcagacccctcgcccccctcgcctttcaccccaggtcttcctgcgcccgggccgggtgggccttggggctgcgctggaccctgacccagggtggggtgcggggagggacctctgaactgagctcctcatctgccccagccccgagtgcgagatcgagcgtcctgagcgcctgaccgcagccctggatcgcctgcggcagcgcggcctggaacagaggtgtctgcctgctcctgctggtgaccctgcctctcctgcctgcccatctgcatgcagcccagagtatgtatccctggtcagggagacccaggtcctaggcaaggaaagggcagcagggaaggcagggggctcatctgcgcccctgcgcccacagagtacctttcactgcgcgcggctggccgcaggggctggactgcagctggggggccagggcgaccctgacgtgacccaaatcctactctcacgccgtaggcctcccgggcaccatggccagagggcggctgccaacgggttctgtgtgttcaacatggaggtgggaggccctgcccctttgccaccagcgctgtctgtacccaggatcctcgtcgtggactgggtgttgagggtcctgacctttgacctctggccctggctggctgttggcagcgtcctttacttctcctggcaccgctatgagcatgggcgcttctggcctttcctgcgagagtcagatgcagacgcagtggggcggggacagggcctcggggctccagcccctctctgtcgaccctccccactccggcctggcctgtagtttgaccctgactggggtcctggggcccaggtcccccatcacacatggctctggttccaggggcaaatgcaggccacgccagagtgcttcgcccacctcacccatcccagtgatatctctgccccaatcatgtctccaccctcctcccagggcggctaccacctggagtcactggcggagtcagtgtgcatgacagtacagacgctgctgggtgacccgggggccggggtgtgagaccaggtgtcacgactgttgtgtctccctcacagtgccctagagtccatccagtcccacctcgggctcctgtgcagtggctatgactccgaactgtccctagatgtgaccgctgtgccgatgagccccagcagccactccccagaggggaggcctccacctctgctgcctgggggtccagtgtgtaaggcagctgcatctgcaccgagctccctcctggaccagccgtgcctctgccccgcaccctctgtccgcaccgctgttgccctgacaacgccggatatcacattggttctgccccctgacgtcaacctgcggtcactccgtgtctgtgtgtccctctggtctgtccaccacaggccacacgagtccctggcccgggaggaggccctcaccttgggagttggttggtgcctcattctccactgtttattcatcccacaggtgaacagtggtatagcagccactccagcctctgctgcagcaggtgacgggtgggtggggcactgtgtggtactgaatggagccttcctcagctggggtgtgggagaagggctgctggaggcaatgccaggtgggtctccagcacagaggctcagcagtcacagcacccctgcccatggagccagcaggtgtccgtagatgaggagctgggctctgctgtccccacagatgaccggtggtttcctgagctgcatcttgggcttggtgctgcccctggcctatggcttccagcctgacctggtgctggtggcgctggggcctggccatggcctgcagggcccccacgctgcactcctggctgcggacgagggaaaggaccagtgactgcttccgtcttcgcccctggtccagaactccacaccccagctagcagggatcctggcccgggtgctgaatggagaggcacctcctagcctaggcccttcctctgtggcctccccagaggacgtccaggcctcacctcgcccccgccccacccatcgcgccccggcccgtcccatcgaggcccatgcaacccacgctcggtcccgttccggcccctgcgccccgctgcgcttcgctccccgcccttgcgccgttagtaaacatcgctcaaacgaaacgctggctctgcctcctttactgagcacgctcggcctcggtctctcacccgcggtgccggactcaggccggaagtatgccgcggcccaggcctcaccaacttcacgcgctgccggcgttcccgtgacgtatttccggcgcgcccgccctagtgctcttcacactggcgcggctgtgacgcgacggaggcggcgagagcggcagccgtgggcactttccacgggtgaggcctggagaacgggtggacgtgcaggccagaacccgggacccacccggctgagcccccagactctccgctgcccacgaccctcggagtggcaccctctcctggccgtctcctctcgtgggtcccgaagaacgggtgcaaagccgagttcgtccgctgtactgcgcgggcgcgcgtttcgttc

SEQ ID NO: 5864 - DNA, 229 bp, Homo sapiens
  SIMILAR (24)..(227): 761254mologous to Homo sapiens stress-activated protein kinase-3,accession number Y10487,Smith-Waterman Score=234.
ggtgggcagctcccgggcctgccatgagctctccgccgcccgcccgcagtggcttttaccgccaggaggtgaccaagacggcctgggaggtgcgcgccggggcctgcgcggggtgcccggccttcccgctaagcggtccgccccgcagctcggccgtggacggccgcaccggcgctaaggtggccatcaagaagctgtatcggcctttccagtccgagctgttcgccaa

SEQ ID NO: 5865 - DNA, 142 bp, Homo sapiens
atgcagaggctggctctgtccgctgacagcgctccggcccctcccacagttacctggtgatgccgttcatgggcaccgacctgggcaagctcatgaaacatgagaagctaggggctctgagagggtgcgctgaagcctgcca

SEQ ID NO: 5866 - DNA, 708 bp, Homo sapiens
  SIMILAR (708)..(601): 751254mologous to Homo sapiens Human secreted protein encoded by Gene No. 15,accession number AAW73411,Smith-Waterman Score=136.
gaacgaaacgcgcgcccgcgcagtacagcggacgaactcggctttgcacccgttcttcgggacccacgagaggagacggccaggagagggtgccactccgagggtcgtgggcagcggagagtctgggggctcagccgggtgggtcccgggttctggcctgcacgtccacccgttctccaggcctcacccgtggaaagtgcccacggctgccgctctcgccgcctccgtcgcgtcacagccgcgccagtgtgaagagcactagggcgggcgcgccggaaatacgtcacgggaacgccggcagcgcgtgaagttggtgaggcctgggccgcggcatacttccggcctgagtccggcaccgcgggtgagagaccgaggccgagcgtgctcagtaaaggaggcagagccagcgtttcgtttgagcgatgtttactaacggcgcaagggcggggagcgaagcgcagcggggcgcaggggccggaacgggaccgagcgtgggttgcatgggcctcgatgggacgggccggggcgcgatgggtggggcgggggcgaggtgaggcctggacgtcctctggggaggccacagaggaagggcctaggctaggaggtgcctctccattcagcacccgggccaggatccctgctagctggggtgtggagttctggaccaggggcgaagacggaagcagtcactggtcctttccctcgtcc

SEQ ID NO: 5867 - DNA, 914 bp, Homo sapiens
  SIMILAR (198)..(70): 391254mologous to Homo sapiens Human secreted protein encoded by Gene No. 15,accession number AAW73411,Smith-Waterman Score=93.
cagtcactggtccttcccctcgtcccaccccgcagcacctccaccctgcccagcttacctcctccaggagggccaggactcggccccctgccagcccccgaagcattgcagccaggagtgcagcgtgggggccctgcaggccatggccaggccccagcgccaccagcaccaggtcaggctggaagccataggccaggggcagcaccaagcccaagatgcagctcaggaaaccaccggtcatctgtggggacagcagagcccagctcctcatctacggacacctgctggctccatgggcaggggtgctgtgactgctgagcctctgtgctggagacccacctggcattgcctccagcagcccttctcccacaccccagctgaggaaggctccattcagtaccacacagtgccccacccacccgtcaccctggggcccaggcacacgtccatcacatgcccgtccacatgcatggctggacatatgcaagacctgagagtcctacccgtcatgggcgaggtctggaggccggtccagctgtcccagggccacgcacagcagcctggaagaagagctggcctcaggacaggtgttcatgttgtccagagtccattcccagaactctctgtgcttggccagccaggataggggtgcccacaggtcctgccgtcagaggctcaggatggccaagtgaggcttacctctgggctccgtgggacaggcctctccgaacagccacatccagggtggctgctgcagcagaggctggagtggctgctataccactgttcacctgtgggatgaataaacagtggagaatgaggcaccaaccaactcccaagccaggtaaacagatccacagttcccttcattcggtgtgtctctgcggctactgtcagccacacgtcttcttaca

SEQ ID NO: 5868 - DNA, 2006 bp, Homo sapiens
  SIMILAR (403)..(1581): 961254mologous to Homo sapiens Human ERK-5,accession number AAR60700,Smith-Waterman Score=1983.
tggttaacgccagggttttcccagtcacgaacgttgtaaaacgacggccagtgccaagctaaaattaaccttcactaaagggaataagcttgcggccgcttcgggtttccggaggggccggagggcgggcgagggcgtcacgtgcgcgccgcccgcgggccggttggtccccgggcgggggaggggccgtgcgcagcctgggtcggggtcgggccggggtcggcacctgggacatccctgagggaagggccgggagcgggagcgccccagcggccggcgggcgggcgggcgagcggacgagcggcgcggagccggcccgaggcgcgcgccgagggagccccgtccccggtcgtgggggcaccgcccgcaggctctgcggggtgggcagctcccgggcctgccatgagctctccgccgcccgcccgcagtggcttttaccgccaggaggtgaccaagacggcctgggaggtgcgcgccgtgtaccgggacctgcagcccgtgggctcgggcgcctacggcgcggtgtgctcggccgtggacggccgcaccggcgctaaggtggccatcaagaagctgtatcggcccttccagtccgagctgttcgccaagcgcgcctaccgcgagctgcgcctgctcaagcacatgcgccacgagaacgtgatcgggctgctggacgtattcactcctgatgagaccctggatgacttcacggacttttacctggtgatgccgttcatgggcaccgacctgggcaagctcatgaaacatgagaagctaggcgaggaccggatccagttcctcgtgtaccagatgctgaaggggctgaggtatatccacgctgccggcatcatccacagagacctgaagcccggcaacctggctgtgaacgaagactgtgagctgaagatcctggacttcggcctggccaggcaggcagacagtgagatgactgggtacgtggtgacccggtggtaccgggctcccgaggtcatcttgaattggatgcgctacacgcagacggtggacatctggtccgtgggctgcatcatggcggagatgatcacaggcaagacgctgttcaagggcagcgaccacctggaccagctgaaggagatcatgaaggtgacggggacgcctccggctgagtttgtgcagcggctgcagagcgatgaggccaagaacaacatgaagggcctccccgaattggagaagaaggattttgcctctatcctgaccaatgcaagccctctggctgtgaacctcctggagaagatgctggtgctggacgcggagcagcgggtgacggcaggcgaggcgctggcccatccctacttcgagtccctgcacgacacggaagatgagccccaggtccagaagtatgatgactcctttgacgacgttgaccgcacactggatgaatggaagccgtgttacttacaaagaggtgctcagcttcaagcctccccggcagctgggggccagggtctccaaggagacgcctctgtgaagatctctgggctccggggtggcagtgaggaccaccttcaccttccacctgagaggggactctcgttgccaccttgaccttggctggggcttgcatcccaaggcatccatcagagcagacgcccgggttccatggaccctcctccccacggccatgcctctgctcttgggcgcccatcatggaggagcacctgaactttctggacaagacctctggccgacctggggatggcctctgatccctggagcagtggaacacaaaaaacaatactctcagaaacctcagagctggtggggctccagatcaggccttggcctctgagccctgcctgctctgggccatgcagaggaaggacagagggtgggcgcagggcaccaactcagggacatcccctctcctgggcgacgtcagtggaccttcctgcacccccagcctggaatgtaaatcagctgtgtggtgcccgcgtggctggaaggaaatagacccttttgtagctccc

SEQ ID NO: 5869 - DNA, 905 bp, Homo sapiens
  SIMILAR (310)..(432): 601254mologous to Homo sapiens Human secreted protein, SEQ ID NO: 4718,accession number AAG00637,Smith-Waterman Score=114.
ggcacgagaccagaactgggttctgacaggtgggagccagcagctcctgaaggctgggggcagagggttttgaggggacccaggttagtggggcattggcctagccctgggccgtgggtatcactcagtgtcttgcagtaggtgttgatactttcgaagccacattgtttcttgggttcttacacatgtttatatcacgttggtataccgatcaccctttccaatgaccatatttattgccaattttttcttttaaatattttcaattttcaaagtgtgtagtgcgtgcattgttttaaaaagtttggtagtactttttggccgtttggatatttaactccgtttctttttttttgaagacggagtcttgctttgtcgcccagtccggagtgcagtgacgtgatctcagctcactgcaagctctgcctccctgggttcacaccattctcttgcctcagcctcctgagtagctgggactacaggtgcccgccaccacgcctggctaattttttttttgtatttttagtagagacggggtttcaccgtgttagccaggatggtcttgatctcctcacctcatgatctgcccgcctcagcctcccaaagtgctgggattacaggtgtgagccaccgcgcccggcctagaggaaggttattagccccatcttatatttgcagaaacagagggttagagggttgaggttactcagctaaaaaaatgatggagccaggtttccaacatccagagcctgtgttcttattttttatttttattgaaaagataatacagtacaaaagagtacatattaaaaggtaaggctctgttctactccagactcctagctgtttcccttctcagaggacatcattcatatgaagacattttctaagtgtttacaagcaca

SEQ ID NO: 5870 - DNA, 3002 bp, Homo sapiens
  SIMILAR (335)..(625): 671254mologous to Homo sapiens stress-activated protein kinase-3,accession number Y10487,Smith-Waterman Score=292.
  misc_feature (1)...(3002): n = a,t,c or g
ccatgcttgggagggtggggcacagtggccacctttcctctgcccccaccgctccttgggagtcccctagaacccacctccccaattcttcccacagatcctggacttcggcctggccaggcaggcagacagtgagatgactgggtacgtggtgacccggtggtctcatcctgtccccctgcccacggagctgaccagggcttctatctcagtggacatctggtctgtgggctgcatcatggcggagatgatcacaggcaagacgctgtgctcctgcccaggtgggggcagtgggggccctgatctctggcccccgagctgtgttcctgacctcggtgcagacctggaccagctgaaggagatcatgaaggtggcggacctgggccttggtgttggcccctcaccctttcttcccacacaggccaagaactacatgaagggcctccccgaatggagtgtggggcctcccgtggtctggcctgatgcaccttcccccgcagctgtgaacctcctggagaagatgctggtgctggacgcggagcagcgggtgacggcaggcgaggcgctggcccatccctacttcgagtccctgcacgacacggaagatgagccccaggtccagaaggccacgacagatgggccttctctgcccagcgaccctcatgcctctccagggcatccgggcctgggggacgtgatcgccatcagttccggagccacgctgacttgtggcatggctgctgtccacactgggcccaaagtgtgggcccataggtggcctgaggactggggcgtggcctttgccctgcagacccctcgcccccctcgcctttcaccccaggtcttcctgcgcccgggccgggtgggccttggggctgcgctggaccctgacccagggtggggtgcggggagggacctctgaactgagctcctcatctgccccagccccgagtgcgagatcgagcgtcctgagcgcctgaccgcagccctggatcgcctgcggcagcgcggcctggaacagaggtgtctgcctgctcctgctggtgaccctgcctctcctgcctgcccatctgcatgcagcccagagtatgtatccctggtcagggagacccaggtcctaggcaaggaaagggcagcagggaaggcagggggctcatctgcgcccctgcgcccacagagtacctttcactgcgcgcggctggccgcaggggctggactgcagctggggggccagggcgaccctgacgtgacccaaatcctactctcacgccgtaggcctcccgggcaccatggccagagggcggctgccaacgggttctgtgtgttcaacatggaggtgggaggccctgcccctttgccaccagcgctgtctgtacccaggatcctcgtcgtggactgggtgttgagggtcctgacctttgacctctggccctggctggctgttggcagcgtcctttacttctcctggcaccgctatgagcatgggcgcttctggcctttcctgcgagagtcagatgcagacgcagtggggcggggacagggcctcggggctccagcccctctctgtcgaccctccccactccggcctggcctgtagtttgaccctgactggggtcctggggcccaggtcccccatcacacatggctctggttccaggggcaaatgcaggccacgccagagtgcttcgcccacctcacacagctgctgcatgtgctggccggcggccgggtctgtgccgtgctggagggcggctaccacctggagtcactggcggagtcagtgtgcatgacagtacagacgctgctgggtgacccgggggccggggtgtgagaccaggtgtcacgactgttgtgtctccctcacagtgccctagagtccatccagtcccacctcgggctcctgtgcagtggctatgactccgaactgtccctagatgtgaccgctgtgccgatgagccccagcagccactccccagaggggaggcctccacctctgctgcctgggggtccagtgtgtaaggcagctgcatctgcaccgagctccctcctggaccagccgtgcctctgccccgcaccctctgtccgcaccgctgttgcccctnaccaacgccggatatcacattggttctgccccctgacgtcatccaacaggaaagcgtcagccctgaagggaggagacagaagcctgggccaggccacacgagtccctggcccgggaggaggccctcactgcacttgggaagctcctgtacctcttagatgggatgctggatgggcaggtgaacagtggtatagcagccactccagcctctgctgcagcagccaccctggatgtggctgttcggagaggcctgtcccacggagcccagaggcttgctgtgcgtggtcccgggacagctggaccggcctccagacctcgcccatgacgggaggagtctgtggctgaacatcaggggccaaaggaagcggctgcccttatccaatgttccatgtctccaacgccacttgcaagtgatgaccggtggtttcctgagctgccatcttgggcttggtggcttcccctggcctaatggcttcccagcctgaccctggtgctggtggcgcttggggccttgcccatggcctgcagggcccccacgctgcactccctggctgcaatgcttcgggggctggcaggggggccgagtccctggccctcctggaggagaactccccncaccccagctagcagggatcctggccccggtgcctaattgagaagcaccttcctagcctaggcccctcctctgtggcctccccagaggacgtccaggccctgatgtacctgagagggcagctggagcctcagtggaagatgttgcagtgccatcctcacctggtggcttgaaatcggccaaggtgggagcatttacaccgcagaaatgacaccgcacgccagcgccccgcggccgcgatccggaccccaagcccacggctccctcgactctggggcacggaacccc

SEQ ID NO: 5871 - DNA, 816 bp, Homo sapiens
  SIMILAR (20)..(217): 561254mologous to Homo sapiens Human secreted protein, SEQ ID NO: 7867,accession number AAG03786,Smith-Waterman Score=177.
tggagacaaagtggctcactctgttaccaaggttggagtgcagtggcacaaccattgctcaccacaacctcgaccttctgggctcaagcgatcctctagcctcagtctccaaagcagctgggaccacagacgcatgccaccgtgcctggctcattttttaattttttgtagagacggagtcttgctagggctgcccagactgggtgtcgcactcctgggcctcaagcgatcctcccacctcgggcttcccaaagtgctgaggattacggggagtgaggccacaatacttgggcctcaaggattttcttaatgggaaattatgtttatctccctcaagttcgggaaagtgaggctgccgtactattctggtatcattacaatattacttttaaaatcaaatagttcctttataaatagttcttaattctaagtctaagcaaaaactgggaggtaacctgatgtaaaatgttccttcctatttaatccaaaagttgtctttttccccacaatacaaatatatcattttcattcccaattcctaatttggctacttcagtttgttttctgttttttgtcatcctttcttgaagcataacctggagcaagttctgctgtaaaactttaaaaaactgtgaaacttgtacacatttctttggaaaatttattgttgactttaactgtctgttggcctctaatatcaatactgggtgacattattggtaatgccacaacatgtattttaaaattaattttaaatgtaatcccctcataaaacagaaagactaccccttccaagtatctacctgttaagtgtct

SEQ ID NO: 5872 - DNA, 6567 bp, Homo sapiens
  SIMILAR (1016)..(1657): 731254mologous to Mus musculus putative,accession number AK005440,Smith-Waterman Score=754.
gagatcagcgctgggacggaacccgggttcctctcgaaccgggattgtgacgcttttggcctggctggccgctgttttctgtcccactttttactcgggcctgcgtccgctgccgccgtccctcagtttgcccccggaggaggcagggcggccgtgccttctgccgtgcgcccgcgtggctgccaccgcccctccgaatcctccggggccgcagaggggttcgctacggagggaggtgggggccttcgggaggaggaggcggaggaggcggaggaggagggaaggaagatggcggccgtggaactagagtggatcccagagactctctataacaccgccatctccgctgtcgtggacaactacatccgctcccgccgagacatccgctccttgcccgagaacatccagtttgatgtttactacaagctttaccaacagggacgcttatgtcaactgggcagtgaattttgtgaattggaagtttttgctaaagtactgagagctttggataaaagacatttgcttcatcattgttttcaggctttgatggatcatggtgttaaagttgcttcagtcttggcctactcattcagtaggcggtgctcttatatagcagaatcagatgctgcagtaaaggaaaaagccattcaggttggctttgttttaggtggctttctttcagatgcaggctggtacagtgatgctgagaaagtttttctgtcctgccttcagttgtgtactctacacgatgagatgcttcattggtttcgtgcagtagaatgttgtgtgaggttgcttcatgtgcgaaatggaaactgcaaatatcatttgggtgaagaaacatttaaattagctcagacatatatggataaactatcaaaacatggccagcaagcaaataaagctgcactctatggagaactgtgtgcactcctatttgcaaaaagtcactatgatgaggcatacaaatggtgcatcgaggcaatgaaagaaattacagcaggcttaccagtgaaagttgtgtgtggatgtcttaagacaagcttctaaggcttgtgtagtaaaacgtgaatttaagaaggcagaacagttaattaaacatgcagtgtatttggcacgggatcattttggatccaaacacccaaaatattctgatacactgctagattatgggttctacttactcaatgtagataatatctgtcagtctgttgcaatttatcaggcagcccttgacattagacagtcagtgtttggtggcaaaaatatccacgtagcaacagctcatgaagatttggcctactcttcctatgtccaccagtatagctctgggaaatttgacaatgcactatttcatgcagaaagagctattggtatcattacccacatcctacctgaagatcatcttcttttgggcttcttcaaagagggtgaaagcacttattttagaggagattgcaattgattgtcataataaggaaactgaacagaggctgcttcaagaagctcatgatttgcacctgtcttcactccaactagctaaaaaagcttttgggggaatttaatgtacagactgcaaaacactatgggaaaccttggaagactttatcagtcaatgagaaaatttaaggaagctgaagaaatgcacatcaaaagcaattcagattaaagaacaacttcttggtcaagaagattatgaagtagccctttcagtgggacatctggcttctttatataattatgacatgaatcagtatgaaaatgctgagaaactttatttgccgatctatagcaatttgggaagaaactttttggtgagggctacagtggactagaatatgattatcgaggtctcattaaactttacaactccattggaaattacgagaaagtggtttgaatatcacaatgttctgtctaactggaaccggttgcggagatcggcaatattcagtgacagatgctcttgaagatgtccagcacccagcccccgagtcccactgaagaagtggtgccagtcccttccctgatttcctcagaatgtccgagggacccgagctgcctgagggaaggacctcagttaacccaattacccttttcccggattccagggaattcatactgtgaaatcaaaaccatgttgttttggggggctggaatcttgcattgaaacactggtccagtcgattgaagaccctattttgggtgatccctatcgtgcagaatgtctgtaggaataagcatatgttcaggtatatgcagcatgtaccgcatgtgtaagtagtctggcccacattgtcaacctgagtagaacaaacaacaggaaatcttttttttgttgtttttaaaaaattcattttgcagaaagcctgaaagaaaaaaaatacccctaaataaaactatttaagagtttaaaagagttgcattcttattatgtaaggatgattttaacaactttttaatatgtaattcttccatgtgggaggtattcaatactgtagtgtaaaggaaattttatgcgggaaaatctttatatggcagtataggaaaagttaacacaagtacttaattaaaggggggacatccccgacttacgtttttctaccttgcccagataagtggatacaaccactctatattacaaggaaaggactgtcagattcatctgaactggaccagtgttgatctgtaatgtaatagaaaatctgatagaccagcacttctgacttttttttttttggtacaacaatgcaagatgccctgatagcatttgctaacaggaccaggaggatctaaaaaggaccagcctaatgtagaaggtggttatttggaccagaggctttagattattattttagatcctacatatacttttatcagtagaatgatttcatttagatgtataatgaaaaaggataatgcaaaaattatgtaatagataccaaattagggaagtttggcaatttcaatggcatatttttagtcaaggtacacagatggcagtgccataagcaagtctataaatatcggctgcagccatccccctcattttaaatgttgccctaataatcaatgcagttaacaagtatattggctgtgtgtcatgaaatagttcatgttcagatggaaatgttaggttactgtatggtttatggagattaatgaaaatgaatgcccaaaaataagtcttagaaaatcctccatttttatggtaaatagtaatacaactaggtcatttcatttgaaatctaggagtcaaatggaaagatcccctaataatacacctatttgcactgaacttgtctttgctgtttattgggttttgatttgattttttgtaagccagtcaggttatttaatgatgaggtaataatcaaatttaagaatttgtgacatgtagcaattcaagaaacaaaaaggtattttgctgttacctcaattcttactgtagtagcccatctgatgacttctatagttaagaatctgggttccccccctattttcaggggttcatgacttggctgttaaagatgttgctcctagctaatgcttggagtagtctgtgggtgaatggatgtgtgttgaattttagttttcttttaacatgcatgttgggtgagaggggaaaaaaatctaagctgtctgccacatggagtacagaaaagtggtagatttcaaattttattaatattttaggcactttttggaacttcccaaccttgttggaagctgttatttgcagtcctattagttttgagcccattgcatttaagttccctaggagggggttggttgggggatgtactgaaagagatgaagcaaacccacacccttaagatggtaactgtgtgatttagaaacctgagtttactcctcaaatcggaattattttctttttaaattttggaaagagtaaattgaccgtacttgcagtttatgaagctgccccccacccctcagttaattgtcagtcctaatgtcaagaggcacttctttattaattaccaaatagtactttgtgacccaaggactaacatttttaagttactcagctctatcctcatgggccctatatatttaatacctccaaagatattttcaggataggctttgtatacttttattggttatttagaatccagtggtatgtttgtggtataggaatgtcatggtaaattgtttttcaataaatattttgaaacatgtttccatatgaagtttttttttcaatctgtattttttggttttgtgcacatacagcatttcctaggataaaaataaacaaatgacttacagcctcatcctccctaactccatttgaactcaacttagctcacactcagtgataaaacaacatggtatgtagaagcctaggatcacagggtgataatgtcaattggcagccagttgtgtttttttgaaacatcattattggcagtttctccttatcaccactgctttaatgtagtttttttgtaaatccatatactttaatgcatacactctagcttaagaaaacattgccattttggttagggatatgacttaatgtgctattatttctggttctaatgaagaataataccctatgactttaagtgtaagattcatcctttaagtagggatgtttaggataagttagatgtgtgccactatgatttattgggtttcttaaaaatcttgaagaaaataataaaatttatctcacaataagttaacttgcgcaaactttttacatatggtgaggtgcgtaaggaagccctggccaacttaaagatttttctggaggttcagcaaagttatgttaaattaggggcctttggtctcatccttctctgactcttctacccagtcttttcctaaagttcggtgctactccagttgggtgcatcagggagctccgtcagcactcgcatgtgtcgctcaggtggccactcatgcctgcattccatttaatagagtcaattggaatttttagagcataatctttatggaccctcaaagctgactttgccaaagggattgagacccttactaccatcaaatctctgtctctgcttggttaaaaattggctcactattgctttgtagtaacccctgcccaggtattttttcacttgtgaaaataatttgagaaagacctttgttcctagcctgttgggaaaagtttataattttatgaaaattaagtacagaggctgcgatcttagaaataatgaaggtgccatttggctgctccttaatagtgcagacagaaaactgcagtgaacacatgccaaaacatgattgaagcctttggctgaaactttatacatagaaataatgatttgctcataacaggtatcattaactgccactttttatgttttccctagaatttgtagccttgctgcttgcttttcttctgggtggcaaagttactactggaaaaacactataagtacaaagtttttggggttttatctttgctttagaagtgggtgtgtacttcacctcttggctgtggaggaccttagttgccaggaaatttttttttttttttttcagacggagtttcgctcttgttgcccaggctgggagggcaatggcaccatcttggctcactgcaacctccgcctcccgggttccagcgattctcctgcctcagccttccgagtagctgggattacaggctcctgccaccacgcctggctaggaaattttttgttgttaatatgacatttggattaatctccagcttcaacagtacttcttttgtccataaatctcaggaatgttttaggcagaaaactggttttaccctgttgataatcagaaggagtgtgctttagggatttattgcataatactattctttaattgcaatcctagggtatgtataggcatgagtgggccttagtgagtttgttgaagtgcacatgtttttcaagagtaaaatttaagattaaaaatatatcctatatatagatatctagaaaacttggtttgtggtgcacagttaagtgttggatcactaaataaccattgcaggtaccgtttgtgtaacattactcatttctgtatattccttttatgggaagatattttgccatggtaactaaaacttttcagttctacttttatgatgtgaatgaatgctacgttttattaaatattaccaggtcagtactatttctatactctattaagccaacaggggattttaggtttaataggctcaaaataaaaagttccttaatggaacagttaaaaacaaaacacctaacaatcctttaccgtgaaaatccccccactaatagtggcccacaataatttcctatagaaatatcctaaggtcattcaaatagatttttgaagacggttccttcattgtgtcaggatgacctttcatatcattctcaccaacttgtagtgcccaccgttatttgtaactattaaaccatactaagtatgtttgtaaccagcattgtgatatattctgtacttgtattgctaaaaatgaattattgacctaataaatatagtgttcctgcaaaaaaaaaaaaaaaaaaaaaaaaaaagtcgagc

SEQ ID NO: 5873 - DNA, 681 bp, Homo sapiens; identical to SEQ ID NO: 286
  SIMILAR (290)..(622): 991254mologous to Homo sapiens ribosomal protein L3,accession number M90054,Smith-Waterman Score=566.

SEQ ID NO: 5874 - DNA, 1338 bp, Homo sapiens
  SIMILAR (1)..(1146): 701254mologous to Homo sapiens ribosomal protein L3,accession number X73460,Smith-Waterman Score=1152.
atgtctcacagaaagttctccgctcccagacatgggtccctcggcttcctgcctcggaagcgcagcagcaggcatcgtgggaaggtgaagagcttccctaaggatgacccatccaagccggtccacctcacagccttcctgggatacaaggctggcatgactcacatcgtgcgggaagtcgacaggccgggatccaaggtgaacaagaaggaggtggtggaggctgtgaccattgtagagacaccacccatggtggttgtgggcattgtgggctacgtggaaacccctcgaggcctccggaccttcaagactgtctttgctgagcacatcagtgatgaatgcaagaggcgtttctataagaattggcataaatctaagaagaaggcctttaccaagtactgcaagaaatggcaggatgaggatggcaagaagcagctggagaaggacttcagcagcatgaagaagtactgccaagtcatccgtgtcattgcccacacccagatgcgcctgcttcctctgcgccagaataaggcccatcctaatgtagattcaggtgaacggaggccactgtggcccgagaagctgggactggcccccgcgagagggcttgaagcagcaaggtactgttgacccaagtgttttgggcaggaataaaatgatcgacgtcatcgggggtgacccaagggccaaaaggttacaaagggggtcacccagtcgtttggcacacccaagaaagctgcccccgcaaagaccccacccgagggcctgccgcaagggtggccatgtattgggggcatgggcatcctgcttcgtgtagccttctctgtggcacgcgctgggccagaaaggcttaccatcaccgcactgagatcacaaagaaagattttataagattgggccaggactttcccctcttttcaggacggcaaaagtgatcaaaggaacaattgcttccactgactatgacctattctgacaagaagcatcaacccctcctggtggctttgtccactaatggtgaaagtgacaaatgactttgtcatgctgaaaggctgtgtggtgggaaccaagaagcgggtgctcaccctccgcaagtccttgctggtgcagacgaagcggcgggctctggagaagattgaccttaaagttcattgacaccacctccaagtttggccatggccgcttccagaccatggaggagaagaaagcattcatgggaccactgaagaaagaccgaattgcaaaggaagaaggagcttaatgccaggaacagattttgcagttggtggggtctcaataaaagttattttccactgaaaaaaacaaaaaaaaaaaaaa

SEQ ID NO: 5875 - DNA, 420 bp, Homo sapiens
  SIMILAR (13)..(168): 1001254mologous to Homo sapiens Ig J-chain,accession number M12759,Smith-Waterman Score=287.
  misc_feature (1)...(420): n = a,t,c or g
cccacgcgtccggctacccagagcaatatctgtgatgaagacagtgctacagagacctgctacacttatgacagaaacaagtgctacacagctgtggtcccactcgtatatggtggtgagaccaaaatggtggaaacagccttaaccccagatgcctgctatcctgactaatttaagtcattgctgactgcatagctctttttcttgagaggctctccattttgattcagaaagttagcatatttattaccaatgaatttgaaaccagggcnnnnnnnnnnnnnggggggaggaaaacccacctccttgcccnnnnnnnnnnnnnnnnnnnnccatggttttttttatagggaaaccccttttaaataatgggcccaacctcaaggaaaaaaaatttcccatttatagggctcccgggag

SEQ ID NO: 5876 - DNA, 528 bp, Homo sapiens
  SIMILAR (355)..(2): 951254mologous to Homo sapiens disrupter of silencing SAS10,accession number AF271212,Smith-Waterman Score=602.
attcactttgcacggagctcccaccatcatcatcggcattctcctcctcctcctcctcccccgcattccctccattttggtcgtcctcatcgtccatatctagggctagcacctcctcctcctcctcctcgccatcctcctggtctccactctgtacttcattccagccattagataaggcggcccgggatcgtgcctcatgaaagtcatctacctgatcttggtagtagctggtgtcccctggtgagggtggcaatcctaaatcatctccattttcgtcggtgagcgtgggacctgccttggctcgcacagctgcccacttagctgctccgcgccgccgggatctccccaccatggctcacaatctcaggttttacagcgactccggactttcggccaccactgacttcggcgcaggaatcaggcgctccggtaactcgtggctctaaacagcagcgcgctcccctaccaccggagtttgcagactcctgatcggctactggaatttcctcttccttccggacgaaa

SEQ ID NO: 5877 - DNA, 829 bp, Homo sapiens
  SIMILAR (220)..(522): 501254mologous to Homo sapiens IgM antibody J-chain protein sequence,accession number AAY39468,Smith-Waterman Score=205.
  misc_feature (1)...(829): n = a,t,c or g
tgctccagtttttcagaagaagtgaagtcaagatgaagaaccatttgcttttctggggagtcctggcggtttttattaaggctgttcatgtgaaagcccaagaagatgaaaggattgttcttgttgacaacaaatgtaagtgtgcccggattacttccaggatcatccgttcttccgaagatcctaatgaggacattgtggagagaaacatccgaatttattgttcctctgaacaacagggagaatatctctgatcccacctcaccatttgagaaccagatttgtgtacccatttgtctgacctctgtaaaaaaatgtgatcctacagaagtggagctgggataatcagatagttactgctaccccagagcaatatctgtggatggatgacagtgccacagagcacctgctacactttatngacaggaaacaagtgctacacagctgtggtcccacttcgtatatggtggtgagaccaaaatggtggaaacagccttaaccccagatgcctgctatcctgactaatttaagtcattgctgactgcatagctcttttttcttgagaggctctccattttgattcagaaagttagcatatttattaccaatgaattttgaaaccagggctttttttttttttttgggtgatgtaaaaccaactccctgccaccaaaataattaaaatagtcacattgttatctttattaggtaatcacttcttaattatatgttcatactctaagtatcaaaatcttccaattatcatgctcacctgaaagagggtatgctcttcttaggaatacagtttctagcattaaacaaataaaca

SEQ ID NO: 5878 - DNA, 2044 bp, Homo sapiens
  SIMILAR (699)..(1529): 421254mologous to Mus musculus putative,accession number AK010316,Smith-Waterman Score=357.
  misc_feature (1)...(2044): n = a,t,c or g
atgaagacagtgctacagagacctgctacacttatgacagaaacaagtgctacacagctgtggtcccactcgtatatggtgcactttggccccggcgatggaggcgccggcttcggagtgtgccggccgccgcagcagcagggctcttggaggaccccgcggtccccgggctcacggctgcccttcctgctgttgagctacccgagcggcggcggcggcagcagcggcagcggcaagcaccgggacaccagctactaccaagatcaggtagatgactttcatgaggcacgatcccgggccgccttagctaagggctggaatgaagtacagagtggagacgaggaggatggcgaggaggaggaggaggaggtgctagccctagatatggacgatgaggacgacgaagatggagggaatgcgggggaggaggaggaggaggagaatgccgatgatgatgganaaaaactttactatgacacggactatggttccaagtcccgaggccggcagagtcaacaggaggcagaggaggaggaaagagaggaggaggaggaggcacagatcattcagcggcgcctagcccaagcgctgcaagaggatgattttggtgtcgcctgggttgaggcctttgcaaaaccagtgcctcaggtagatgaggctgagacaccgggtcgtgaaggatttggctaaagttttccagtgaaagagaagctgaaaatgttgccgaaagggaatcacccagaactcattggagctgattagaagacctttaaagtcaagttagacagacgttaaggatgtacctggagcccattttaagagtttggtggaacaagggatcattccacccggaaaaaggaagccaaatacattgaggaccaagtacaaacctcatacattgaattattgctcagaacatcaagtttttatttttgatcctgaaagctaggagagtcccaagcacattggacatcctgtcatagaaaggcttgttacctacccgaaatttgatcaacaagctgtccgttgtggatcagaagctgtcctcagaaaattcgtcatctgttgacacttaaggatgatgctgtaaagaaagaactgattccaaaagcaaaatccaccaagcccaaaccaaagtctgtttcaaagacttctgctgctgcctgtgctgttacagatctttctgatgattgtgcctcctgatgaaaaaagcaaaactgaagtactataaagaaatagaatacaggcaaaagctaaagagaaagaaagaagaaaatagcactgaagaacaggctcttgaagatcaaaatgcaaagagagctattacctatcaaattgctaaaaataggggaccttactcctaggaagaaagaagattgatcgcaatcccagagtgaaacacagagagaagttcagaagagccaaaattagaaagaagaggccaggttcgtgaagtatcgtaaagaagagcaacgttataagtggtgacttatctggcattcggtgcaggagttaaaaagagcattaagccttaaatgaagtttttgcttagccataaggtttttggcagttttggatcaataaatttttacttttaactaaagtcattgtattaatatataatactttaaattttaaaaattcttgtccacaaggaaatttgtctgggttattggacaatttataagaactatggggagcaatatgaaggtgcttgagaaaagagatgatgttgaagttttccaatattctgttgaagttttccaatattaagtatttaggcctaggggaaattttcacagttcattgtggagtgttaaacttagaacatgtgtaacttttcacataaagagaatgcatctttggacagttatcttatttgtaaggcagcctataaaatagttctgaagtattttatttacctaactataattattgggccagatacttgttaataaatgggcttaatgttaacatggatttcatatgttctgtgtggtttaaaagcataggaatgaaactttggttaaaagcagaaaaagga

SEQ ID NO: 5879 - DNA, 1348 bp, Homo sapiens
  SIMILAR (8)..(139): 751254mologous to Homo sapiens Human secreted protein, SEQ ID NO: 4478,accession number AAG00397,Smith-Waterman Score=161.
ttttttttttgtatttttagtagagacggagttttaccttgttggccaggctagtctcgaactcgtgacctcaggtgatccggctgcctcagcatcccaaagtgctgggattacaggcgttagccacgcatgcagcccctttcaagccttttaacatcatgtcaccttcacaatgagcagttgctcccattacccagtgaactcaccttctgatgggacagttaccctagttggggcttctcagccttgagagatgtgcagagcaggggacctgtccaggggcagagcaggccagacagcgtgggaaataatccaaacaggaggaaaggcatttcaagaacttgggcctctgggtttgactttaacacactactttcaagtattatgggcaggtctgtattaattaaactcctgcctgtctagtctttcagcctcattaggaaagcaagaaagcaggtgggctttttttgcagaacaattcttgggtagaacaaggggacatttgatggtttgggtttttcagtaagaaagatgaagtcctggagtatagggtagagtggtacagtggaaaatatttcagcttgggggttagaaaaataaacatgccgattcttgctttgccataaatgatgtcacttaacttgtgtgaccctgttttctcatcccctaaaatgatttgataagtttaagattaggctatttttaaatgtatgggaaggaaattgggtgttacccttcttggaaagacattttccctggcaagtatgggcaggctgtatctttcagtgtaacaaagttctattaaaggtcataactgctgccctgtaacttttgccttattctagaaacttctactccttgaatgacatgtgttggtacatgtttcttctctttcagatagaatggttaattttgacttgttgcttctgcgcacgtgtcctggaaataaaagtttcttccctctacttatcgctgatttctttcataggaagtcttaaggaaagaggcaaaaaacgggcctcatgggtcccttgaagttggaaaattctgtggagattgccaaaggagactcacttatgagcatctgttctcagtgtaaccttcaaatctgtggaaacataactaggcccattttatgattatttagaatgttaataaattgctctgagtttcctcaagtccattttgtaagatcagcccataggtgggtgttgtttcttttaagtgcgtgtactgtgtccaatgttacatttttagaagtgttcacgctttttgtaaaaaaaaatagttttaagcacattaaaggtcgtttgagtattgtcatgtcttttaaaaaaaaaaaaaaaaa

SEQ ID NO: 5880 - DNA, 324 bp, Homo sapiens
  misc_feature (1)...(324): n = a,t,c or g
cggacgcgtgggactagttctagatcgcgagcggccacccnnnnnnnnnnnnncccttttaaaaaaggggggttttttaatggaaacctcccaaccacctttggaaaacttgggaacaaaaaatttccattaaaccttttcccgggggggccccctttgccccatgggggccttaaaaaaggcccgggggcccctcaggttccccccctttttttaaaaaaaccccaaacttcacccccttagggcctaagggagggcccccccccgctcaaaaaattttaccttttttaaaaaccctcttgggaaacccagggaaaaggtttg

SEQ ID NO: 5881 - DNA, 939 bp, Homo sapiens; identical to SEQ ID NO: 1576
  SIMILAR (145)..(249): 771254mologous to Homo sapiens Human secreted protein, SEQ ID NO: 5327,accession number AAG01246,Smith-Waterman Score=134.

SEQ ID NO: 5882 - DNA, 1026 bp, Homo sapiens; identical to SEQ ID NO: 1577
  SIMILAR (145)..(249): 771254mologous to Homo sapiens Human secreted protein, SEQ ID NO: 5327,accession number AAG01246,Smith-Waterman Score=134.

SEQ ID NO: 5883 - DNA, 480 bp, Homo sapiens
  misc_feature (1)...(480): n = a,t,c or g
caaagaaacaaaaccctttatggttctaggtacatggcgttagtgagaagggaaccaatatttattgagctcttaccatgtttcagacactgttccaagtactttcacatacactaccccatttagtgacctgtgtaatccttgagatgggtatacattattctaattttacaggttagaaaatagactggataggccaggcgcagtggctcacgcctgtaatcccaatcctctcttaaaaaagtgatagctcagaaacatttgtaaaagcaaggtttttatttcattttggctctgtcattttcagaggcaaagaagttggcctgtaaaatagagtgctaggagctcttacgcccctccccttcttcccaacttcctacttcctaggcccttttattcaactcctaggaatagttaaagagagacacatctaggtgggggtggaaaggtgcccntaggcgggggaaactgaaccaaggg

SEQ ID NO: 5884 - DNA, 1275 bp, Homo sapiens; identical to SEQ ID NO: 3098
  SIMILAR (751)..(1269): 941254mologous to unidentified bacterium transposase,accession number Z78058,Smith-Waterman Score=825.

SEQ ID NO: 5885 - DNA, 6294 bp, Homo sapiens; identical to SEQ ID NO: 5750
  SIMILAR (1288)..(2796): 901254mologous to Homo sapiens putative p150,accession number U93572,Smith-Waterman Score=2384.

SEQ ID NO: 5886 - DNA, 1725 bp, Homo sapiens
  SIMILAR (109)..(786): 901254mologous to Homo sapiens SThM,accession number U14550,Smith-Waterman Score=1060.
atgacgcgatctcggctcactgcaacctccacctcccgggttcaagtgattctcctgcctcagactcccaagcccacaagtacagaggtgctgtgttccttccccgtggctgctggaacaaatgatcacagcctggggggcttcgatccacagaaattgaatcgtcacagttctggagcccagaagcccagaatcaagggccaggcctgccgacacctgcttcacctggccattcagcggcacccccacttccgtggcctgttcaatctctccattccagtgctgctgtggggggacctcttcaccccagcgctctgggaccgcctgagccaacacaaagccccgtatggctggcgggggctctctcaccaagtcatcgcctccaccctgagccttctgaacggctcagagagtgccaagctgtttgccccgcccagggacacccctccaaagtgtatccggtgtgccgtggtgggcaacggaggcattctgaatgggtcccgccagggtcccaacatcgatgcccatgactatgtattcagactcaatggagctgtgatcaaaggcttcgagcgcgatgtgggcaccaagacttccttctatggtttcactgtgaacacgatgaagaactccctcgtctcctactggaatctgggcttcacctccgtgccacaaggacaggacctgcagtatatcttcatcccctcagacatccgcgactatgtgatgctgagatcggccattctgggcgtgcctgtccctgagggcctagataaaggggacagatcagcaatttgtgctgggatcagcttccttctgctctggcttggggttacccatgcagctgccgacattctgcagccctcacatctgagactcgactcctggccaaagggctacttccgcaaattatcagctctctctgatcgcaaaggggacacacgaaggggcagaacaacctggaagaacaggttctttgtgaacttcccctcggccaagcagtacttcagccagttcaagcacatggaggatcccctggagatggagcggagcccccagctgcggaagcacgcctgccgagtcatgggggccctcaacactgtcgtggagaacctgcatgaccccgacaaggtgtcctctgtgctcgcccttgtggggaaagcccacgccctcaagcacaaggtggaaccggtgtacttcaagatcctctctggggtcattctggaggtggtcgccgaggaatttgccagtgacttcccacctgagacgcagagagcctgggccaagctgcgtggcctcatctacagccacgtgaccgctgcctacaaggaagtgggctgggtgcagcagagccagggagagctcagagcacccaaagccacagctgcccaggcagagaggcgccagaggctcctggcgcccaccggccacactgccctcttcggggccgtaggacccctaactccacccccctccctggcagcacctcgagcagaaggccgagttctgaagaccctccttgacgctccatttctgggtgccaaggaagctggaggaatccctgactcaacttccccgaaggaggcctctgtggcggccagggtccccccctggagctgctgggaggcggcgctggctgcctggatgctgaccccagcgcggcgggcagagcggggcccactcttcttagcttttctactcactgttagagagagacctagctga

SEQ ID NO: 5887 - DNA, 3383 bp, Homo sapiens
  SIMILAR (74)..(1384): 1001254mologous to Homo sapiens dJ486I3.4 (TSPY-like (testis specific protein, Y-linked like)),accession number AL050331,Smith- Waterman Score=2268.
  misc_feature (1)...(3383): n = a,t,c or g
gcggcggttagctcccagttcggcctctgaggaaaacgggcgttcgcctgcggttggtccgactgttagcaacatgagcggcctggatggggtcaagaggaccactcccctccaaacccacagcatcattatttctgaccaagtcccgagcgaccaggacgcacaccagtacctgaggctccgcgaccaaagcgaggcgacacaggtgatggcggagccgggtgagggaggctcggagaccgtcgcgctcccgcctccaccgccttcagaggaggggggcgtaccccaggatgccgcgggccgtggcggtactccccagatccgagttgttgggggtcgcggtcatgtggcgatcaaagccgggcaggaagagggccagcctcccgccgaaggcctggcagccgcttctgtggtgatggcagccgaccgcagcctgaaaaagggcgttcagggtggagagaaggccctagaaatctgtggcgcccagagatccgcgtctgagctgacggcgggggcggaggctgaggcggaggaggtgaagacaggaaagtgcgccaccgtctcagcagccgtggctgagagggagagcgctgaggtggtgaaggaaggcctggcggagaaggaggtaatggaggagcagatggaggtagaggagcagccgccagaaggtgaagaaatagaagtggcggaggaggatagattggaggaggaggcgagggaggaagaagggccctggcctttgcatgaggctctccgcatggaccctctggaggccatccagctggaactggacactgtgaatgctcaggccgacagggccttccaacagctggagcacaagtttgggcggatgcgtcgacactacctggagcggaggaactacatcattcagaatatcccgggcttctggatgactgcttttcgaaaccacccccagttgtccgccatgattaggggccaagatgcagagatgttaaggtacataaccaatttagaggtgaaggaactcagacaccctagaaccggttgcaagttcaagttcttctttagaagaaacccctacttcagaaacaagctgattgtcaaggaatatgaggtaagatcctccggccgagtggtgtctctttctactccaattatatggcgcagggggcatgaaccccagtccttcattcgcagaaaccaagacctcatctgcagcttcttcacttggttttcagaccacagccttccagagtccgacaaaattgctgagattattaaagaggatctgtggccaaatccactgcaatactacctgttgcgtgaaggagtccgtagagcccgacgtcgcccgctaagggagcctgtagagatccccaggccctttgggttccagtctggttaacatttgcccttgggaatactcctgcacaaggtctcctaccaccttctgctggacctgtgcttgggcatcagcaatgagtatgccttctattgtgctttgtttttgctgacttttctgcaccctgtttcctttggatattcagttctctcaacctcaagattgagacggtggtgggtatgcttctccacttccatatgaccttcatgctgttctggaatatcacatgctacgaggtcatccttcacactacttgtaagccaagcaaatgatactgtagattgtactgcctttatctgcactgcttggaccctgtttattcccagggcctctgaactggttgctgtcacttggatttctagctttgggagcctgttccacctactcagctctgcattgagcagtatgggcacatgccctgtggacagttactggacgttaatgaactcagaggagaaaagcagtgagccacttgttctgtgtgatttatggtacttcattgctcttccttcacctctagtcactttctattgctacctgccctacattggctcctgccaaggtccctctctctccctgttttccttttttttttttttttttttttttttgagacggaggacggagtcttgctctgtcgcccaggttggagtgcagtggcgcgatctcggctcactgcaacctccacctcccgggttcaagcgattctcctgcctcagcctcccgagtagctgggactacaggcgcgcgccgccacgcccggctaatttttatatttttagtagagacggggtttcaccatgctggccaggctggtctcgaaccccgatctcgtgatccgccctccttagcctcccaatcctctcttaaaaaaagtgatagctcagaaacatttgtaaaagcaaggtttttatttcattttgggctctgtcaattttcagagggcaaagaagttgggcctgtaaaataggagtgctaggagctcttacggcccctcccttcttcccaacttcctacttcctagcccttttatgcaactcctaggaatagttaaagagagacacatctaggatgggatgaaaggtgtccctaagcaggagaaaactgaacaaaaggctagagggcatgggccaggttaaaaattggggcctagagtgaagactgtgctgtcgttaagagctttcgaggaaggagtacttactccccaatgatgatgaatggaaaaatacttttcagggagaattgaacggggttaaagtgttaaatatgttgcctagacaagggttctttaaagaaagaccagccgcaactttgaatgctttctttacttgttttgtgacctaattttatgtggaagattggttattcaattaggatttaagtaaaattttttttttctgatttctaaacttattgtgaaaattgagctgtacagatattccttttggatttccaattggggaacatttggaagaccaacagtctttacttgccctgtacaatatagagacatatgaatagtcgataacagttttcaacttgttcttgtttcctgttaaactatattccctagggaacatagtttgaacaacttgggtctttgttagggcttgtccaaattgaccttcatgggaaaaataatctacaaaagtatggtttaattgattgtccttacatggatnaattttccctgggtaacaacttaggtaagggatatatcttttttcctaaattgcttaaatactgtggaaattgactctgacaaattgggaagtgtacccttgggcatatttgtcttccctttttatgcatgatggtaaaataaaagcatgttgttctgctagatttcttatttttcaccttacccataaatgtaatgcttgaatgaagttgttcatattaattaaaaattatggaatcattaaagtcctttaatccattaaagttcttaatggattaaaatcattaaagttcttaatggattaaaatcaaaaaaaaa

SEQ ID NO: 5888 - DNA, 487 bp, Homo sapiens
actgtggcgtggggctccatgaccgcccttggcttccgagaaaccgctgctctcctgcgtccgccctccgctcagcttgtgtggtgaactcccctcgtgcgcgaggtgccctgtggccagagtctgcatgtgcctctacttacccaaatcccaggggcctctcgctgggagctgcccccacccagtcagccccgggaccctctggtctgtgctgcagcctctgcgttgggcagcctctctcctgtttgctctggcaccatccaggccacagtctccgtgctccccactctccagcccggctcccctcttgctgcactcagagtcctggggctggggcaggttcagatctgcaaggcgggactccaggccctgccccctgctccacggctgctccttccggcccccatgcctggcgctgggcctgtatccacattccctgaagctgtgcattttctctctcccccgctgtcccatacggcgccagcta

SEQ ID NO: 5889 - DNA, 493 bp, Homo sapiens
agttttgctaccttgctcaggctggtctcaaattcctggcctcaaatgatcctcctgcctaggtctcccaaggtgctgggattacaggcgtgagccactacagtatgcaggaacctaaaatatcttcccagccctgggcgacaggagcgagactcctgtctcaaaacaaacaaacaaacaaaagacccaatctgagtcttatcgttgtactgatagaagggtcagatatccccacatggagttgagtgggagaaagagattcactagagaataactccttagagaccaatgtctgtagcaggtgtacaagcatccttgtgaaaagttatgggagcatgaaaaagacttgaagggccaaggacagtttgccatgggctgagtttattaccagcttagaccaggaattagaacaaaagaattctatacctcaggatttcgaaaaagtttagcaacttgagaggccagtgctgagcaacccagtacccaggaaatg

SEQ ID NO: 5890 - DNA, 318 bp, Homo sapiens
  SIMILAR (2)..(178): 641254mologous to Homo sapiens X-linked retinopathy protein {C-terminal, clone XEH.8c},accession number S58722,Smith-Waterman Score=170.
tttctttgagatggaatcttgctgtgatgcccaggctagagtgcaatggcatgagctcagctcactgaaacctctgctttgttcccccggttcaagagatttttctgcctcagcctctcaagtagctgggactacaggtatgcaccgccatgcccagttaatctttgtatttcgtgtgtgtgtgtgttttggaatcattgttttagaaaaacagattaaatattagattaaaaaataggttaaaacccccaaaacttaaatctaatcttagtgatgtttacatttatggccatctgcctcagtttcatgacgtcgacg

SEQ ID NO: 5891 - DNA, 385 bp, Homo sapiens
  SIMILAR (20)..(385): 771254mologous to Homo sapiens alpha globin,accession number V00488,Smith-Waterman Score=466.
ggcacgaggagaacccaccatggagctgtctcatgccgacacgaccaacgtcaaggccgcctggggttgggtcggtgcgcacgctggcgagtaaggcgcggatgtcctggttaggatggttctgtgcttgcctaccatctggacctacttcccgtacttcgacctgagccacggctgtgcccaggttaacggccacggcaagaaggtggccgacgcgctgaccaacgccgtggtgcacgtggacgacatgcccaactcgctgatcggcctgagcgagctgcatgcgcactaacttctggtggacccggtcaacttcaagctcctaaaccactgcctgcttgggaccctggccgaccacctgcttgacgagttcacacctgcggtg

SEQ ID NO: 5892 - DNA, 410 bp, Homo sapiens
  misc_feature (1)...(410): n = a,t,c or g
aagaaatgggcaaaggtatagacagcctatttaatgaaataatagctgaaaacttcccaggtcttgctagagacatagacatttggaagctggaaactcaaggagtcccaaatagattcaatctaaagaggtcttcccagagacaaatgatagtcaaactgtcaaaagtcaaaaacagagaattctaaaaacagcaaaagannnnnnnnnnnnnnnnnnnnnnnnnnnnnnnnnnnnnnnnnnnnnnnnnnnnnnnnnnnnnnnnnnnnnnnnnnnnnnnnnnnnnnnnnnnnnnnnnnnnnnnnnnnnnnnnnnnnnnnnnnnnnnnnnnnnnnnnnnnnnnnnnnnnnnnnnnnnnnnnnnnnnnnnnnnnnnnnnnnnnnnnnnnnnnnnnnnnnnnnnnnnnnnnn

SEQ ID NO: 5893 - DNA, 286 bp, Homo sapiens
  misc_feature (1)...(286): n = a,t,c or g
gggagaagaggggaggacacagaagggagagagaaacggaggggggggcagcgagaggaaggagggggaggagcacgaggcgaggcggacgggccggggagaggggggaggaggagaagccaaagggcggccccgaagtgcacggaggcgaggacgggggagcaggggcagcaagagccagactccgtcccgccacctccccgcgcacatnnnnnnnnnnnnnnnnnnnnnnnnnnnnnaatctctacacgtcacccataagtgtgtgttcccgcccacgcgtccg

SEQ ID NO: 5894 - DNA, 705 bp, Homo sapiens
  SIMILAR (244)..(618): 771254mologous to Mus musculus Hhl,accession number AF118565,Smith-Waterman Score=462.
tttcgtctcagttccctccgttctcctcgggctccagttttggcggagcgaacgggaccggcccggcttcagagcgcgaggtggagggtggaacgcgggcgcctgaaggagttgttgtctcggcagcgcccgcggagacgtgaagaggtggttgtgggaagagaagtttgcagaactgaaatggaggtcagagcttcattacagaagatagtttctaatggtgatgaacaattggaaaaagccatggaagagattttgagagatttcgagaaaaggccaagcagtcttcttgttgattgtcaaagttccagtgagatttcagaccattcgtttggagatattccagccagccaaacaaataagccatctcttcagttaattttggatccgtctaacacagaaatttctacacccagaccatcttctccaggtggactacctgaagaagatagtgttttatttaataaactgacctacttaggatgtatgaaggtttcttccccacgtaatgaagtagaggctttacgggcaatggcaaccatgaaatcttccagtcaatacccctttcctgttaccctgtatgtaccaaatgttccagaaggttctgtgagacacatattaagtcttttgggtggtggtgaagatgttatagcatcatcaggtgtagaacttactgtgaactcacactgtagacatgcagagtaa

SEQ ID NO: 5895 - DNA, 497 bp, Homo sapiens
  SIMILAR (336)..(494): 791254mologous to Mus musculus Hhl,accession number AF118565,Smith-Waterman Score=206.
tttcgttcgggctccagcggtggcggagcgaacgtgactcggcccggcttcaaagcgcgaggcggagggtggaacgcgggcgcctgaaggagttgttgtctcggcagcgcccgcggagacgtgaagaggtggttgtgggaagagaagtttgcagaactgaaatggaggtcagagcttcattacagaaggttagtggatcatctgattctgtggctacaatgaacagtgaagaatttgttttggttcctcagtatgcagatgataattctacaaaacatgaagaaaaacctcaactgaagatagtttctaatggtgatgaacaattggaaaaagccatggaagagattttgagagattccgagaaaaggccaagcagtcttcttgttgattgtcaaagttccagcgagatttcagaccattcgtttggagatattccagccagccaaacaaataagccatctcttcagttaattatggatccgtctaacacagaaacg

SEQ ID NO: 5896 - DNA, 416 bp, Homo sapiens
  SIMILAR (15)..(146): 771254mologous to Homo sapiens Human myelin oligodendrocyte glycoprotein gene,accession number AAZ29204,Smith-Waterman Score= 191.
cgtcgactttttttttttgtagttttaatagacatggggtttcaccatgttggccaggctggtctcaaactcctgtcctcaagtgatccgcccaccttggcctcccaaagtgctgagattacaagcatgagccaccgtgcccggcctcaatgttctccaagcacattacattgtatagaaaaattaataaatacgttgggtgacaagttaacttattacctttaagggcttattaccgtttatcacttttcctcccacttttattaaggttataattaaaaaataaaaattgtatatatttacaatatacatggtttgatgtacatagacctcgtgaaattaaatctagctaattaacatacccacctcgcacttatttgtggtgagaacatttgagagctaatctcttgtcgagc

SEQ ID NO: 5897 - DNA, 792 bp, Homo sapiens; identical to SEQ ID NO: 181

SEQ ID NO: 5898 - DNA, 7503 bp, Homo sapiens
  SIMILAR (1)..(7500): 1001254mologous to Homo sapiens MBP-2 (MHC Binding Protein- 2),accession number X65644,Smith-Waterman Score=13163.
atgctcttcctgaatcttgccactgcccatcaagagatagaatacatttcccctccccttgaacatggaagcaaccaagctttaagaagcacagctttggagacactccatgagtctgcactgctttcaggggaactagcacttaagaccttgtgtaacaaaatggacactggggacacagctctaggacaaaaagctacctcaaggtctggagaaactgataaagcatcaggtagatggagacaggaacaatcagctgttattaagatgagcacttttggcagtcatgaaggacagcggcaaccacaaatagagcctgagcaaatcggaaacacagcatcagcacaactgtttggttctgggaaactggcctcccctagtgaagtggtgcagcaagtcgcagagaagcaatatccaccgcatcgtccgagtccttactcatgccaacactcactctctttccctcagcactcattgccacagggggtcatgcacagcaccaagccacatcagagcctcgaaggtcctccgtggcttttccctggccctttgccatccgttgcctctgaggacttatttccttttcctatacatggccacagtggtggttatcctagaaaaaagatttcaagtctgaaccctgcttatagccaatactcccagaaaagtattgaacaggcagaagaggctcacaagaaagagcacaaacccaaaaagcctggcaagtacatttgcccttactgcagcagagcgtgtgccaaacctagtgtactgaaaaaacacatcaggtcccatactggggagcggccatatccatgtataccttgtggtttctctttcaagacaaagagcaatttgtacaagcacaggaagtcacatgcccatgcaattaaggcaggattagtacctttcacagagtcagctgtatctaaattggacctagaggctggttttattgatgtagaagcagaaatacattcagatggtgaacagagtacagacacagatgaggagagttctttatttgccgaggcttctgacaaaatgagtcctggtccacccatcccactggacattgccagcagaggcggctatcatgggtcattggaagaatcattgggaggtccaatgaaggtgccgattttgattatccctaaaagtgggattcctctccctaatgaaagctctcagtatattggccctgatatgctaccaaatccatctttaaatactaaggctgatgattcgcacacagtcaaacagaaacttgcactaagactgtcagagaaaaaaggacaagattctgagccatcgctcaaccttctgagcccgcacagtaaaggaagcactgattctggttacttttctcgctcagaaagtgctgagcagcaaataagccctcccaacacaaatgcaaagtcttatgaagaaatcatctttggaaaatactgtcggcttagtccgagaaatgcactcagtgttacaaccacaagtcaggagcgtgccgcaatgggtaggaagggcataatggaaccattacctcacgttaacaccaggttagatgtcaagatgtttgaagatcctgtttcacagctgatcccaagcaagggagatgtcgaccccagtcaaacgagcatgctgaaatccactaagttcaacagtgagtccagacaaccccagattattccatcatctatcaggaacgaaggaaaactttatccagcaaacttccaaggcagcaacccggttctcttagaagctcctgtagactcttcaccccttattagaagcaactcagtgccaacttcttcagcaactaatctaactattcctccttctttgagaggaagtcactcatttgatgaaaggatgactggttccgacgatgtattctatccagggaccgtgggcataccccctcagcgcatgctaagaagacaagcggcatttgagctgccttcggtacaggagggccacgtggaagtcgagcaccatggcaggatgttgaagggtatcagcagttcatccctgaaggaaaagaaattgtctcctggggacagggttgggtatgactatgatgtctgtcggaaaccctataagaagtgggaggactctgaaacaccaaagcaaaactacagggacatttcctgcttgagttctttaaagcatggtggagaatatttcatggatcccgtggtgccattgcagggagtaccaagcatgtttggaactacctgtgaaaacaggaaacgccggaaagagaagagcgtaggggatgaagaggacacgcccatgatctgcagcagcattgtaagcactcctgtgggcatcatggcttccgattatgaccccaaactgcagatgcaggaaggagtcaggagtggatttgccatggctggacacgaaaacctttctcatggtcacacggaacgctttgacccatgtcggccccaactgcagcctggaagtccatctcttgtgtcagaggagtcaccttcagccattgattcagacaagatgtcagacctagggggcaggaaacctcctggaaatgtgatttctgtgattcagcacaccaactcactgagccgacccaattcatttgaaaggtctgagtcagccgaacttgtggcttgcacacaggataaagccccttccccttcagagacttgtgacagtgagatttcagaagccccagtgagtcctgagtgggctccacctggggatggtgcagaaagtggggggaaaccctctccatctcagcaggtgcagcagcagtcctatcacacacagcccaggctagttcggcaacacaacatccaggttcctgagattcgagtgaccgaggagcctgataaacctgagaaggagaaggaagcccagagcaaagagccagagaagcctgtggaagaatttcagtggccccagagaagtgagaccctttcccagctccccgcggagaagttgcctcccaaaaagaagcgtctgcgacttgcagatatggagcactcctcaggggagtccagctttgaatccacaggcacaggcctctcccgcagccccagccaagaaagcaacttgtcccacagctccagtttctccatgtcttttgaaagagaagaaaccagtaagctttctgcacttcctaagcaggatgagtttgggaagcattcagagtttctgactgtccctgctggttcatactcattgtctgtcccaggccatcaccaccagaaagagatgcgacgctgctcatcagagcagatgccttgtcctcacccagcggaagtcccagaagttcggagcaaatcatttgattatgggaatctgtcccatgctcctgtgtcgggagcagcagcctccacggtatcaccgtccagggagaggaagaaatgctttctggtgcggcaagcttccttcagtggctccccagaaatctcccagggcgaggttggcatggatcagagcgtgaagcaagagcagctggagcacctgcatgctggcctccggtccgggtggcaccatggcccgcctgctgtgctgcctcctcttcagcaagaggacccagggaagcaggtggcgggtccttgtcccccgctgagctcggggccactgcacctggcccagccacagatcatgcacatggacagtcaggaatctttgagaaatcccttgatccaaccaacatcctatatgacaagcaagcacttacctgaacagccacacttatttccacatcaagagacaattccattttctccaatccagaatgccttgtttcagtttcagtatcctacagtttgtatggttcatttaccagctcagcagcctccctggtggcaggcacatttcccacatccctttgctcagcaccctcagaagagctatggcaagccctcttttcagacagaaatccattcgagctatcccttagagcatgtggcagagcacactggaaagaaacctgctgagtatgcacacacgaaagagcagacctacccatgttattcaggagcatcagggctacacccaaagaaccttcttccaaagtttccatcagaccagagcagtaagtcaactgaaacgccctctgagcaggttcttcaagaagattttgcctcggcaaatgctgggtctttgcagtccctcccaggaacagtggttcctgttcggatccagacgcacgtaccatcctatggaagtgtcatgtacacaagcatttctcagatacttgggcagaatagccctgccattgtcatatgcaaagtcgatgagaatatgacccaaaggacactggtcaccaacgcagccatgcaagggataggattcaacattgcccaggtgctggggcagcatgcgggcttggagaagtaccccatttggaaagcacctcagactttgcccctcggcttagaatcctccatccccttgtgtttaccttccacctctgacagcgtggccaccctgggaggtagcaagcgaatgctttctccagccagtagcttggagctcttcatggaaaccaagcagcagaaaagggtcaaagaagaaaagatgtacggacagattgtggaggagcttagtgctgtggagctgaccaactcagacatcaaaaaggacctctcccgcccccagaaaccccagctggttcgacaaggatgtgcttctgagccaaaagatggcttgcagtcagggtcatcttccttctcctcgctgtcgccctcctcatctcaagactatccttctgttagcccgtcttccagggagccattcccgcccagcaaggagatgctttccggttcccgggcaccacttccggggcagaagtccagtgggccttctgaaagcaaagaatcttcagatgaattagatatcgatgagacggcatcggacatgagcatgagcccacagagttcttcattaccagcaggagatggtcagctggaagaggaagggaagggccacaagcggcctgttggcatgctggtccgcatggcctctgcccccagcgggaacgtggcagactcaactcttcttctcacggacatggcagatttccagcagattcttcagttccccagtctgcggacaacaactactgtgagttggtgcttcttgaattatacaaaacccaattatgtgcaacaggccaccttcaaatcctcggtttatgcttcatggtgcattagttcctgtaatccaaacccatcaggattgaacaccaagaccacgctggctcttctgaggtccaagcaaaaaatcactgcagaaatttatactctggctgctatgcataggcctggaaccggcaagcttacatcatcaagtgcttggaagcagtttactcagatgaaacctgatgcgtcctttttatttggcagcaaactagaaaggaaactagtgggaaatatcttaaaggaaagagggaaaggagatattcatggagataaagatattggatccaaacaaactgagccaatccgaattaaaatatttgaaggagggtacaaatcgaatgaagattatgtatatgtcagaggacgtggccggggaaagtacatttgtgaagaatgtgggattcgctgtaagaagccaagcatgctcaaaaaacacatccgtacccatactgatgttcggccttatgtatgcaagttatgtaactttgccttcaaaacgaaaggaaacctaacgaagcatatgaaatctaaagcacacatgaaaaaatgcctggaattgggagtctcaatgacatcggtggatgatacagaaactgaggaagcagaaaatttggaagatttgcacaaagcagcagagaagcatagcatgtccagcatttcaactgatcatcagttctccgatgctgaggaatcagatggtgaggatggagatgataatgatgatgatgatgaagatgaagatgactttgacgaccagggagatttaacaccaaaaacaagatcaagaagcaccagtcctcagcctcctagattctcctccttgcctgtgaatgttggcgccgtaccccacggggttccttcagatagttccctgggacattcttcgttgatcagctatttggttactttgccaagtattcgagttactcagcttatgacacccagtgattcatgtgaagatacccagatgacagaataccagaggctattccagagcaaaagtacggactcagaaccagacaaagacagattggacatacctagttgtatggatgaggagtgcatgctaccttcagagccaagctcctctcccagggacttctcaccctcaagccaccattcctctccaggatatgattcttcaccctgtcgagataattcaccaaagaggtatctgatacccaaaggagatttatctcccaggagacatttatcacctaggagagatctgtcacccatgagacatctttcaccaacaaaggaagctgcattgagaagagagatgtcccaaagagatgtttcaccaagaaggcatttgtctccaaggaggccagtgtctcctgggaaagatatcacagcaagaagagacctctcccctagaagagagagaagatacatgaccacaataagagcgccatctcccagaagggctttataccataacccaccattgtccatgggacagtatttgcaagcagagccaattgtattggggcctcctaatttaagaagaggattacctcaggttccttacttcagtctctatggagaccaagaaggtgcttatgaacatccaggctccagccttttccctgagggtcctaatgactatgtcttcagtcatcttccactccactctcagcaacaagtgcgagcccctatccccatggtgcccgttggtgggatccagatggttcactccatgccgccagccctttccagtttacatccttcacccacattgcccctgccaatggagggctttgaggagaagaaaggcgcgtcaggggagtccttctccaaggacccctatgtgctttctaagcagcatgagaagcgaggtcctcacgctttgcagtcatctggtccgcctagcactccctcctctcctcggctgttgatgaaacagagcacttcggaagacagcctaaacgcaacagagcgggaacaggaggaaaatatacagacttgtacaaaagccattgcctctctccggattgccacggaagaggcagctctgctcgggccagatcagccagcgcgggtgcaggagccccaccagaaccccctgggaagtgcacatgttagcattagacactttagtagacctgagccaggtcagccctgtacctcagccacccaccctgacttgcatgatggtgaaaaggacaattttggtacatcacagactccattagctcactccacgttttacagcaagagttgtgtggatgacaagcagttggactttcacagcagcaaggaattatcttcaagcacagaggaaagcaaagatccttcatcagaaaagagtcagctacattga

SEQ ID NO: 5899 - DNA, 8178 bp, Homo sapiens
  SIMILAR (457)..(7455): 951254mologous to Homo sapiens MBP-2 (MHC Binding Protein- 2),accession number X65644,Smith-Waterman Score=11624.
atgaagaaagagaatgtgagccaaggaataaagacagcttctggaagccagaaaaggcaagagaatgattgtcccctagagcctctggaaagaaggcagccctccagtcaccttgcttttaccccagtgagagctgtgtggggcttccgacatctagaactgatgttggttcgtcaaatcctggttgcctcagtctctttccaatgccttcaaacttaccgttcctgtgggaatttccgggtgcttttcccctctcaaagtgcaacttctgtcatcatcatcatcacagtcaaattcgatgttagggagaaaattgcccatggaaatttgcacttagcttttggatggacgtttctacaatggagagaactgtgttatagccctggtccaaggacattactagctaatgcccatcgactgtggtgtgcgtgtggaaggttccaaagagaaggagcaatcagcaagtttgcagacaccctggaacatggaagcaaccaagctttaagaagcacagctttggagacactccatgagtctgcactgctttcaggggaactagcacttaagaccttgtgtaacaaaatggacactggggacacagctctaggacaaaaagctacctcaaggtctggagaaactgataaagcatcaggtagatggagacaggaacaatcagctgttattaagatgagcacttttggcagtcatgaaggacagcggcaaccacaaatagagcctgagcaaatcggaaacacagcatcagcacaactgtttggttctgggaaactggcctcccctagtgaagtggtgcagcaagtcgcagagaagcaatatccaccgcatcgtccgagtccttactcatgccaacactcactctctttccctcagcactcattgccacagggggtcatgcacagcaccaagccacatcagagcctcgaaggtcctccgtggcttttccctggccctttgccatccgttgcctctgaggacttatttccttttcctatacatggccacagtggtggttatcctagaaaaaagatttcaagtctgaaccctgcttatagccaatactcccagaaaagtattgaacaggcagaagaggctcacaagaaagagcacaaacccaaaaagcctggcaagtacatttgcccttactgcagcagagcgtgtgccaaacctagtgtactgaaaaaacacatcaggtcccatactggggagcggccatatccatgtataccttgtggtttctctttcaagacaaagagcaatttgtacaagcacaggaagtcacatgcccatgcaattaaggcaggattagtacctttcacagagtcagctgtatctaaattggacctagaggctggttttattgatgtagaagcagaaatacattcagatggtgaacagagtacagacacagatgaggagagttctttatttgccgaggcttctgacaaaatgagtcctggtccacccatcccactggacattgccagcagaggcggctatcatgggtcattggaagaatcattgggaggtccaatgaaggtgccgattttgattatccctaaaagtgggattcctctccctaatgaaagctctcagtatattggccctgatatgctaccaaatccatctttaaatactaaggctgatgattcgcacacagtcaaacagaaacttgcactaagactgtcagagaaaaaaggacaagattctgagccatcgctcaaccttctgagcccgcacagtaaaggaagcactgattctggttacttttctcgctcagaaagtgctgagcagcaaataagccctcccaacacaaatgcaaagtcttatgaagaaatcatctttggaaaatactgtcggcttagtccgagaaatgcactcagtgttacaaccacaagtcaggagcgtgccgcaatgggtaggaagggcataatggaaccattacctcacgttaacaccaggttagatgtcaagatgtttgaagatcctgtttcacagctgatcccaagcaagggagatgtcgaccccagtcaaacgagcatgctgaaatccactaagttcaacagtgagtccagacaaccccagattattccatcatctatcaggaacgaaggaaaactttatccagcaaacttccaaggcagcaacccggttctcttagaagctcctgtagactcttcaccccttattagaagcaactcagtgccaacttcttcagcaactaatctaactattcctccttctttgagaggaagtcactcatttgatgaaaggatgactggttccgacgatgtattctatccagggaccgtgggcataccccctcagcgcatgctaagaagacaagcggcatttgagctgccttcggtacaggagggccacgtggaagtcgagcaccatggcaggatgttgaagggtatcagcagttcatccctgaaggaaaagaaattgtctcctggggacagggttgggtatgactatgatgtctgtcggaaaccctataagaagtgggaggactctgaaacaccaaagcaaaactacagggacatttcctgcttgagttctttaaagcatggtggagaatatttcatggatcccgtggtgccattgcagggagtaccaagcatgtttggaactacctgtgaaaacaggaaacgccggaaagagaagagcgtaggggatgaagaggacacgcccatgatctgcagcagcattgtaagcactcctgtgggcatcatggcttccgattatgaccccaaactgcagatgcaggaaggagtcaggagtggatttgccatggctggacacgaaaacctttctcatggtcacacggaacgctttgacccatgtcggccccaactgcagcctggaagtccatctcttgtgtcagaggagtcaccttcagccattgattcagacaagatgtcagacctagggggcaggaaacctcctggaaatgtgatttctgtgattcagcacaccaactcactgagccgacccaattcatttgaaaggtctgagtcagccgaacttgtggcttgcacacaggataaagccccttccccttcagagacttgtgacagtgagatttcagaagccccagtgagtcctgagtgggctccacctggggatggtgcagaaagtggggggaaaccctctccatctcagcaggtgcagcagcagtcctatcacacacagcccaggctagttcggcaacacaacatccaggttcctgagattcgagtgaccgaggagcctgataaacctgagaaggagaaggaagcccagagcaaagagccagagaagcctgtggaagaatttcagtggccccagagaagtgagaccctttcccagctccccgcggagaagttgccacccaaaaagaagcgtctgcgacttgcagatatggagcactcctcaggggagtccagctttgaatccacaggcacaggcctctcccgcagccccagccaagaaagcaacttgtcccacagctccagtttctccatgtcttttgaaagagaagaaaccagtaagctttctgcacttcctaagcaggatgagtttgggaagcattcagagtttctgactgtccctgctggttcatactcattgtctgtcccaggccatcaccaccagaaagagatgcgacgctgctcatcagagcagatgccttgtcctcacccagcggaagtcccagaagttcggagcaaatcatttgattatgggaatctgtcccatgctcctgtgtcgggagcagcagcctccacggtatcaccgtccagggagaggaagaaatgctttctggtgcggcaagcttccttcagtggctccccagaaatctcccagggcgaggttggcatggatcagagcgtgaagcaagagcagctggagcacctgcatgctggcctccggtccgggtggcaccatggcccgcctgctgtgctgcctcctcttcagcaagaggacccagggaagcaggtggcgggtccttgtcccccgctgagctcggggccactgcacctggcccagccacagatcatgcacatggacagtcaggaatctttgagaaatcccttgatccaaccaacatcctatatgacaagcaagcacttacctgaacagccacacttatttccacatcaagagacaattccattttctccaatccagaatgccttgtttcagtttcagtatcctacagtttgtatggttcatttaccagctcagcagcctccctggtggcaggcacatttcccacatccctttgctcagcaccctcagaagagctatggcaagccctcttttcagacagaaatccattcgagctatcccttagagcatgtggcagagcacactggaaagaaacctgctgagtatgcacacacgaaagagcagacctacccatgttattcaggagcatcagggctacacccaaagaaccttcttccaaagtttccatcagaccagagcagtaagtcaactgaaacgccctctgagcaggttcttcaagaagattttgcctcggcaaatgctgggtctttgcagtccctcccaggaacagtggttcctgttcggatccagacgcacgtaccatcctatggaagtgtcatgtacacaagcatttctcagatacttgggcagaatagccctgccattgtcatatgcaaagtcgatgagaatatgacccaaaggacactggtcaccaacgcagccatgcaagggataggattcaacattgcccaggtgctggggcagcatgcgggcttggagaagtaccccatttggaaagcacctcagactttgcccctcggcttagaatcctccatccccttgtgtttaccttccacctctgacagcgtggccaccctgggaggtagcaagcgaatgctttctccagccagtagcttggagctcttcatggaaaccaagcagcagaaaagggtcaaagaagaaaagatgtacggacagattgtggaggagcttagtgctgtggagctgaccaactcagacatcaaaaaggacctctcccgcccccagaaaccccagctggttcgacaaggatgtgcttctgagccaaaagatggcttgcagtcagggtcatcttccttctcctcgctgtcgccctcctcatctcaagactatccttctgttagcccgtcttccagggagccattcccgcccagcaaggagatgctttccggttcccgggcaccacttccggggcagaagtccagtgggccttctgaaagcaaagaatcttcagatgaattagatatcgatgagacggcatcggacatgagcatgagcccacagagttcttcattaccagcaggagatggtcagctggaagaggaagggaagggccacaagcggcctgttggcatgctggtccgcatggcctctgcccccagcgggaacgtggcagactcaactcttcttctcacggacatggcagatttccagcagattcttcagttccccagtctgcggacaacaactactgtgagttggtgcttcttgaattatacaaaacccaattatgtgcaacaggccaccttcaaatcctcggtttatgcttcatggtgcattagttcctgtaatccaaacccatcaggattgaacaccaagaccacgctggctcttctgaggtccaagcaaaaaatcactgcagaaatttatactctggctgctatgcataggcctggaaccggcaagcttacatcatcaagtgcttggaagcagtttactcagatgaaacctgatgcgtcctttttatttggcagcaaactagaaaggaaactagtgggaaatatcttaaaggaaagagggaaaggagatattcatggagataaagatattggatccaaacaaactgagccaatccgaattaaaatatttgaaggagggtacaaatcgaatgaagattatgtatatgtcagaggacgtggccggggaaagtacatttgtgaagaatgtgggattcgctgtaagaagccaagcatgctcaaaaaacacatccgtacccatactgatgttcggccttatgtatgcaagttatgtaactttgccttcaaaacgaaaggaaacctaacgaagcatatgaaatctaaagcacacatgaaaaaatgcctggaattgggagtctcaatgacatcggtggatgatacagaaactgaggaagcagaaaatttggaagatttgcacaaagcagcagagaagcatagcatgtccagcatttcaactgatcatcagttctccgatgctgaggaatcagatggtgaggatggagatgataatgatgatgatgatgaagatgaagatgactttgacgaccagggagatttaacaccaaaaacaagatcaagaagcaccagtcctcagcctcctagattctcctccttgcctgtgaatgttggcgccgtaccccacggggttccttcagatagttccctgggacattcttcgttgatcagctatttggttactttgccaagtattcgagttactcagcttatgacacccagtgattcatgtgaagatacccagatgacagaataccagaggctattccagagcaaaagtacggactcagaaccagacaaagacagattggacatacctagttgtatggatgaggagtgcatgctaccttcagagccaagctcctctcccagggacttctcaccctcaagccaccattcctctccaggatatgattcttcaccctgtcgagataattcaccaaagaggtatctgatacccaaaggagatttatctcccaggagacatttatcacctaggagagatctgtcacccatgagacatctttcaccaagaaaggaagctgcattgagaagagagatgtcccaaagagatgtttcaccaagaaggcatttgtctccaaggaggccagtgtctcctgggaaagatatcacagcaagaagagacctctctcctagaagagagagaagatacatgaccacaataagagcgccatctcccagaagggctttataccataacccaccattgtccatgggacagtatttgcaagcagagccaattgtattggggcctcctatcgttactgtaggcattacaggtcttcctcccaaactggtgtttgatgaaggagacgtgccttttccaaacctgattaaatacaagggggattttgtctatgtgcagaatttaaatgattctcataccgtaaaattcccacctttcccagcttatgaggtcgtggtaacgatagtgttaatgattgcaccgtttcactcacactttcaggagaatccatgtttccagcttgcatatgatatatcacagagaaggaatttaagaagaggattacctcaggttccttacttcagtctctatggagaccaagaaggtgcttatgaacatccaggctccagccttttccctgagggtcctaatgactatgtcttcagtcatcttccactccactctcagcaacaagtgcgagcccctatccccatggtgcccgttggtgggatccagatggttcactccatgccgccagccctttccagtttacatccttcacccacattgcccctgccaatggagggctttgaggagaagaaaggcgcgtcaggggagtccttctccaaggacccctatgtgctttctaagcagcatgagaagcgaggtcctcacgctttgcagtcatctggtccgcctagcactccctcctctcctcggctgttgatgaaacagagcacttcggaagacagcctaaacgcaacagagcgggaacaggaggaaaatatacagacttgtacaaaagccattgcctctctccggattgccacggaagaggcagctctgctcgggccagatcagccagcgcgggtgcaggagccccaccagaaccccctgggaagtgcacatgttagcattagacactttagtagacctgagccaggtcagccctgtacctcagccacccaccctgacttgcatgatggtgaaaaggacaattttggtacatcacagactccattagctcactccacgttttacagcaagagttgtgtggatgacaagcagttggactttcacagcagcaaggaattatcttcaagcacagaggaaagcaaagatccttcatcagaaaagagtcagctacattga

SEQ ID NO: 5900 - DNA, 1035 bp, Homo sapiens
  SIMILAR (61)..(234): 981254mologous to Homo sapiens Similar to RIKEN cDNA 1110020N13 gene,accession number BC006282,Smith-Waterman Score=303.
tccagtgtggtggaattcgggctactacgatggcgatgagtttcgagtggccgtggcagttatcgcttcccacccttctttacgttacaaccgaatgtggacactcggcagaagcagctggccgcctggtgctcgctggtcctgtccttctgccgcctgcacaaacagtccagcatgacggtgatggaagctcaggagagcccgctcttcaacaacgtcaagctacagcgagaacgttcctgtggagtcgatccagattgtattagaggaactgaggaagaaagggaacctcgagtggttggataagagcaagtccagcttcctgatcatgtggcggaggcccgaagaatgggggaaactcatctatcagtgggtttccaggagtggccagaacaactccgtctttaccctgtatgaactgactaatggggaagacacagaggatgaggagttccacgggctggatgaagccacttttactgcgggctctgcaggcccttacagcagggagcacaaggccgagattcatcattgttcaggcgatggccgaggcgttcaagttcttctaggcagggacctgtctccctttacttcttgacctcccaccttttccaggggttttcaaaaagggagacagaccccagtgttcccccaaagactggttctgtgaactccaccagactcaaaaggactccagtcctgaaggctgggacctggggatgggtttctcacaccccatcctagactgtccttgagccagggtctgtaaacctgacactttatatgtgttcacacatgtaagtacatacacacatgcgcctgcagcacatgcttctgtctcctcctcctcccacccctttagctgctgttgcctcccttctcaggctggtgctggatccttcctaggggatgggggaagccctggctgcaggcagccttccaggcaatatgaagataggaggcccacgggcctggcagtgagaggtgtggccccacaacgatttatgatattaaaatctcaactcccaaaaaaaa

SEQ ID NO: 5901 - DNA, 769 bp, Homo sapiens
  SIMILAR (2)..(151): 1001254mologous to Homo sapiens Similar to RIKEN cDNA 1110020N13 gene,accession number BC006282,Smith-Waterman Score=252.
  misc_feature (1)...(769): n = a,t,c or g
gagtggccagaacaactccgtctttaccctgtatgaactgactaatggggaagacacagaggatgaggagttccacgggctggatgaagccactctactgcgggctctgcaggccctacagcaggagcacaaggccgagatcatcactgtcaagcgatggccgaggcgttcaagttcttctagcagggacctgtctcccctttacttcttacctcccacctttccagggctttcaaagggagaccagaccccagtgtcccccaaaagactggaatctgtgactccaccagaacttaaaaaggactccagtcctgaaggctggggaccctggggaatgggtttcctcaaacccccataatgtctgtccccttgggaatagggtgaaggctgaaagncaccccagggaagaaaaaatatgtgccttcttcctcgcccctaacctccctttcccccatccctaagactgtcccttgaagcccagggtttgtaaaacctgaccctttaatatgtgttcacacatgtaaggtacatacaacacatgcgcctgcagaacatgcttctgtctcctcctcctcccacccctttagctgctgttgcctcccttatcaggctggtggtggatccttcctaggggatgggggaagccctgggtgcaggcagccttcctggcaatataagcataggagggccacgggcctggcagttaatagatgtggccccaccccgatttatgatattaaaatttcaactcccaaaaaaaaaaaaaaaa

SEQ ID NO: 5902 - DNA, 896 bp, Homo sapiens
ccctttgttttgggcacattgtctcacctgttttcactttgttacaaaaggaaacaaaacccaaacctccggctccagagtggtccatagtgaagaacactgaagatttgccataatgtttttcctactttccccatcccatcctagaccctgaaatcctaaataaatatttcagttaaaactttttttcccatttgcatgaagtctgggtcactatatctcctaccctgaatgggggaagatgggacagctatatctcatactgaagcggtggcagctaaaacctggcaactgctgccagtgtccccaatgtgtcttgcttattattttttaaaatgtgacaaagacaaaagctacagctggaaactcacacaatttagaaatatgttgaaaacttttattatagtccttaggatttccaagtaaatgctcccaaatcaagtattacaaagctgctaattaattagcaactgaaaattagccattcaaattatattggaaatatttgctgaattgtttttatgaaagcttcctcttggattctgtaaggatcagagtatctgaatccacaaaccagctagtttcaagaaagaattcttttgactaaaaacttaccttaaaaccaattttcccaactcttttccttttcccaaatagtccaacgttttgaggagaaatatatgaggcaggttgttttacacggcactgtaccctttaggaaacctaacatttcagtgaactgggaaacttcacaacataaactctatgtatttatagatattatgactgctgtataatatatactgtggggaaaaaaaaagagaagaaagaaaagactagcctgggcaacatggcgaaaccccatctctacaaaaaatacaaaaattagctgggta

SEQ ID NO: 5903 - DNA, 968 bp, Homo sapiens
  SIMILAR (2)..(106): 821254mologous to Homo sapiens Human secreted protein encoded by gene 22 clone HMSJW18,accession number AAY02671,Smith-Waterman Score=145.
gttttgcaatgttggccaggctggtctcaaactcctgacctcaagtgatctgcctgcctcggcctctcaaattgctggaattacagttgtgatccaccacacctggcttgaatgtagattttaataattgaatttattctgccgtgttgatagaataactgaatatcagtaaattgtgtaacattggtggatactgttgcataagatgagctcctgaagagtgaagctaattctttggtcaatgttcttttcccctcagtgtctagtttaaggcttttagaagattgatctgtagcaattatttaatgaattgaatatttaaaaaattttttatttgctgtctttggtaattatctctctgcttgaaattaaatgcactataagttaatataacaagtaaaatacattgtcttttgaaaatagtttctttttaaaggaatactaattaattgtaacttgtaaaaccaaaagttctaatggtttttaaaaaccagtgttgagtggaaaagtgtttctttagtttggaaagacctggtgaagtatcctagtcagggaaagaacctgttttctggaagaatgtaagttgctatatgtggaggggcatgtaggacaggggttctaattactgtctgtgagagttactactttgtaacttatggtttctgcttcagtattgtgttggttctgtattataaattgcaccttcatagacccaaaatctctatacagcactgatctccttgaatattgtgtgttaactgctatatcctctagaggcaaaaggtttaaatgtgttcaaatggttatactgcctcctttttaaacaaattacagagttgtaaatactagtgtagatctctttcgtttaccacagcaaatactgattttatgattgttaagcatttcatcattttaatttaaattggattcaaccacaataaagaaaatgagaaaagctttaaaaaaaa

SEQ ID NO: 5904 - DNA, 1147 bp, Homo sapiens
gcactaggagcatttccactttaaaagcagagacagtggaatggagttagaccatggaggaggcgcactttatctatgtctaaagccagttgtggttgtgagatggaataatgaggggtgtgtgtatgtgtgcatgcgcacagagaagtgcctggtatgagcacctcctccctgtgccacacaaacagcacctcatcaacatggtcagcattccagagatgcacttcttcgatttgggtgtcattgtgaaattctcctgttttcctctgcagggatctacgtgcaggagatggctgacatgagcatggccaagctgtactcagggctgctgggggtgggcgatgagatcctcgaggtgaacggggccaaggtggcagggctgggcttggctcacattaaggagctcctggcccactcagagagcttgtcaatccgtgtcctgaggcagagacctgtcccacggtgacccagaagtgccgctgccctcactgtcacggcctcggaagccctgaagcactcagggtggttggcaggaacgtgctgcacagagctgctctgtggcggaaacagatcctggcagcatctaaccccttgggctgtggcagggcttctgtggtgggctgcctttgggagacgcaaggagcctgtttgcatattttgtttaaggccatttatccagaactagaaaaagaaaaaaatgggtctccttccatgtctgagggggtgtcaacatctacttgtacctttgttggcagggggagaagggagattcagtggatcctttggttgatgcctgagagccggcctcacctcctggtcccatgcctggtcaaaggctacagcctccaacactgtggaaccaaagaaagcacatgtccatattggccttgacccttccctatttcagccacgtttcctccctactccattcactgcccttgccctttatccagaaatgggcaaagtgtcccggagtaccagccttacagccattgaccatatatgccaaaccaaaatcagaacgtgtggtctggcaggagttttatgccccttcggggtgtgggaattctgggagatgttatctggtagccagaatattaaaaatttctaggaaaatttttttatacataaagttgaaaacaacaac

SEQ ID NO: 5905 - DNA, 372 bp, Homo sapiens
  misc_feature (1)...(372): n = a,t,c or g
gtcactcagctcctcgacatttccacacccagacccaaagtttgcaacaatcagtcaggtacctctctctgttttgccttttctagaattgagatagaaattaatactatagttaatgaaaacacattatgatactgatgaggaattcttcgnnnnnnnnnnnnngggaaacaaagtttggttttgtaatccaggttggagtccaagggcgcgacctgggttaattgannnnnnnnnnnnnnnnnnnnnnnnnnnnnnnnnnnnnnnnnnnnnnnnnnnnnnnnnnnnnnnnnnnnnnnnnnnnnnnnnnnnnnnnnnnnnnnnnnnnnnnnnnnnnnnnnnnnnnnnnnnnnnnnnnnnnnngggctcttt

SEQ ID NO: 5906 - DNA, 368 bp, Homo sapiens
  misc_feature (1)...(368): n = a,t,c or g
gtcactcagctcctcgacatttccacacccagacccaaagtttgcaacaatcagtcaggtacctctctctgttttgccttttctagaattgagatagaaattaatactatagttaatgaaaacacattatgatactgatgaggaattcttcgnnnnnnnnnnnnngggaaacaaagtttggttttgacatcctggctgaataacatgggcccaatttgggttaattgaaacttcaacttccaaggttaaagcatttttctggcctaaccctcttgattacctggaactaagggccccgtctcctttccccagtaaatttttggtattttaaataaagagggggttccccctttttaaacaggatggcg

SEQ ID NO: 5907 - DNA, 350 bp, Homo sapiens
  SIMILAR (2)..(187): 751254mologous to Homo sapiens ubiquinone-binding protein (QP),accession number M26730,Smith-Waterman Score=233.
  misc_feature (1)...(350): n = a,t,c or g
aagacttgctgagagcctttatgatgaccggatgtttgacattatgagggcactggacctgaccttgaagcatcacatcttgcctaaagagctgcgtaccgaatatgaggaggaatatttctaccttgaaccgtatctgaaacaggatattcgggaaggaattgaaagagaagaatgggcaaagaagtggtcatgtaagtgaagactgtggatgcagctgttatgacgatggttatgcttgtggctaaccatgttacgaactatttggtctgaagatgggtcactttatgtaaaagtctattgtaatggctattgtaatggcnnnnnnnnnnnnnnnnnnnnnnnnnnnn

SEQ ID NO: 5908 - DNA, 476 bp, Homo sapiens
  SIMILAR (383)..(445): 611254mologous to Mus musculus putative,accession number AK010670,Smith-Waterman Score=68.
gctgtgagccggccagctaaggcagccgagtctcggctccttacgagccccgagagcctgagccgtgacctggatgcaccagaggttcaggagagctacaggcagcaggtgccaccttgaagcagaatagggatggtctagtgggaggggttgggctagggtccctcttccctggatcccttcagcgatgaactggtcagcctggtgcgtaccatttgttttcccctttggcatctgggaaggcttgacagtgccaccccgggctatttgacagtgtgcttggggggggaaatggtagcttctgatggatggccatgtgtgcttgctgagatcatggtgacttggccaccgattctacaatctgcatacttatcttctatagctccggactgacttacaatctcgactgcttgtaaaccccaactacagtccctagcgtcttcccatgcccatggtgcctttgctgatgatacttg

SEQ ID NO: 5909 - DNA, 3520 bp, Homo sapiens
  SIMILAR (1)..(3120): 651254mologous to Rattus norvegicus BAT3,accession number AB018791,Smith-Waterman Score=3179.
atggagcctaatgatagtaccagtaccgctgtggaggagcctgacagcttggaggtgttggtgaagaccttggactctcaaactcgtacctttattgtgggggcccagatgaatgtaaaagagtttaaggagcacattcgtgcctctgtcagcatcccatctgaaaaacaacggctcatttaccagggacgagttctgcaagatgataagaagcttcaggaatacaatgttgggggaaaggttatccacctggtggaacgggctcctcctcagactcacctcccttctggggcatcttctgggacggggtctgcctcagccactcatggtgggggatccccccctggtactcgggggcctggggcctctgttcatgaccggaatgccaacagctatgtcatggttggaaccttcaatcttcctagtgacggctctgctgtggatgttcacatcaacatggaacaggccccgattcagagtgagccccgggtacggctggtgatggctcagcacatgatcagggatatacagaccttactatcccggatggagactctcccctaccttcagtgtcgaggagggccccaaccgcagcacagtcagccgcccccgcagccaccggctgtgaccccggagccagtagccttgagctctcaaacatcagaaccagttgaaagtgaagcacctccccgggagcccatggaggcagaagaagtggaggagcgtgccccagcccagaacccggagctcactcctggcccagccccagcgggcccaacacctgccccggaaacaaatgcacccaaccatccttcccctgcggagtatgtcgaggtgctccaggagctacagcggctggagagtcgcctccagcccttcttgcagcgctactacgaggttctgggtgctgctgccaccacggactacaataacaatcacgagggccgggaggaggatcagcggttgatcaacttggtaggggagagcctgcgactgctgggcaacacctttgttgcactgtctgacctgcgctgcaatctggcctgcacgcccccacgacacctgcatgtggtccggcctatgtctcactacaccacccccatggtgctccagcaggcagccattcccatacagatcaatgtgggaaccactgtgaccatgacaggaaatgggactcggccccccccaactcccaatgcagaggcacctccccctggtcctgggcaggcctcatccgtggctccgtcttctaccaatgtcgagtcctcagctgagggggctcccccgccaggtccagctcccccgccagccaccagccacccgagggtcatccggatttcccaccagagtgtggaacccgtggtcatgatgcacatgaacattcaagattctggcacacagcctggtggtgttccgagtgctcccactggccccctgggaccccctggtcatggccaaaccctgggacagcaggtgccaggcttcccaacagctccaacccgggtggtgattgcccggcccactcctccacaggctcggccttcccatcctggagggcccccagtctctgggacactgcagggcgccggtctgggtaccaatgcctcgttggcccagatggtgagcggccttgtggggcagcttcttatgcagccagtccttgtggctcaggggaccccaggtatggctccaccgccagcccctgccactgcttctgccagtgctggcaccaccaacacagctaccacagctggccccgctcctggggggcctgcccagcctccacccacccctcaaccctccatggctgatcttcagttctctcagcttctggggaacctgctagggcctgcagggccaggggctggagggcctggtgtggcttctcccaccatcactgtggcgatgcctggtgtccctgcctttctccaaggcatgactgacttcttgcaggcaacacagacagcccctccaccacccccacctcctccacccccaccacctgccccagagcagcagaccatgcccccaccaggctccccttctggtggcgcagggagtcctggaggcctgggtcttgagagcctgtcaccggagttttttacctcagtggtgcagggtgtgctcagctccctgctgggctccctgggggctcgggctggcagcagtgaaagtattgctgccttcatacaacgcctcagtggatccagcaacatctttgagcctggagctgatggggcccttggattctttggggccttgctttctcttctgtgccagaacttctctatggtggacgtagtgatgcttctccatgggcatttccagccactacaacggctccagccccagctgcgatccttcttccaccagcactacctgggtggtcaggagcccacacccagtaacatccggatggcaacccacacattgatcacggggctagaagagtatgtgcgggagagtttttccttggtgcaggttcagccaggtgtggacatcatccggacaaacctggaatttctccaagagcagtttaatagcattgctgcgcatgtgctgcattgcacagatagtggatttggggcccggttgctggagttgtgtaaccaaggcctgtttgaatgcctggccctaaacctgcactgcttggggggacagcagatggagcttgctgctgttatcaatggccgaattcgtcgtatgtctcgtggggtgaatccctccttggtgagctggctgaccactatgatgggactgaggcttcaggtggtactggagcacatgcctgtaggccctgatgccattctcagatacgttcgcagggttggtgatcccccccagccacttcctgaggagccaatggaagttcagggagcaaaaagagcttcccctgagcctcagcgggagaatgcttccccagcccctggaacaacagcagaagaggccatgtcccgagggtcccactcttgctcctgaggggggcttcccgggatgaaacaggatggagcttcagctgagacagaacctttgggcagctgcaagtccccccagaatgggtccctattatccagcaggacattcagaagccagcggaagttgaaaccgcagccccctctggagtgatgcctacctcaagtggtatgcctgcccaagagacgcaagacgatgccagggtgagggcccccaagctgcttctctacagaggctgtgagccgggcagctaaggcagccggagctcggcccctgacgagccccgagagcctgagccgggacctggaggcaccaggaggttcaggagagctacaggcagcagctccggtctgatatacaaaaacgactgcaggaagaccccaactacagtccccagcggttttcccaatgcccagcgggcctttgctgatgatccttagctctttctttgctctatggcccttcctcatcaggggaccgtttcccccctcttccttcacagtatttaagaaataaaagtcggatttttctggcaaaaaaaaaaaaa

SEQ ID NO: 5910 - DNA, 954 bp, Homo sapiens
  SIMILAR (1)..(441): 951254mologous to Homo sapiens BOG25,accession number AF147747,Smith-Waterman Score=709.
cggaagtccttccagaaggagcttgggatggccctactgaagaaggactgccagggcctggtggtcagactcatccaggactttgtgctcctgaccacggctgtagaggtggcccatcgctggcgggagctggctgagaagctggccaatgtctccaagcagcagatggacgcctacgagtctccccatcgggacaggaacggggttgtggacagcgaggccatgcggaagcctgcgtatgacttcttactcacctggagccatcagatcggggacagctatcgggatgtcatccaggagctgcacctgggcctggacaacatgaaaaaccccatcaccaagcgctggaagcacctcactgggactctgatcttggtgaactccctggacgttctgagagcagccgccttcagccctgcggaccaggacgacttcgagatttgaatgggtcccctcccctcctgctgctctggagtgcaagccctcttctgccctgcgtgccctgctgtcaccgcggagctgaagagggaggaaggggcggctgctcagacagatttagggcccgccagctaggctacacccatcatgcgccgccctcctccatcgagggagaggcctgaagggactgcctactgcagctcgttgccaatcacatagctttctatttgttaagtataaacttaaatttaaaatcacttttttaacgaatggggggaagggatctatgagaaaggtggtatctaatttttttatggaccatacaggtttaaaagaaaatacgggcacaggctgttgagggtttaatgtagatatagactctttttaacttatgtcttagatgtgtataggtactcaaaggtgactgggatcattcccgacatctggtaccacttttgattatatcatctagtcctgaactatcctctatccgactgttatccaccttttctcgcg

SEQ ID NO: 5911 - DNA, 2591 bp, Homo sapiens
  SIMILAR (2)..(136): 1001254mologous to Mus musculus AE-1 binding protein AEBP2,accession number AF090326,Smith-Waterman Score=235.
tgatgtgtgggtgaatgaaagtgaacgacatcagttaaaaactaaagtagttcatttatcaaagctacccaaagatactgccttgcttttggacccaaacatatacagaacaatgccgcagaagaggttgaagagaactctgataagaaaagtgttcaatttgtatttaagcaaacagtgaacgacgtttgcaatcaactaaaaattcgtctatcgaattagggctgaaaattactgttaaagagtgttgcagtatgtctggtggctcccttttcaggactagggctttctcatggagtacagtatgttaatatttacctatataactaatctgttaacggtttttgaaaaacctttcaaattatttgaataatcttcatattttcatttaacctatatgactctaattttttttctgaggaaatcatttggtttttgagttgttttttcttaatgtaagaaaaattgtattttttttacaagtatcttcaaactgaatcttttatgcaccaaagttggtcttgaaaaggaaaataaaatcactttcttgcttggtaagcaagaagccatatcgattttttttaacttacagaaatggaaatatgtgtaacttgttagtattgtattaaacaaatgttgcatagagataatagaacattgcttgtaaataattcagcagatttgtaatatatttttatattttgaaatgtacctgtagatgttttctagaggcatgaaagttaaatgtatatattatgggtaggaaataatattgaagggtattgtacttcactagtgctgccagagggaattgttaataaaagcaccttctttaacaataaatgtctttcacagacttaagggactatgtactactgttaatatctcgtaagaacaaaacacattgaacatccttccagaaagtctttgagggaggacctgtacccataatagaattatggcactcatttctgacagtgatcaagaaatcagttatttccttactgttggaaggacattgtaaagtatgtggttatatgcagtgaaactgcagaaaatactcctggttgaggagttttcactttactacagtgatataaaaaccagcagtttttacactaaattttttaaagaaatattagacaaaaatatagaattaaaaggcgttgggttccaaaatgggaaaggttccacgatacataaatcatttctcatttgctttaaaaaaatttaaaagtgtaaaaattatgagagactttattcgttaacaatgggggtaaagagctatatacatgaaaatgagtcttataaaattaagtgaagtgcaaataaaagcactgctactataagacattctggaatggttgtttaataagggtattatccatttgatctatagcaatgtgattttatttttaaaaagaaaagcagtgtgttttctttttttgttgttttcttttgcttaagcacttcatccaattgctttattctgtatctgcgaagtaatctgcaatctcttttgttctttttaaaatttgatttgttataaaattgccaaatagaagtgtcttcagatacataggttttgtacctgtatttttattttattgcctcatgttcttgtaagtcattcttaattgaccaatgattgtagaccttgcttgagtattttttctaataaaacaaagcaaatcacatttagcttcaaattgtaacaattcaattgaattttaaaatgacacctgaaaagatacatctgatattttctatataggggcacagtaaataaggtttttcattgtgtaggaaatacttaggatgtcaaaaccagatttcgtgatccttgtattaacttctgagtactcaatcaatccataatccttttgctgcttatctggatgttggtttggatactgttaacacaccaaaaaggaatatgggaattggaaatgaggctaggctttataacttgtatgtatacatattattacacataacatccaattatggactggggtaataagtgtgaaaattttaatttgtggttttcatttattaatgtctgcccatctgtattgttgctcctaccttcaaatatgacaccctgaaataataagtctgtggtcccaggaatttatgtattgttcagcatcaagcaaactacagctccacaagcatacccatttatatgttgtctatgcctgctttctccctgcagtggcagaattgagtggtgagaccttaggtcctgcaagcccccaatttttactacaggttggcaatccctaatccaaaaatcctgaccataaaaaatgcccccaaagttcaaaactttcctgagtgctgacatcatgctgcaagtggaaaattccacgcctgacctcatgtgactggtcatagtcaaaacaattaagactttgtttcatgcacaaaattattaaaactgttgtataaaattaccttcagtctatgtgtataaggtgtttgtgagatataaatgaactttatggttagcctttggatcgcatttctgagtctcattatgtatatgcagatactcaaaaatctgaaaaaaaaaaaaaaagtcgacg

SEQ ID NO: 5912 - DNA, 350 bp, Homo sapiens
  SIMILAR (1)..(108): 911254mologous to Homo sapiens RNA polymerase I subunit hRPA39,accession number AF008442,Smith-Waterman Score=157.
gaggtgcaggaagtccaaggtaaaaaggtggccagagttgccaaccccgggctggataccttcagcagagaaatcttccggaatgagaagctaaagaagtgccggcgcttcttggatgaactagatgcggttaagatggactgagcttggatgcttctgaggcaagctgaagctttgggttctgactgacccaccctacaggactgctgaacagagagcccagtgtgactagggatcctgagttttctgggacaattccagctttaatcaatacattttgttaaatgtgccataaaatgagactttttacgcctttataaggccttagatgtaaataaactcacccaaac

SEQ ID NO: 5913 - DNA, 1461 bp, Homo sapiens
  SIMILAR (1367)..(762): 651254mologous to Homo sapiens bA552M11.2.2 (novel protein (isoform 2)),accession number AL390195,Smith-Waterman Score=569.
ttttttttttaggatggattttttttattcctgccactaccaaaaactataaatctacacacacactcacacgcacatacatgtcccattttttaagaaaagcttttccctcccctgtgaactacaggaaccccagaatcccagcctcccctcaggctgaagaagacgaatgcctattaacggcacagatctagcatatcaacatactatagaaggctcctgtgttgtctcacaagcttgagagggcagggcaaagaagtggacacttcatgggggacttgctttttgtcttaaatcccaatctactcagtaacacttgcaggtccaggggctgggagaggttctgtgggcacaacgtggttggacgacctggatggtcccagcccactgtggtaagcaggggagtgattgagcggggaccaagttcgcatctctcacaaagtctctgtggggcttggcttctaaacaactcagaaaggcttgagtccagcacagcaagtgagcagtcttcactgagagaggccaggaagggaacactgtgtggggagaacaccagccccagtgacaccatgggaagtgtccagttgagctcaggacacagcttgtactcttggtgtccacaagggagactgtcccattctcatcaccaaagacaaagacttcactttgctgaggatgccaagccagcgaggtaggaaggtagccaggcgcactgcagccaatctgtgatgctggcttggggacagcgggtatcccagagttaaaattctattgtcctcgctgcatgaaagaaacacagagtccttgtgaggaagaggcagccaacacaagtgacctgagcagcatgagctcgggtatgaactcagtacccacctgctgagcaaggtcccaacaacttgatgcaagatgtctttgccttaccactgaacagcttgtgtgcccagagctcaaagacactgaactgtaagacacaatgtcatcatgcttcatacttgcaagaacttgctgacaataagtgtctcattctcatcttagttccccacaattcaacagccacctgaatcggaggcctactagaatacctctttctccccaacccaagtgaggtccagcctactccaggcctccggtttggactccggcggagccagaagcccttcgttgggggcggcacaggggtccttaaaaagccagagggagccggcccagcagcgcccactcaggctggaggccccgaggagaagcgccccatcggaccggtaccgcgcagcctccaactgccgttccatgcaggcgggcgcatttgggggaagattccactcccgggccgccgggggcactagggggggtggggtttccttccgcatctccacggttccaactccaacctagactcaaactggacgccggccggagactcagctccggcagcaaaccccacgtggtgcacctcctcgtgcc

SEQ ID NO: 5914 - DNA, 786 bp, Homo sapiens
  SIMILAR (785)..(543): 691254mologous to Homo sapiens Human secreted protein, SEQ ID NO: 6953,accession number AAG02872,Smith-Waterman Score=267.
tccgcccacgcgtccgcccacgcgtccggaaaggaatccgattggttctgtgtctgtctcttttggtattctcagaattatgtagtcattcatatagaaagatgattaggaaaataggacaagaatagcagaaatctacataaaaatgtaggaaattaaaattagttaccagcatacaaaaagcttctgtatgttataattacatactataactcacccctccttggcaaatattctctctcttttgacttcaaaatcatggcttatatgtactttctctatttcccagatgcaaatataattaattgactttatttatctaggaaatgttactcatatcttaattgtagtcattggcttgagtgacgggttttggtaattcaactactattacttgaaagtagtagatttcataagatactgttataaaatctttttaacctcttttctgatttcaagagtaattagtaattgtggtttactggaaaattcaatgaatagcgtgttaaaagaagcaattcgttaataatatatctaatctattgggagactgaggcgggtgggtcacctgagatcaggagttcgagaccagcctggccagcatggcggaactccgtctctactaaaaatacaaaaattcgccgggcatggtggtgcattcctgtattcccaggtactcggaaggctgaggcaggagaatcgcctgaactccagaggtggaggttgcagtgagtcaggatcgcagcactacactccagcctgggtgacagagtgagactccatctc

SEQ ID NO: 5915 - DNA, 1282 bp, Homo sapiens
  SIMILAR (958)..(1068): 911254mologous to Homo sapiens RNA polymerase I subunit hRPA39,accession number AF008442,Smith-Waterman Score=172.
gagtctcgtggagagattgaagatggcggcttctcaggcggtggaggaaatgcggagccgcgtggttctgggggagtttggggttcgcaatgtccatactactgactttcccggtaactattccggttatgatgatgcctgggaccaggaccgcttcgagaagaatttccgtgtggatgtagtacacatggatgaaaactcactggagtttgacatggtgggaattgacgcagccattgccaatgcttttcgacgaattctgctagctgaggtgccaactatggctgtggagaaggtcctggtgtacaataatacatccattgttcaggatgagattcttgctcaccgtctggggctcattcccattcatgctgatccccgtctttttgagtatcggaaccaaggagatgaagaaggcacggagatagatactctacagtttcgtctccaggtcagatgcactcggaacccccatgctgctaaagattcctctgaccccaacgaactgtacgtgaaccacaaagtgtataccaggcatatgacatggatccccctggggaaccaggctgatctctttccagagggcactatccgaccagtgcatgatgatatcctcatcgctcagctgcggcctggccaagaaattgacctgctcatgcactgtgtcaagggcattggcaaagatcatgcccaagttttcaccagtggcaacagccagttacaggctcctgccagacatcaccctgcttgagcccgtggaaggggaggcagctgaggagttgagcaggtgcttctcacctggtgttattgaggtgcaggaagtccaaggtaaaaaggtggcccagagttgcccaaccccccggctggatacccttcagccagagaaatcttccggaatgagaagctaaagaaggttgtgaggcttgcccgggttcggagatcattatatcttctctgttgagtcaaacgggggtgttgccaccagatgtgctggtgagtgaagccatcaaagtactgatggggaagtgccggcgcttcttggatgaactagatgcggttcagatggactgagcttggatgcttctgaggcaagctgaagctttgggttctgactgacccaccctacaggactgctgaacagagagcccagtgtgactagggatcctgagttttctgggacaattccagctttaatcaatacattttgttaaatgtgccataaaatgagactttttacgcctttataaggccttagatgtaaataaactcacccaaacaaaaa

SEQ ID NO: 5916 - DNA, 354 bp, Homo sapiens
  misc_feature (1)...(354): n = a,t,c or g
caaagattcccaatttaatttttatacgactcccaataaggaaagagattatgccttgcatgtacatgtaaactttggcccccccaaggatcctttaaaacggccgccccnnnnnnnnnnnnnncacgtttaatgtaaaaatgatctcgtgacatttacatactaagtattaggcattgcataatattaattttgatggctatgttacatcatctacaaataatatgacaattggtggcatagtatgtgtttttcaaaacccctgtacccagaaatagtgtccctcaactacatattgctgaagggataaggatcgctcttaaatgcctgcggacgcgtgggcggacgcgtggg

SEQ ID NO: 5917 - DNA, 1871 bp, Homo sapiens
ttggacacaggagtgatgacagcagttcacatggatgtaaagcaaatactgctccgcaggaatcctgaaaaataattctaatggtactatcttaggaatagcaaattatgtccagtcatagagaagaaagcttcataataatacattcttacctaaagctcactgtcatgatgttaggtatttaaattcttaaagatgttgggttgactattagtggtatttttatgttgtcttattttaggtaagcttctgtgtaaagctaaaaatcctgtgaatacaatactatcctttacaggcagacatttattggtaaacaagatcttgccctccaatgaaatgacttacatgttttaaaaaaccgagttggttttattgaatttaaaaagataggtaactaagtagcatttaaaatcaagataagagcattccttcttgtatcagtggggcagtgttaccataaacacggtgtatatgttgttaaaccctatggaagagtaacagtgtaggaccagactgcctctctcaggatatgtgcctggatattttgtgggatacctcccctggcactgggccaaaacactatgcttttggggtgttaggactggaaatatttttaaggagtatttaaacctttccagtattctgtttcacggcttagatgggaatgtatcttatgaatagagacatattaggataatgtttacatcttagaaaaaacatagatagtgctagtaatattacttataactgtaatatatagattcagaaatacattttcattatccaaaatcagcttcaacaaatggtttctggagacaaataatttggtttcattatcattgtataatcaggttaatgatttattttttgactaaatgtgcaatttcttatcactagataactttcagtatcagcggtggttacttattacttaaatcagaggaaggattttataaaggttaataaatttgaattttaccaataaatattcccataatttagaaaaggatgtcgacttgctaatttcagaaataattattcatttttaaaaagccccttttaaagcatctacttgaagattggtataattttcataaaaatgtctttttttttagggtcccaaagatatcttaggataaactattttgaagttcagatttcagatgagggcaacattttcttggggataattaccccaagttttcatccctgttgaatggtacaaaatatttctgtgaaactaacaggaagatattttcagataactaggataacttgttgctttgttacccagcctaatttgaacgagtggcagaggctacctacaaaaagcaaccttttcattttcactaagatgtttaaaagctattgtattattaaaaagtctttacaatgcttgtttcaaagaaccaacagaaaaaaaagctaagaaaactgaggaactaacattaaaaaaattaaatttagaataaggaatgatttctttaaatttgtcctttttttctttgggtctaaaacattatttaaatttttgtaaatattttggattttaatgtgtcttagatcctcattattttaatacaggaaaagaaaagatttaggtaattccctaccatgctatatatgttaagttcatgccatccaggcatttaagagcgatcctcatcccttcagcaatatgtatttgagttcacactatttctgtttttacagcagttttgaaaaacacatactatgccaccaattgtcatattatttttagatgatgtaacatagccatcaaaattaatattatgtaatgcctaatacttagtatgtaaatgtcacgagatcatttttacattaaacgtgaaaaaaaatcaaaaaaaatc

SEQ ID NO: 5918 - DNA, 605 bp, Homo sapiens
  SIMILAR (3)..(335): 991254mologous to Homo sapiens SM22 alpha,accession number D17409,Smith-Waterman Score=574.
ctgatggctccaagccggtgaaggtgcccgagaacccaccctccatggtcttcaagcagatggagcaggtggctcagttcctgaaggcggctgaggactatggggtcatcaagactgacatgttccagactgttgacctctttgaaggcaaagacatggcagcagtgcagaggaccctgatggctttgggcagcttggcagtgaccaagaatgatgggcactaccgtggagatcccaactggtttatgaagaaagcgcaggagcataagagggaattcacagagagccagctgcaggagggaaagcatgtcattggccttcagatgggcagctcctccctgtgcccccagcctcagcccaacttcttacccgaaagcatcactgccttggcccctccctcccggctgcccccatcacctctactgtctcctccctgggctaagcaggggagaagcgggctgggggtagcctggatgtgggccaagtccactgtcctccttggcgcaaaagcccattgaagaagaaccagcccagcctgccccctatcttgtcctggaatatttttggggttggaactcaaaaagaaaaaaaaaaaatcaatcttt

SEQ ID NO: 5919 - DNA, 1305 bp, Homo sapiens
  SIMILAR (349)..(792): 391254mologous to Homo sapiens SM22 alpha,accession number D17409,Smith-Waterman Score=162.
  misc_feature (1)...(1305): n = a,t,c or g
agaggcccnnatagaaacctttcgagaccctagcgcagnggcggaattatcaccacggcggcagccctttaaacccctcacccagccagcgccccatcctgtctgtccgaacccagacacaagtcttcactccttcctgcgagccctgaggaagccttctttccccagacatggccaacaagggtccttcctatggcatgagccgcgaagtgcagtccaaaatcgagaagaagtatgacgaggagctggaggagcggctggtggagtggatcatagtgcagtgtggccctgatgtgggccgcccagaccgtgggcgcttgggcttcccagtctggctgaagaatggccgtgattcttgacaggctgtgaacaacctttacccctgatgcctcaaagccggttgaaggtgcccgaaaaaccccccccttcttgttcttcaagcaagacggagccgttgcctcatttcctgaaggcggctgaaggactatggggttcgtccaaaatctaacatttttcaagatctttgaacctctttgaaaggcaaaggacatgggcagcagttccagaggacccttgatggcttttgggcagctttggcaggtgaccaagaattgatgggcactaccgtggaagatcccagactggttttatgaaagaaagccccagcagcataagagggaatttcacagaagagcccagctgcagaaagggaaagcatgtccattggcccttccagatggggcagccaacaggagggggcctccccaggcccggcattgacagggctacgggacgaccctcgggcagatcatcaagttagaagcggagagggctaagccttgaagcccggccctccccccagcatccttggctgcagccatcccgcttaagcctgcctcaacccacacccgtggtggtaccttcagccctggccaagctttgaggctctgtcactgagcaatggtaactggcacctgggccagttcctccctggtgcccccaggcctcagcccaacttcttacccgaaagcatcactgccttgggcccctccctcccggctgcccccatcacctctactgtctcctccctgggctaagccaggggagaagcgggcttgggggtagcctggattgtgggccaagtccactgtcctccttggcggcaaaagcccattgaagaaggaccagcccaggcttgccccctatcttgtacctggaatatttttggggggtggaactcaaaaaaaaaaaaaaaaaaaatcaatcttttctcaggaaaaaaaaaaaaaaaaagggcggccctct

SEQ ID NO: 5920 - DNA, 1428 bp, Homo sapiens
  SIMILAR (63)..(839): 981254mologous to Homo sapiens Novel protein kinase, SEQ ID NO: 159,accession number AAB65632,Smith-Waterman Score=1324.
  misc_feature (1)...(1428): n = a,t,c or g
cgacgcgcgctgcggacccggctcgacccacgcgtacgcggacgcgtgggcggacgcgtgggcgccagcattcgctcaagaagtcccgcatggagaatgacatggcccagtctctccacagtgacacggctgatgacactgcccatcgccctggcaagagcaacctcaagctgccaaagggcattctcaagaagaaggtgtcagcctctgcagaaggggtacaggaggaccctccggagctcagcccaatccctgcgagcccagggcaggctgcccccctgctccccaagaagggcattctcaagaagccccgacagcgcgagtctggctactactcctctcccgagcccagtgaatctggggagctcttggacgcaggtgacgtgtttgtgagtggggatcccaaggagcagaagcctccgcaagcttcagggctgctcctccatcgcaaaggcatcctcaaactcaatggcatgttcttccagacagccttagagctcgcggcccccaccaccttcggctccctggatgaactcgccccacctcgccccctggcccgggccagccgaccctcaggggctgtgagcgaggacagcatcctgtcctctgagtcctttgaccagctggacttgcctgaacggctcccagagcccccactgcggggctgtgtgtctgtggacaacctcacggggcttgaggagcccccctcagagggccctggaagctgcctgaggcgctggcggcaggatcctttgggggacagctgcttttccctgacagactgccaggaggtgacagcgacctaccgacaggcactgagggtctgctcaaagctcacctgagtggagtaggcattgccccagcccggtcaggctctcagatgcagctggttgccccccgaggggagatgccttctcccccacctcccaggacctgcatcccagctcagaaggctgagagggtttgcagtggagccctgagcagggctggatatgggaagtaggcaaatgaaatgcgccaagggctcagtgtctgtcttcagccccgctgaatgaagaggatactaaagagaggggaacgggaatgcccgcgacagagtccacattgcctgtttcttgtgtacatgggggggccacagagacctggaaagagaactctcccagggcccatctcctgcatcccatgaatactctgtacacatggtgccttctaaggacagctccttccctactcattccctgcccaagtggggccagacctctttacacacacattcccgttcctaccaaccaccagaactggatggtggcacccctaatgtgcatgaggcatcctgggaatggtctggagtaacgcttcgttatttttatttttatttntatttatttatttatttttttgagacggagtttcgctcttggtgcccct

SEQ ID NO: 5921 - DNA, 570 bp, Homo sapiens
  SIMILAR (1)..(447): 911254mologous to Mus musculus magnesium dependent protein phosphatase (protein phosphatase 2C) beta-4,accession number D45860,Smith-Waterman Score=737.
tgtgatggaatctgggatgttatgagtaatgagcagctctgtgaatatgttaaatctaggcttgaggtatctgatgacctggaaaatgtgtgcaattgggtagtggacacttgtttacacaagggaagtcgagataacatgagtattgtactagtttgcttttcaaatgctcccaaggtctcagatgaagcggtgaaaaaagattcagagttggataagcacttggaatcacgggttgaagagattatggagaagtctggcgaggaaggaatgcctgatcttgcccatgtcatgcgcatcttgtctgctgaaaatatcccaaatttgcctcctgggggaggtcttgctggcaagcgtaatgttattgaagctgtttatagtagactgaatccacatagagaaagtgatgggatggcagtcttgggcacgtccatctgtaaacctgctgagagctctggtgacaagaaaggcagtggctggcagaccttccaagcactcagaagcacgcggacaaaaaggtttttttgtaaacccgaacgaaaaataaacccagcattatataattataaa

SEQ ID NO: 5922 - DNA, 1440 bp, Homo sapiens
  SIMILAR (1)..(1437): 1001254mologous to Homo sapiens PP2C,accession number AJ005801,Smith-Waterman Score=2502.
atgggtgcatttttggataaacccaaaactgaaaaacataatgctcatggtgctgggaatggtttacgttatggcctgagcagcatgcaaggatggagagtggaaatggaagatgcacacacagctgttgtaggtattcctcacggcttggaagactggtcattttttgcagtttatgatggtcatgctggatcccgagtggcaaattactgctcaacacatttattagaacacatcactactaacgaagactttagggcagctggaaaatcaggatctgctcttgagctttcagtggaaaatgttaagaatggtatcagaactggatttttgaaaattgatgaatacatgcgtaacttttcagacctcagaaacgggatggacaggagtggttcaactgcagtgggagttatgatttcacctaagcatatctactttatcaactgtggtgattcacgtgctgttctgtataggaatggacaagtctgcttttctacccaggatcacaaaccttgcaatccaagggaaaaggagcgaatccaaaatgcaggaggcagcgtgatgatacaacgtgttaatggttcattagcagtatctcgtgctctgggggactatgattacaagtgtgttgatggcaagggcccaacagaacaacttgtttctccagagcctgaggtttatgaaattttaagagcagaagaggatgaatttatcatcttggcttgtgatgggatctgggatgttatgagtaatgaggagctctgtgaatatgttaaatctaggcttgaggtatctgatgacctggaaaatgtgtgcaattgggtagtggacacttgtttacacaagggaagtcgagataacatgagtattgtactagtttgcttttcaaatgctcccaaggtctcagatgaagcggtgaaaaaagattcagagttggataagcacttggaatcacgggttgaagagattatggagaagtctggcgaggaaggaatgcctgatcttgcccatgtcatgcgcatcttgtctgcagaaaatatcccaaatttgcctcctgggggaggtcttgctggcaagcgtaatgttattgaagctgtttatagtagactgaatccacatagagaaagtgatggggcctccgatgaagcagaggaaagtggatcacagggaaaattggtggaagctctcaggcaaatgagaattaatcataggggaaactaccgacaacttctggaggagatgctgactagttacaggctagctaaagtagagggagaagaaagccctgctgaaccagctgccacagctacttcttcgaacagtgatgctggaaacccagtgacaatgcaggaaagccatactgaatcagaaagtggtcttgctgaattagacagctctaatgaagatgcagggacaaagatgagtggtgaaaaaatatga

SEQ ID NO: 5923 - DNA, 980 bp, Homo sapiens
  SIMILAR (3)..(284): 981254mologous to Homo sapiens protein phosphatase 1B1 43 kDa isoform,accession number AJ271835,Smith-Waterman Score=489.
tttgcttttcaaatgctcccaaggtctcagatgaagcggtgaaaaaagattcagagttggataagcacttggaatcacgggttgaagagattatggagaagtctggcgaggaaggaatgcctgatcttgcccatgtcatgcgcatcttgtctgcagaaaatatcccaaatttgcctcctgggggaggtcttgctggcaaccgtaatgttattgaagctgtttatagtagactgaatccacatagagaaagtgatgggggtgctggagatctagaagacccatggtagccttaaaaaaccttcctaaaatgcttttgattctgaaaattgggggaaaaaacttttaatcacaattttcttcaatacaaggggaaaatattcttgcggattcccaacgttttgtgatatgagcagaaaatcattagcatttcccatcatttgttcatatttgtgttttctgacagttgccacttgtagcattgcctgtactacagtattttttgccaacctcaggcatactccgttacatcttgtattgaactttcggccctagaaaccagtggagttatttcaccacaaatcaacaatgtgcctgaggtgcatgggaaatatagttagctatactctgaaaatacattatgttttttttctttaaacaaaacacacaacatgtaagcatgttaagagtaaagaattgtatgatatgttccttttttcagttcaccaagttggaagccttttgcagctctgtggcttggaatttcatttgagcaatttctataggatatgtatttattattgattgttatttaaaaaaatthcacttttacctgtattaccaaactgggttctccaataatgtccaaattgtaatgttgccttgcttcaagataaagtgtatttgggaataatattatacacccttacaaatttcatgcatgtatctactgcatccttcaactctcactagaaaatcttttg

SEQ ID NO: 5924 - DNA, 451 bp, Homo sapiens
gacatattccaggctcttacactgagaccaaagagaaatctttacctcagtttcttcatcagcagaatgggtttctggcctctctcagggataattttgaaggcataatgaaaattatgatgaatcactcattggtaggaaaataatgatataagtttcaaatatgtatgattttacctatacttggtaatgctttgttttatagagcctgttaagctgctattgatagtcggagcttatatactgtgacttctgaagactatacatgaattccacaatcagtgctttgttgatacaaaatccttaaaagggaggcactttaaagaatatgtatttttcacttttcttaatatgtttcatcggtgacaggcatgataatatttctatatgtaatgggtaattgggaaaaaatagatgataaataaaattgctctaaagaagttaaaaaact

SEQ ID NO: 5925 - DNA, 637 bp, Homo sapiens; identical to SEQ ID NO: 490
  SIMILAR (47)..(412): 991254mologous to Homo sapiens gamma-G globin,accession number X55656,Smith-Waterman Score=637.
  misc_feature (1)...(637): n = a,t,c or g

SEQ ID NO: 5926 - DNA, 890 bp, Homo sapiens
  SIMILAR (540)..(638): 661254mologous to Mus musculus putative,accession number AK004609,Smith-Waterman Score=112.
aaaaccggccgcgaaccacgcgggcgatttttgctctgtttgttattttttacagtaatcacttatttttttgtggtaattggcattgccccaatttttatcctttatgaattggattcaccactctgctggaatgaagtttttataggttatggatcagctttgggtagtgcctcttttttgactagtttcctaggaatatggcttttttcttattgtatggaagatattcatatggccttcattgggatttttaccacgatgacaggaatggctatgaccgcgtttgccagtacaacactgatgatgtttttagccagggtgccgttccttttcactattgtgccattctctgttctacggtccatgttgtcaaaagtggttcgttcgactgaacaaggtaccctgtttgcttgtattgctttcttagaaacacttggaggagtcactgcagtttctacttttaatggaatttactcagccactgttgcttggtaccctggcttcactttcctgctgtctgctggtctgttaactaacttccagccatcagtctatgtgttgtcaagtgtaccagctggaatgagggaagctatgaacttcttatacaagaagaatccagtgaagatgcttcagacagagcctgttaagctgctattgatagtcggagcttatatactgtgacttctgaagactatacatgaattccccaatcagtgctttgttgatacaaaatccttaaaagggaggcactttaaagaatatgtatttttcacttttcttaatatgtttcatcggtgacaggcatgataatatttctatatgtaatgggtaattgggaaaaaatagatgataaataaaattgctctaaagaagttaaaaaaaaaaaa

SEQ ID NO: 5927 - DNA, 2411 bp, Homo sapiens
  SIMILAR (164)..(337): 981254mologous to Homo sapiens Human secreted protein encoded by gene 24 clone HJBAV55,accession number AAB12324,Smith-Waterman Score=316.
cccctcaactatattaagaactcctagtttcaccctttctccatcccatcatcccacctatctgtggttgcttcccaagacctcctcccaagatagacatctcctacccagtgcccttgtgtgaccccaggactcaagtctcagactgtgaacagatgtggccatgcccagagacgccagcctggccagaagggcatgcctcagcttactacttcatctctcctggttccctccctgcagtgccccgggtgtcatcttctcccactctgggtaccagggatgctaccacataggcttcccaaagccccattctaactcccctctctcagggaagccctagagagaggtccaaaaagcattcacagctgtatcacactctatgcaggtggcgtaggagactgatcaggcctgctgtggggaagacagtatgtatgaacacagccagcaaatgtcatagttccaaccaggatgctttcaggccatctcagctgcttgatggtgagatggttcccttattccttcaggaaaggcttagcattgtggccacattaggggaagccagctttgaacaaatcagtcatagtactgccctatagcattagccagtgaccaaattaggggacaacgtctttgtgcacagaattgcttattcaagggaacatttccacaaggaaaggaaatatttaaggggttatttccacaggaagccccaaaacgtcttgggaaacacagaggtgaggaggaggaatagtaattgtcaatgagctttttaattaccaaggttacaccccctgcccccaaagaaggagtcctctttttaggggaattcaggaaccttcattgtcctaggaagctggaaagattcttgggaacattttaggcttttactctcaacttgctgttctctttacattccttaagttagactttcgggtgtggcttctctcccaggggtaacatttacttccattttctaggaccgaaccaaaagtctttcttgcaggaatctccccaccgagtgtgggtaaggaagggaagggacaaaaggctttaggatataaatttcatgttacagagcatgtcattgtcaaaggaaatctgtggccctgagattttaagaacataaaatgtgacatttgatatttctccagcctcagggaagtaagatggataacattggtggccttaatcaaatggtcccattattaaccccaaaggaagtgcccacagcaagaggtttgtgggatgcacttatgtactacggtgaggaaagggggccacatatgaaaggccccttaagtcacatcctgacagtagcacttttgagtgcagattcctgggccccaccttaaacctactagttctgaaactctgggaataaggccatgaaatctgcccttactacagactacccaagttgttctgttgcacatcaatgtttgggaaccactgctgtaagggaatcattctggtcaccttgagctttgagctaccactaagccatgaaagaaaatacatcatacagggaagagagaagggaggaggttccaagtagtaactggcagatcctcctgtctggaggtaccaccttctattctggtttctgacttttccttcttgatgaccatagatgtgttccagaggcaaaagagacacattatcccagatggcagaacatgctttcaaaacatataaaatgtcaaagttccagatccttctacatctttagtcctgtctgaggatggtagctggctctctgtagctgatagatggctagagttccatccaaatccttgaccacgacttcatggagatttgaataatctatttgatgagatttctatttcaataacccacctctctcaccccacattcatatccctaaatttgaccctctgggccgagtcacatgggccttcaagagaggtgatcccagtagactgaggtcttccctttcagcagaaagattccatttccctggcttgccagtggcactgatttccaaacacccaatgagtttaatattctttcctccttggcattactgccccagcctctttttattttttctgtgtgtgtctaataaccaggaaaaaaataaagccttaggttttaaaaagttttaaaaataatccggtttccagaaactgtcaaatgtacccatatttgtattaagagttgttgggaaattttgtacaatgaatttacatttatttatggtgacatatttacgcttgtgatcaaataatgatgttaaattcttaaatcatatttgcctatgcagctgaagctcgctattttgatttgtattttgggggtacctgtgttgagttgataaacatttccatcttcattaaaactgcttccaacctagtaaaaccagcaaaaaaaaaaaaaaaaaaaaaaaaaaa

SEQ ID NO: 5928 - DNA, 1269 bp, Homo sapiens
  SIMILAR (193)..(405): 421254mologous to Streptococcus pyogenes Sic1.288,accession number AF232593,Smith-Waterman Score=142.
  misc_feature (1)...(1269): n = a,t,c or g
cccacgcgtccggtgtttgaccaggtcagaactcttgttctatgcgaatgtgctcacgcagacagaagcggaggggctccgtcgctctgccctcacgccgctgaaccgcgagggtctcccgctcctcaggcttgcggctcggccgcgaagtgtgtcaggtgtgcatcctgggtgctcctttgtgctctgtcctacggtgacacaggcggcgtggggttagacaggtaccggtcagactacggtgacacaggcggcgtgcggttagacaggtaccggtcagattacggtggcacaggcggcgtggggttagacaggtaccggtcagattacggtggcacaggcggcgtggggttagacaggtaccggtcagattacggtggcacaagcggccgtggggtagacaaggtaccggtcagattacggtggcacaggcggcgtggggttagacaggtactggtcagatgcacgggctccctaaacccctgctgtggcttcggcagtaaagacaggacgcacccatgtcacaagaggagcacaggcaggggtgttggtgttggggcagccctcagggtctccagaccccagccccactcacacagcagcctaggaaggaagggcagagtcccaggtgtcagctggtgggtctcccagggagctgcccctccctgggaagtcacaggacaggaatgacagatcagggaactgcaggaagctgccacctctggggtcagaatatgcccagcctgcgggggctctctatcggggtcttcgagagccagacagccctgccttgtgctgcataccctggctttgctctgtgcagaacccagcacacgtgattttgtgtgacatgccagcagcttggcctcccaggacaggaggcctgccccngggggaggggctgccaggaggagggggggcaggcaccccatgagtctgtccagccttgtcacagatgcatcgcccgacctgcggtcctgatttcagctcacctcagagtaaatcagaataaactgcacccagactttcacgaatgcatgttgacgctttcagttcacccctttctttgctaactttcttcctattttcttctaatgcgagagcttattaattccatatttatcattttgaataacttttctcctttttaggttacaaaagtactttcactcttagtaaaatgtatttactattttagtaacaaaaatatacttgcctaatcatgtttaaaatatagtgatgtgaaaaattcaaaaaaaaaaaaaaaaa

SEQ ID NO: 5929 - DNA, 407 bp, Homo sapiens
  misc_feature (1)...(407): n = a,t,c or g
ggcacgaggagctatacgcatctttacagagtcttcttagaactcattaagatgagcgtctatgacctgaaccataccgtaataatggttatctctggacatgtaagactagcctttnnnnnnnnnnnnnnnnnnnnnnnnnnnnnnnnnnnnnnnnnnnnnnnnnnnnnnnnnnnnnnnnnnnnnnnnnnnnnnnnnnnnnnnnnnnnnnnnnnnnnnnnnnnnnnnnnnnnnnnnnnnnnnnnnnnnnnnnnnnnnnnnnnnnnnnnnnnnnnnnnnnnnnnnnnnnnnnnnnnnnnnnnnnnnnnnnnnnnnnnnnnnnnnnnnnnnnnnnnnnnnnnnnnnnnnnnnnnnnnnnnnnnnnnnnnnnnnnnnnnnnnnnnnnnnnnnnnnnnnnnnnnnnnnnn

SEQ ID NO: 5930 - DNA, 369 bp, Homo sapiens
ggcacgagaaaatttatccccctaacagcctggtcaaactgggctatagttaaagcagcctcggaaccgtttcaatcggaaaatgaggcttatcctccagcagaaagaatttctgcagaggaaggtggtgatgctgctgaaggaggagaggatagtgaagaagattttgaggaaaatacagacaaacctggagatgagttaatttcttttgaggagcacgtgggaccttcagctgctcctaaaatagagaagccatatatgccaagatgtttaaaacaaagaagggccttgaggagcagtcggctcctcattgggatcatccggagtggccgcctccaataaagcaatgtagcttggagccttggaggg

SEQ ID NO: 5931 - DNA, 738 bp, Homo sapiens
  SIMILAR (9)..(125): 871254mologous to Rattus norvegicus RN protein,accession number U93197,Smith-Waterman Score=171.
ggcacgagcgattagagaaaaatgttaaagaggtattggaagattttgctgaagatggtgagaagaagattaaattgcttactggtaaacgcgttcaactggcggaagacctcactcggactcaacactacacaccaggccaccacatggcgccgcacccagcattgacacttcttttaccttgtctgggctctgacatccgtgccaggttgctcttcgtcatggagtcccttttactgagctctgctctgacgctttgtgccagggtgcctctccatcttcatccttcccacccgcttagcctctgcccgaccccagacagattcctttcctcacctggaagccagaccatggcctttgtgggagataccctctttaccctgcctgtgcttcgccagcctgcaccaggccaccctcctgcacagatactctcctcagtactggaccaggctaccaacagccccatgtgaacccattgtaacccaggtcaggcattaacacctgcagtaggctaccatggctttctccttccaacccccctagcttggccctactaataatcactttgtcactgttcggggttcatatttggttgtttcctgtaggctcctagctttaagataggattgcaaactaaaataaacttagatctttgagaactcaaggaaatcagtcaaacattattgctattaaataaaaatgaaataccgtagtggtatcaatttcaattatgcgcca

SEQ ID NO: 5932 - DNA, 5868 bp, Homo sapiens
  SIMILAR (2430)..(2939): 801254mologous to Oncorhynchus masou GTP-binding protein,accession number AB012720,Smith-Waterman Score=717.
cacgggggctcccgcgtggccgtctcggcgcctgcgtgacctccccgccggcgggatgtggcgactacgtcgggccgctgtggcctgtgaggtctgccagtctttagtgaaacacagctctggaataaaaggaagtttaccactacaaaaactacatctggtttcacgaagcatttatcattcacatcatcctaccttaaagcttcaacgaccccaattaaggacatcctttcagcagttctcttctctgacaaaccttcctttacgtaaactgaaattctctccaattaaatatggctaccagcctcgcaggaatttttggccagcaagattagctacgagactcttaaaacttcgctatctcatactaggatcggctgttgggggtggctacacagccaaaaagacttttgatcagtggaaagatatgataccggaccttagtgaatataaatggattgtgcctgacattgtgtgggaaattgatgagtatatcgattttgagaaaattagaaaagcccttcctaattcagaagaccttgtaaagttagcaccagactttgacaagattgttgaaagccttagcttattgaaggacttttttacctcaggttctccggaagaaacggcgtttagagcaacagatcgtggatctgaaagtgacaagcattttagaaaggtgtcagacaaagagaaaattgaccaacttcaggaagaacttctgcacactcagttgaagtatcagagaatcttggaacgattagaaaaggagaacaaagaattgagaaaattagtattgcagaaagatgacaaaggcattcatcatagaaagcttaagaaatctttgattgacatgtattctgaagttcttgatgttctctctgattatgatgccagttataatacgcaagatcatctgccacgggttgttgtggttggagatcagagtgctggaaagactagtgtgttggaaatgattgcccaagctcgaatattcccaagaggatctggggagatgatgacacgttctccagttaaggtgactctgagtgaaggtcctcaccatgtggccctatttaaagatagttctcgggagtttgatcttaccaaagaagaagatcttgcagcattaagacatgaaatagaacttcgaatgaggaaaaatgtgaaagaaggctgtaccgttagccctgagaccatatccttaaatgtaaaaggccctggactacagaggatggtgcttgttgacttaccaggtgtgattaatactgtgacatcaggcatggctcctgacacaaaggaaactattttcagtatcagcaaagcttacatgcagaatcctaatgccatcatactgtgtattcaagatggatctgtggatgctgaacgcagtattgttacagacttggtcagtcaaatggaccctcatggaaggagaaccatattcgttttgaccaaagtagacctggcagagaaaaatgtagccagtccaagcaggattcagcagataattgaaggaaagctcttcccaatgaaagctttaggttattttgctgttgtaacaggaaaagggaacagctctgaaagcattgaagctataagagaatatgaagaagagttttttcagaattcaaagctcctaaagacaagcatgctaaaggcacaccaagtgactacaagaaatttaagccttgcagtatcagactgcttttggaaaatggtacgagagtctgttgaacaacaggctgatagtttcaaagcaacacgttttaaccttgaaactgaatggaagaataactatcctcgcctgcgggaacttgaccggaatgaactatttgaaaaagctaaaaatgaaatccttgatgaagttatcagtctgagccaggttacaccaaaacattgggaggaaatccttcaacaatctttgtgggaaagagtatcaactcatgtgattgaaaacatctaccttccagctgcgcagaccatgaattcaggaacttttaacaccacagtggatatcaagcttaaacagtggactgataaacaacttcctaataaagcagtagaggttgcttgggagaccctacaagaagaattttcccgctttatgacagaaccgaaagggaaagagcatgatgacatatttgataaacttaaagaggccgttaaggaagaaagtattaaacgacacaagtggaatgactttgcggaggacagcttgagggttattcaacacaatgctttggaagaccgatccatatctgataaacagcaatgggatgcagctatttattttatggaagaggctctgcaggctcgtctcaaggatactgaaaatgcaattgaaaacatggtgggtccagactggaaaaagaggtggttatactggaagaatcggacccaagaacagtgtgttcacaatgaaaccaagaatggaattggagaagatgttgaaatgtaatgaggagcacccagcttatcttgcaagtgatgaaataaccacagtccggaagaaccttgaatcccgaggagtagaagtagatccaagcttgattaaggatacttggcatcaagtttatagaagacattttttaaaaacagctctaaaccattgtaacctttgtcgaagaggtttttattactaccaaaggcattttgtagattctgagttggaatgcaatgatgtggtcttgttttggcgtatacagcgcatgcttgctatcaccgcaaatactttaaggcaacaacttacaaatactgaagttaggcgattagagaaaaatgttaaagaggtattggaagattttgctgaagatggtgagaagaagattaaatttgcttactggtaaacgcgtttcaactggccggaagacctcaagaaagttagagaaattcaagaaaaacttgatgctttcattgaagctcttcatcaggagaaataaattaaaatcgtactcataatcagctctgcatacatctgaagaacaaaaacatcaacgtcttttgtccagcctctttttcttctgctgttccacctttctaaacatacaataaagtcatgggataaaaataatcgatgtatgttacgggcgctttaaccatcagctgcctctcgaatggaagaacagtggtaatggattaacatcctattttgttgtactaaagtgacaaatcggaataatataattggtatggccattaggttcagtccttgaagataagaagcttgttctctgtttgttgtcttatttgtggtggcactcgtttaatggattaactgaggttgctcaatgttcagtttcttttccagaaatacaatgctaggtgttttgaaataaaacttatatagcaattgtttaaagttatcaattgtatataaaatcacagtagcctgctaaatcattgtatgtgtctgtagtattctattcccagaaactatttgaccatgataattcagtttatattcaccacatgaaagaaaaatgggtaacagaagaacccctaaaacaggttaatttggattgtaacgttcagtgaaagaaatttcaacccttcatagccagcgaagaaatttgccttggaagccaagtcagtaccagcttacctatttgattcagttgctgttttctcactctctatatccatttgaaattgatttattttagatgttgtatacttacgttaggctttctgttaatagtggtttttctcctgttgacagagccaccggattatgacacaggatgaggaagattaaggataatcaattgactaatttcatttagaatattatcaaacatttcaactaggtatcagaaaaaggctttctttcataagactattttaaatagaaattatttcaacaattaaagtaatgttgaccatccccctctcagctgaataaagaaaaatttagttcaatttattgcaatttaattacaatactaccttcacaacattttcatgtgttttaaataaatattttttaattggctaaaggacattcaagcaaagaaatgctttctttacttaaaatgtctatctcatttgctgccttttcactaagcctttactttgttaataaaagtgtccattgtgtgatgtttttgattttacagtttgctaaatcttattttcttggagttgctttttggtaacagccccattgctactccccattttattgttttacatcaatgcatgcttcgttgtgatccctcaagatgtaacacttggtatgctcggttgaggatatgaaaaaatacttccgaaaccaggaattcagtgtatgtttgttttatactgtttgataagaaaagtaggtccagccttaagcagcacagatgcgctggtagatgcatagtcaggaactttttttatttcttttaggtctagggacaggagtgaatagaaagggaggagagctctattatgttctatacacagattaggagatgaccttactgggtacacccctctaaccagtgcttacaggttaatgcatgttaatgaatatttttgcagttgtaaagcataacaattacaactacacatctatttctaaagaataaaacaggaccatatttatttacttctgtcaactatagaaagaaagaccttcagctgtatttccacagatttctcccaaggaaaaggctaatattagtcactactgttatcacatccctttgtataagttttaaaaagagatggagggagatcttcatttctttgaggagatcagtattgtaacgtatgtgaatagatgataacaattaatattactaaaagtcccacatgagagtcctgacgccctctccatgccccacagtaatgtggcttctttcatgggtttttttttcttctttttagctgatctcatcctaagcatgctttatttttccttgaaagctaggtatttatcaactgcagatgttattgaaagaaaataaaattcagtctcaagagtaaaccctgtgtcttgtgtctgtagttcaaaagtcagaaatgattctaatttaaacaaaaagatattaaatatacagaagttaaattcgaactagccacagaatcatttgtttttatgtcagaatttgcaaagagtggagtggacaaagctctgtatggaagactgaacaactgtaaatagatgatatccaaacttaatttggctaggacttcaattttaaaaatcagtgtacctaggcagtgcacagcacgaaataagtggcccttgcagcttccccgtttaacccactgtgctatagttgcgggtggaacagtcaacctttctagtagtttatgatattgccctctttgtattcccattttccacagttttttccgcagacttctttctgcaaattattcagcctccaaatgcaaatgaatgatataaaaataagtagggaacatggcagagagtggtgcttcccagcctcacaatgtgggaatttgacataggatgagagtcagagtataggtttaaaagataaaatctttagttaataattttgtatttatttattctagatgtatgtatctgaggaaagaaatctggtatttttgctttccaataaaggggatcaaagtaatggtttttctctcagttctctaagctggtctatgttatagctctagcagtatggaaatgtgctttaaaatatgcttaccttttgaatgatcatggctatatgttgttgagatatttgaaacttaccttgttttcacttgtgcactgtgaatgaactttgtattatttttttaaaaccttcacattacgtgtagatattattgcaacttatattttgcctgtgcttgatcaaaggtcatttgtgtagatgagtaattaaaaaatatttaaatcac

SEQ ID NO: 5933 - DNA, 568 bp, Homo sapiens
  SIMILAR (188)..(322): 971254mologous to Homo sapiens Human secreted protein, SEQ ID NO: 5789,accession number AAG01708,Smith-Waterman Score=236.
ccgaccgccaggcgctgttacagtggatgcgaactaaccggtaatagatgagatactcaagttcagagaggtgtggaagtcatttgacagagcagtcgggcccgagtggtttccttatgccaaggcagcacgtcatcctttttcctcaaaaataacagcaacaacattcctgcaccttgcctctgcagcattatatcgtactgcagaaaccagctcaactatgcaaaactaccaccaggactggccgacaccaggagggattccagagaccacactgcagggagcatacagaaagaaaattaagagatcagatgcagcagcagccggaacccacagttcaccttggtgcattcctttatgatgaagacttattgattcattatatgagaaaggaaaaatgagcagaaactactgtatgatgtgcagctcacaccagacagcaactttagggttatctttccagttcagcagtgcaactctatggagtagaattgaaaggagacttttcgccaattgcaggaaatggtcataaaaaaatacctgctcactgacagaataaaggtacctt

SEQ ID NO: 5934 - DNA, 440 bp, Homo sapiens
  misc_feature (1)...(440): n = a,t,c or g
aagtcagggttcccatctatagtgacaaatccataggggcttgcttgggaagtaccatcctttcgtggaaggtgccgggtgtataaaggagtacctttgggcagcctggtcccaaagctgaaagcccaggtctggtgcctctggggcaggttggctgcccaggggagaaaccaaatcattaatgtgtccacctagtgggggctgcgagattgtcgaagcctggctgagagctgatcgatatgcattctgggatgttcccctggactccccaccccttgcctgactctgttcttggggctccccagggaaaggggaactgcaacttcaggcagtgtaatttgtctaaaaagaaacacggggaaaagangtagctgcaaaacatcgagccatcntcaactttccccccacttcccacaacacctttgggacacaccagattg

SEQ ID NO: 5935 - DNA, 1012 bp, Homo sapiens
  SIMILAR (140)..(1009): 981254mologous to Mus musculus putative,accession number AK004629,Smith-Waterman Score=1536.
ggcgagtggcgagtggcgagtgtcaggggggcggccggcgggggcggggcggccggaggaggcgttggcagcgggctcggacccacgcggcgccgcggcccgcctggcctgcagcgctcccacccccggcggcggcacgatgccctttgacttcaggaggtttgacatctacaggaaggtgcccaaggaccttacgcagccaacgtacaccggggccattatctccatctgctgctgcctcttcatcctcttcctcttcctctcggagctcaccggatttataacgacagaagttgtgaacgagctctatgtcgatgacccagacaaggacagcggtggcaagatcgacgtcagtctgaacatcagtttacccaatctgcactgcgagttggttgggcttgacattcaggatgagatgggcaggcacgaagtgggccacatcgacaactccatgaagatcccgctgaacaatggggcaggctgccgcttcgaggggcagttcagcatcaacaaggtccccggcaacttccacgtgtccacacacagtgccacagcccagccacagaacccagacatgacgcatgtcatccacaagctctcctttggggacacgctacaggtccagaacatccacggagctttcaatgctctcgggggagcagacagactcacctccaaccccctggcctcccacgactacatcctgaagattgtgcccacggtttatgaggacaagagtggcaagcagcggtactcctaccagtacacggtggccaacaaggaatacgtcgcctacagccacacgggccgcatcatccctgcaatctggttccgctacgacctcagccccatcacggtcaagtacacagagagacggcagccgctgtacagattcatcaccacgatctgtgccatcattggcgggaccttcaccgtcgccggcatcctggactcatgcatcttcacagcctctgaggcctggaagaagatccagctgggcaagatgcattga

SEQ ID NO: 5936 - DNA, 769 bp, Homo sapiens
  SIMILAR (729)..(310): 541254mologous to Homo sapiens gamma-globin,accession number M15386,Smith-Waterman Score=267.
  misc_feature (1)...(769): n = a,t,c or g
gggctctttnnnnnnnnnntccccccgcttttgaaaaccccggcccaaggcccaatataaatttaccccccctaaaaggggaaaaaggtgcggcccgctaaataaaaaatccgggggnnnnnnnannatnnnnntttggtgatctcttagcagaaatagatttattatttgtaattgcttgcaagaataaagccatatccttgaaaagctctgcattcatgggcaattgagcttcagtggtatcctggaggaccagggcaatggcccactcccagtcacccatctttctgccccaggaagcctgcaaccttcaggggtgaattcttttgccgaaaatgggattgccaaaaacgggtcaccagcaacatttcccccaggagcttgaaagttcctccaggatcccacatgcaggcttgtcacaggtgcaggttcacttcaggcttgggcaaaggtgccccttgagatcatcccaggtgcttttatggcatctcccaaggaaagtcagcaccttcttgccatgtgccttgactttgggggttgcccatggatggcagaggcagaggacaggttgccaaagctgtcaaagaacctctgggtccatgggtagacaaccaggagccttcccagggtttctcctccagcatctttccacattcaccttgccccacaggctttgtgatagtagccttgtcctcctctgtgaaatgacccatgggcgtctggactaggagcttattgataacctcagacgttccaaaaagcgagtgtc

SEQ ID NO: 5937 - DNA, 513 bp, Homo sapiens
tttttctgaaaatcagccttttaatctagttgaacccaacgagtggggaaagaactaaaacatttttttcccttcagattttgattataagaataacgggtcagaggtgtctcttccataggaaactgacatcccctatgtcctcagagttgtttttttttttttttcttcaaaaaaatgcataaaagaatttcaactcatgtgcatgccacacatttccatctatagtgacaaatcataggggcttgcttgggaagtaccatctttcgtggaaggtgccgggtgtataaaggagtacctttgggcagcctggtcccaaagctgaaagcccaggtctggtgcctctggggcaggttggctgcccaggggagaaaccaaatcattaatgtgtccacctagtgggggctgcgagattgtcgaagcctggctgagagctgatcgatatgcattctgggatgttcccctgagggaagagactgagctctctaggagggtcccaagatctggactccc

SEQ ID NO: 5938 - DNA, 3026 bp, Homo sapiens
  SIMILAR (580)..(1074): 951254mologous to Mus musculus putative,accession number AK004629,Smith-Waterman Score=838.
atgagcctctgcgcccagcccagccctcccgtcctgagaggttcctatacttgtctttcccctagtgtgaacgagctctatgtcgatgacccagacaaggacagcggtggcaagatcgacgtcagtctgaacatcagtttacccaatctgcactgcgagttggttgggcttgacattcaggatgagatgggcaggcacgaagtgggccacatcgacaactccatgaagatcccgctgaacaatggggcaggctgccgcttcgaggggcagttcagcatcaacaagaaccaggagcttcagatcctaagtcaagtgggtgaacgcagtgcccttgggagggccgaggcacccggtggcagctggcagggttttgctcagcacgtgccggccttcctcgaagctcggtactgtcacagtggagcctctcaacaacgctgtgaggcagcaccatttgacaggaagttgaccagcagccagatgtcagagtttgcgtgttttgagcagcagcggcagcctcaccagagaccccacggtgacctcgtttcatcagccagccccgcaggaggaggacaggatggggtccccggcaacttccacgtgtccacacacattgccacagcccagccacagatcccagacatgacgcatgtcatccacaagctctcctttggggacacgctacaggtccagaacatccacggagctttcaatgctctcggtggagcagacagactcacctccaaccccctggcctcccacgactacatcctgaagattgtgcccacggtttatgaggacaagagtggcaagcatagggactcctaccagtacacggtggccaacaaggaatacgtcgcctacagccacacgggccgcatcatccctgcaatctggttccgctacgacctcagccccatcacggtcaagtacacagagagacggcagccgctgtacagattcatcaccacgatctgtgccatcattggcgggaccttcaccgtcgccggcatcctggactcatgcatcttcacagcctctgaggcctggaagaagatccagctgggcaagatgcattgacgccacacccagcctaatggccgaggaccctgggcatcgccagccttgcctccagtgccctgtctcctttggccctcaatctggtcccaaatctggctgtgtcccaaagggtgtgtgggaagtggggggaaagtagaggatggctcgatgttttgcagctacctcttttccccgtgtttctttttagacaaattagcactgcctgaagttgcagttcccctttccctggggagccccaagaacagagtcaggcaaggggtggggagtccagggatcttggggacccctcctaggagagctgcagtctcttccctcaggggaacatcccagaatgcatatcgatcagctctcagccaggcttcgacaatctcgcagcccccactaggtggacacattaatgattttgtttctcccctgggcagccaacctgccccagaggcaccagacctgggctttctagcttttgggaccaggctgcccaaaggtactcctttatacacccggcaccttccacggagatgggtactttcccaagcaagcccctattgatttgtcactatagatggaaccctgacttctgccccatcccttcctgcccaacctagaacccaggcctcaagtctttaccccacccctttcttgttcttccaagaagcagatgcccagttgctcagcagcagcggttagagactttgaatctgcccaccagtcacaaggcgggtcacagattcctcttcctctcttctcctcgttcctctgaaccctccaccaatgtgcctcagactgtgtgctgtgtggcaacagcattctggttcccacttgccaagatctcccaccactctgctggggatctgcaagtggcagggaagtgggggttgtgtaaaaggggaagtcatcttttgagatccagatagacatggtttgtgcacttacggtccagatggggaaggcatccttcctgcaaccctaaaataatcatgcagcctcttcagacgggacgccatcggtcccaaggcctttaggttggaggaagcaaagcaggccaggcctgtcctgtccgtggacctctaccttctggactccctacgggtgcagagcactctgggtttcttctacagccatcgtggcccaacttgacactgtgctcctccatcagctggtcacatgccaacacgttcccagcccctgaggcagctccaggggtgccccacctggttcctgaggtgggtccctaaccctggctgctcctcttcaatccttttcccttttgtcctgaaaaggaaggaagcaatggttccaggcaattaatttcaacccagggaaattttaagctaatgcccttcatgttcccaggggagagggccacacgccctgttttcccatttatagcaagattgtttgcatacttttgtaatgaaggggagtgttccagtggaaggatttttaaaattatcttatgggataagctcaagtctctgcccatttgtaattttttggctctaagctccgattggagaccgcttctcccttggtgcatgtgagttgactgatggttggtgagtggtaaatgccatttggttaatttctggtatcgggtgggccacttggcatggatttttttacaattctgttccccaagttacaggaaggagtccctttggtgtgtgaatatgtgtgcctgtagagggtggggcagggttggggtggggatggaaatgtgtggcatgcacatgaagttgaaattcttttatgacatttttttgaagaaaaaaaaaaaaaaaaaccaactctgaggacataggggatgtcagtttcctaagggaaaaaacacctctgacccgttattcttataatcaaaatctgaagggaaaaaaatgttttagttctttccccactcgttgggttcaactagattaaaaggctgattttcagaaaaaaaaaaaaaaaaa

SEQ ID NO: 5939 - DNA, 461 bp, Homo sapiens
  misc_feature (1)...(461): n = a,t,c or g
ggcacgagggatgttacccattttaagacacacctttttaagggtaactttaaggggaaaaaaagcctgcctattatgatattacactttctgatcaaataaagagagcttttgaattatcatcatcatcattannnnnnnnnnnnnnnnnnnnnnnnnnnnnnnnnnnnnnnnnnnnnnnnnnnnnnnnnnnnnnnnnnnnnnnnnnnnnnnnnnnnnnnnnnnnnnnnnnnnnnnnnnnnnnnnnnnnnnnnnnnnnnnnnnnnnnnnnnnnnnnnnnnnnnnnnnnnnnnnnnntgtttttggtacaaacaaaannnnnnnnnnnnnnnnnnnnnnnnnnnnnnnnnnnnnnnnnnnnnnnnnnnnnnnnnnnnnnnnnnnnnnnnnnnnnnnnnnnnnnnnnnnnnnnnnnnnnnnnaccttgaattatctagacataaatttgtatcatacgttac

SEQ ID NO: 5940 - DNA, 481 bp, Homo sapiens
  SIMILAR (227)..(331): 541254mologous to Homo sapiens HSPC093,accession number AF161356,Smith-Waterman Score=78.
tgtacaagagtaaacttatgataaccaatttatgtctagataattcaaggctgggcgtggtggctcacacctataatcccagcactttagaaggcccaagacagggggatagtttgagccccagaggtgtccagaccagcctgggcaacatagcaagatcttgtctgtaccccaaaaacattttttttttaaattagcctagatctggcaagcacgtgccctgtactccccagctactctgggggctgaggttggaggatcccttgagccctgggaggttgagactgcaatgagccacaactgcaccgactgcactgcagcctggggtgacaggggagcctatctcaaaaaataatgatgatggatgataattcaaaagctctctttatttgatgaggaaagtgttaatatcataataggcaggctttttttccccttaaagttacccttaaaaaggtgtgtcttaaaatgggtaacatcc

SEQ ID NO: 5941 - DNA, 432 bp, Homo sapiens
  SIMILAR (16)..(423): 561254mologous to Homo sapiens Amino acid sequence of human signal transduction protein SGT6-1,accession number AAB30852,Smith- Waterman Score=404.
tttcgttacagcagaggaggaagcatggaggattactgtgatagccctcatggagagactacctcggttgaagactcaacccaggatgtgaccgcagagcaccacacgagcgatgacgaatgtgagcccatcgaggccattgccaagtttgactacgtgggccggacagcccgagagctgtcctttaagaagggagcatccctgctgctttaccagcgggcttccgacgactggtgggaaggccggcacaatggcatcgacggactcatcccccatcagtacatcgtggtccaagacaccgaggacggtgtcgtggagaggtccagccccaagtctgagattgaggtcatttctgagccacctgaagaaaaggtgacagccagagcgggggccaactgtcccagtgggggtcatgtagccgatatttatctt

SEQ ID NO: 5942 - DNA, 1669 bp, Homo sapiens
  SIMILAR (183)..(332): 981254mologous to Homo sapiens KIAA0456 protein,accession number AB007925,Smith-Waterman Score=250.
gcgcttcaaaggcccttaggtttccttgtctctgtttacagaactagtccagccaggtgtcgctgctgcctcatagctgtgtggggtcgcgtgtatgtcggggggccatcttgccgatttaacgctgctttttgtgttgttgttgttttccctcctccctgcctgcctgccccttctcccccagcgaggacggtgtcgtggagaggtccagccccaagtctgagattgaggtcatttctgagccacctgaagaaaaggtgacagccagagcgggggccagctgtcccagtgggggtcatgtagccgatatttatcttgcaaacatcaacaagtaagctctgcttttcattttctgctccccgtgaatgacttgcaacacccagcctcaccctctggcctaacccccatctccattccctgtgctgcacgtagggctcccagctccccgagcctaacagtttgcatgtggtcattgctgctgcaaggcggacagggctgaggatgctgctacaagcctcggggcaggtccaggtctccagctagctgccctcgtgctgtggaagggtgctttactgtgtgttcccgcagtgtctgtccacccagacctttgtggcagtcttacagctaaaactttgaccaaagctttggtcactttatgcaacctggttttgtactgtttctcagaggtgccttcttttttccaatccatactcaaataatagtctttgatgtctgtcttccttgaccccgtgttcgtgcaaagattcagagtctgtgtgtgggcttctactagggtgatgttacaacaggtgggtttaattgaggatatcaagtgtctgttcctccccctgtcctgcattcactcctgtggaggaaaggaggccacgatgtccctaaggaaagctttgtcctgagctcttcattcattggctaacccctagctcccttttcttctgccctttcacaccaggagaaataattttccattttgttcctaatggctttggccttttgtattattctaccccctttagtcccctttgcagatccccactcctgctcagcagtgctcttaccctctgacccccaagctttcaattgtggctgttagcaacatcctggggtttaaaactccaccccacgcccgatctggctgtctaagagggattcctaacgcctgccgttgtgccgccctcccccaagaggcattcaggttattggagaactaatctcatctcaaggggcccagacacccaagtccccaaagcctacagacctctttcccgcccaggccctgaaaccctggccccgtgccagcaaggatgacaagccccagggcggcttcctgatgaatatggattggagatgatgtacagtttttattcccctctggcttttgaggaatgaaatgatttgcacttttgaaaacctgttaaccgtaggcctctggacactgagactggaaggaagaataaaggaatgcttgttgtttttaaactataccaggtttcccagatctcttggcttttttccacccagacggtagcagggggagtggttggggcacgtggctcttttccatctctttcaccctcaagttagtaaagtcgtttattcagatcacttactcagtgtagttataatttaattcagaccagttaaaaaaaaa

SEQ ID NO: 5943 - DNA, 293 bp, Homo sapiens
  SIMILAR (1)..(165): 661254mologous to Homo sapiens PRO2550,accession number AF130089,Smith-Waterman Score=168.
tttggatttttagtagaaacggggtttctccaagttggtcaggcttgtcttgaactcctgacctcaggtgattcacctgccccggcctcccaaaatggtgggattacaggcaggagccaccgtgccgggccgacaatatttctaaagaaaccttttaaaaacctgcattctctttgttcatccaattattcaatcattggctcatttgttaattcaaatacttattaagagctcactgtgtacaccacgtaccagtattcacaccacagatttcttttttaatttttttgaaa

SEQ ID NO: 5944 - DNA, 306 bp, Homo sapiens
atgccagttctgctcaccagtgacgaaatgcacaagagctccgtgaaagcagggtttgctaaagtggatcaacagcaagcccccaagtcagttcagcttctgacagtgaagacaagagactcaacaagtaacagaggaaactctggccccaggagccaggcaactgaccgcatctgcagaacaccttatcattttgaagactgctctaagtggaacatcctcctgaatccacttaatctccattcaacttctaatctgctgatgtcacctgaccagctcaagaccaagaatgagaaacggaactaa

SEQ ID NO: 5945 - DNA, 1430 bp, Homo sapiens
  SIMILAR (13)..(69): 631254mologous to Homo sapiens Human secreted protein, SEQ ID NO: 6953,accession number AAG02872,Smith-Waterman Score=62.
tggggtcttgctctgttgcccaggctggagtgcagtggtgcgatctcagctcactgcaacttttgcctcctggttcaagcagttctcctgcctcagcctgccaaatagctgggattacaggtgtgtaccaccactcccagctaatttttgtatttttagtagagatggggttttaccatgttggccaggctggtctcgagctcctggcctcaggtgatccacctgctttggcctcccaaagtgctgagattacaggcgtgaactaccgcgcctggccccatgtattgtatttttttcaggttatattgaaatctactaccaggaatgtcggaatgggttttggtatgtataatggaaatagatagagtggttaagtctagaaacacatacattaattgtattgaaatgttatatcaatacatcatttatgatgttgtgtgtggtcccagacctcatggccaccagtttggttaagcatttgtgaatgcttttttaatagcattcattagcattaatggaggaggacactgtgttttctcaattaatctcattgatttgtttggtataagtttgggtcagaaatgaaactgccaaaacatcgatcagtacaaggaagggacacagggcttaaaatgtccacagtcttggcagtggacttggcagttctcccagtaagcagaagtacttgagcttaattctgaacttcaaagtaatattttatacttaattttaggagttttcatttacatattgaaaaatgccttgactgtattcacataaatggtgctaaaacattgtaccccttataagaactgcagcaatccacagtaatgttggttacttctgagtatttgataaaggaacaaagtcaaaatgaatgtatttaataagcttctttctcatttccattgtttttataaaaatattttggtattgttgcctgcattttagccacttctaactttttgtattatgaatttggagaggataacaagccaactttagaccctctgccaagtggcgatggtgtttttcttccatgggtaagccattgtgaatggaggctggtggagcagcacactgtgtgaaaccctggcagcgctcatcttggcttgttttagcagtgcctctgtttacacccataagatgttccgcatgtgtccaaaatttcgcctgctctgaaaaacatggcccccgaggctctgtgcagtttggggccttggttcccacctgcagatgcggtcagttcccctggctcctggggccagagtttcctctgttacttgttgagtctcttgtcttcactgtcagaagctgaactgacttgggggctttgctgttgatccactttagcaaaccctgctgcagaggactgtaaaaacaaataactaaaaataaacttagaaaatacaactcaaaaaaaaaaaaaa

SEQ ID NO: 5946 - DNA, 601 bp, Homo sapiens
  SIMILAR (75)..(233): 661254mologous to Homo sapiens Human myelin oligodendrocyte glycoprotein gene,accession number AAZ29204,Smith-Waterman Score= 162.
ccaggctggagtgcagtggcttgttctcagctcactgcaaactctgcctcccaggttcaagccattctcctgcctcaggctcccaagtagctgggattacaggtgcctgccaccatgcttggctaagttttgtatttttagtagagacggagtctcatcatgttggccaggctggtcccaaactcctgacgtcaggtgatctgcctgccctgtctcccagggggctgggattacaggcacgagatgggtggatcacctgaggtcaggaccagcctggccaacacagcgaaaccccgtctccaccaagaatacaaaaaaaaataggagtgatggtgtgtgcctgtaattccagccactcaggaggccgaggcaggagaatcacttgaacccgggaggtggacgttgcagtgagccagtttatagctttcagtcaagacatgtatattggttgaaatactgatacagttattctatagaaatttgttgcagcctgaaatgattgtgatttttctctgttaaaatggctttctctgataaataaatattttaaaataaaaaagcaatatctagaataatagtttaaaatacagaatacacttac

SEQ ID NO: 5947 - DNA, 1257 bp, Homo sapiens; identical to SEQ ID NO: 303
  SIMILAR (430)..(1254): 991254mologous to Oryctolagus cuniculus elongation factor 1 alpha,accession number U09823,Smith-Waterman Score=1427.

SEQ ID NO: 5948 - DNA, 421 bp, Homo sapiens
aaatgggatgctaggaaatatgcttaaatcaagtcttatttttaaagaggatttacaggaaacagcaatggaaacctggtcaattgaccaggtctgcagttggttggaggaaaaaaatttaagagagctagtttatagatttcaagaggaaaaattaagtggggccgctcttcttgcacttaatgatcggatggttcagcaactggtaaagaaaattgggcaccacgctgttctgatggatttaattaaaaaatacaagcataacactcaaggactgaagtccccagaaaaccccaaaaaggcagccgtggtcatgcaaacagaagcagctcgagattacagggatgaagagtcctccagtccagccaggcatggggagcagatgccatctttctatccagctgaaaaccttgataatggg

SEQ ID NO: 5949 - DNA, 1042 bp, Homo sapiens
  SIMILAR (139)..(11): 721254mologous to Homo sapiens Human myelin oligodendrocyte glycoprotein gene,accession number AAZ29204,Smith-Waterman Score= 165.
cattaggccagcacagtggctgacatctctaatcccagcattttgggaggtcgaggtgggtggatcacctgaggtcaggagttcgagaccagcctggccaacatggtgaaactccatctcttctaaaaatgcaaaaatttagccaggcatggtgctgggattacaggcacataacaccacacccagctaactcttgtatttttgtagaaatggggtttcgctatgttgctcagactggtttcaaacacctggcctcaagtgatcctcctgcctcagtctcccaaatgctgtgattacaggcacaagctactgcaccaggcctctgactacatttctattaatatggttaggttggaggttttagtatttttgtatctcatatttgtatcaatatgactggcttctttgtctgtagtgtgtggtaatattagttctgtaaactgtcagttgcaaaaaaaaaaaataccttgaactatagtatatgttgataattagccataataatttcttagttaatttcttataattaaatttgtcaaagaggaaacttacagtttatatctgatgaaatctctaaaaagatgggtaaaacattgggaaatgtatgcatgtacttcactctggtttcatagggttagcaagtgtcttaaaaacatatataaagaagcacagagattgttaggagatatttatgctcccagttttaataattggggatactttgtataccacaggaaaggaaaaattacttaaactcctctttttttaggtcaaaattgggaaaaaaagtcttaatttgacagttactatggcctgtggctacccataggcaagtatttcagtgggaaaatactttactaagtaagtaatttgaacacagcttaaaatccatagtatgttacaattgctagccttttcacaaagtttgcattgtcttaatgtaggaagggatactgtgatctaaggatttcacaatttttaaaaagtgggaacctaaatagggtttcctaattgccatgaagttatttgtatcttaggtgtt

SEQ ID NO: 5950 - DNA, 1158 bp, Homo sapiens
  SIMILAR (2)..(667): 1001254mologous to Homo sapiens UBASH3A protein,accession number AJ277750,Smith-Waterman Score=1178.
acggagtcgtgggatcaaagactttgaaaacgatcccccattatcatcgtgtggcattttccagtccagaattgcaggggacgcgctactggacagtggtatcagaatcagctctgtgtttgcctccccagccctccgctgtgtgcagacggccaaactcatcctggaagaactcaaactggagaaaaaaatcaagatacgagtggaacctggaatctttgaatggacaaaatgggaagctggcaaaaccaccccaaccctcatgagcctggaagagctgaaagaggcaaatttcaacattgacactgattacaggcccgcgtttcccctgtccgccctcatgccggccgagagctaccaggagtacatggacaggtgcacggcgagcatggtgcaaatcgtcaacacctgtccgcaggacacgggtgtcatcctaattgtgagtcacggctccactctggactcctgcacgcggccactgctcgggctgccgccccgggaatgtggggattttgcccaactcgtgagaaagatcccttccctgggcatgtgcttctgtgaagaaaataaagaggaaggaaaatgggagttggtgaacccaccggtgaagaccctgacccacggggcgaacgcagcatttaactggaggaactggatctcaggcaactgagagccacggtgatgttgtcataacctcagagtggagaggcagaaaccatgtgcagaggctgggagatgctgctgtttccagaggcgtcttagtctcacccaatgtgatttgtagaagcacgagacgcacttttatatcccggaatatttcccctccggctttcgcctttgtaactcccatctgtggacccatcgtccaccagcccagctgcggggagcacagggcaggtggctgggtgaggatgccgccctgcagcatgtacaccgagcgtctgcagctggggacacaactgcccgagactctaacttccaggaattaaagactcaccacacacgaaggatctaaccacttcattttccatggtctaatcattaaattcccaatcgttttttctttttctgggtccatcactctttagccatatccacatgggctaaaacaggtgtaatagtcaataaaatggtcccagaaaaccatcgaccacgtca

SEQ ID NO: 5951 - DNA, 1677 bp, Homo sapiens
  SIMILAR (4)..(171): 1001254mologous to Homo sapiens Human transport protein TPPT- 26,accession number AAB60106,Smith-Waterman Score=284.
ggggaagagggaacaaaatacagatctttttttcagactctatctttgcttgttcaagaagaaggttatgggtctctttatcgtggtctgacaactcatctagtgagacagattccaaacacagccattatgatggccacctatgaattggtggtttacctactcaatggatagcagcacgaggactgctgtactgcaaaaaaagaagaccaaaagattacagtggaccatgggatacagaagccagcatggcagacagaagaaaaatagtttgggaacatgtaactattctaagtggaagttttgttgtaggaattatagtaatcacaccacattacttggcctttcggtaatgtgaaaaaaaaaaaaaaacctcagagcctccaaggaaatgcctttagaagcactcctctctcaaaattgccattttctctaccatgtcccccagacacagttgggttttgttgatttatggcagtcttctaaacaaagccatccttaattttacatactgtattgtaactatccaaagatagtattggcagtcataaatttataacttctggcctttgtttaattccagtaaaataacagcaatgacaatgagatcatcagtattattttcacatttccctgagaggacctggcacaatattttaaatttaattatttggcagtagtcactgtttttgacaaccaatgaaatagcgtctaaatatcttgtatattttttagcatcaaaatgttttggtttccactgctgacaggtgcttgttgtttagcctaatgtggatatttaaattgttaacataccaaacacacatggtaatagtttgggacaaaataactagtaaaatgttgatttctcggctatttcactgactgcggcatgtcctcgtgtcttctctgattttgtggtacatgaatgaatgcatttatctttttagtgacttactagttacgaacttgaattatcacctctttgtcatacttaagtatcatttacataaagtgtaaaagattttttcacttttgaatctttacctacttgctttcacattaagaatttgaacttttgagttttttccaggtctatatataatagattacatttattttgtagagaaaatagtaatttaaagttttgccattttaaggtgacaatatttgggacagtataaatattatagacaagggcccccttgctgtctgctttagcaggtaagtgacattaattgacttatagttttgtgtaaatgaacaaactgcttttggccaaggaaatttaattctgtccctagtttcctgccgtggtaaatcatagaaaggattccaagttcaatttgggttaaatgtgctaataggatgtagctttttaaattctgctattgagtcagctgtaccttttaatactttaaatgtgttatttgtatggccccttaataaaggtgtttgctggtaattccggttaaaagacttcgcctatgccatactggtgtataaaaactgccgcaattggacgccggtgtggtactcatttcagtatacctgaactgtacattttgtgcaatggctttatctaaaagaatgacgcttcgtgaaagcactttgtggccttttttggggggggagggtgagagagtaggagagaataccgatgttaagattaaaaaaaaa

SEQ ID NO: 5952 - DNA, 792 bp, Homo sapiens; identical to SEQ ID NO: 181

SEQ ID NO: 5953 - DNA, 1054 bp, Homo sapiens
  SIMILAR (5)..(316): 731254mologous to Homo sapiens Human myelin oligodendrocyte glycoprotein gene,accession number AAZ29204,Smith-Waterman Score= 389.
ttttttttttttttttttttttttttttgagacagagtctctctttgtcacctaggctggagtgcaggggcacaatctcggctcactgcaacctccgcctcctgggttcaatcaattcttctgcctcagcctcccaagtagctgggactacaggcgcatgccaccatgtccagccaattgtttttgtatttttaggggagacagggtttcaccatgttggccaggctggtctcaaactcctcacctcaagtgatccgcccgcctcggcctcccagagggttaggattacaggcatgagccaccaaatctggcccaaattgagtttaataaagagcttgagtgatgctcagattagggagtgagtattccaggaatgctaggtgcgtggagttggggagccagctgagctctgaatcagagagcagtgagacctaagggtccctgatctcaaagggtccctcctgtctcagggtgaggacctgaagggtgtgggtcccggggagggtgaggaggccattgtaggagatctactgagatggtatcgggatgccccaagcaccacgtagggggattacatctgggtttctgggaacgaagagctgagttaggggagagatcccgaaagatctcagtggggaaaggactaggggtgcagggtgtttcacagaaacaatcaaggggcctcgatttcacagtaaatcatcaagagggctccttggtgggtagaagaggggtatcacagcaccccaaatattggggcctgttcacccctctgcagccattctggggttttaatgtaaaaccccaatggcaggatattccacatacattatcatgggtttgcaacattagcatacgctggctgtcccgcaggacggtggggactggaaaatcagtccagggtctgggtttgagtcctaagaggacaggcctggcggcgccacacggctcctcttcaacagctgccggagctgtagacaaggcaaaggagggagagaagtctgtcaggttggaaggagaggtggggaaggcacgccatgcagagggaggggct

SEQ ID NO: 5954 - DNA, 429 bp, Homo sapiens
  SIMILAR (2)..(322): 641254mologous to Mus musculus putative,accession number AK010429,Smith-Waterman Score=368.
gagctgtgagaggttttctaccagccaggtcttatgttcccaggccctgtcttctggaaagcattactgggaagtggacactaggaattgcagccactgggcagttggggtggcttcctgggagatgagccgcgaccaggtcctgggaaggactatggactcttgttgtgtggaatggaaggggactagccagctctctgcatggcacatggtcaaggaaactgtccttggctcagacagacctggggtggtgggcatctggctgacccttgctgagggaaagctagcctgcgatacagaggacgatcaggatatgctactgtctggtgtaccacatctgtcgtcttaccttgggtcctgtattggcatgcacgtctaacatttgggagtataatcgttatatcttgtaagttaccaattacggtgggg

SEQ ID NO: 5955 - DNA, 423 bp, Homo sapiens
  SIMILAR (123)..(407): 611254mologous to Homo sapiens Human secreted protein sequence encoded by gene 13,accession number AAB51737,Smith- Waterman Score=301.
  misc_feature (1)...(423): n = a,t,c or g
nnnnnnnnnnnnnnnnnnnnnnnnnnnnnnnnnnnnnnnnnnnnnnnnnnnnnnnnnnnnnnnnnnnnnnnnnnnnnnnnnnnnnnnnnnnnnnnnnnnnnnnnnnnnnnnnnnngaaattttcggtgaacaggctgttctgcggggaagcccaggtgggcccaaagatccgggctcattccaatgccggttgcctgtgctacaaacatgggggggtcttaggcacgacgccctggaccatgcctatgggatgcctgggggcatctgcgtccatgcaagcgggtacattggcggtcaccgtacccgagagggagccttgagcatggcccgtgccaccttggcccagcgctcataccttccacaaatctgctagtctaataaaacctttcttctcagaaactgttaaactatagatagagtctg

SEQ ID NO: 5956 - DNA, 401 bp, Homo sapiens
  misc_feature (1)...(401): n = a,t,c or g
agagccaaggctaaaagacgaaacaccaccgtatcttgtcgaatgaggcacctaaaaattgtataccgcagattcaggtacagattgtatgtggggatcataattggtccagggggcttgaatgaaaccctagtgtttacttgtaaaaagataacagtaccctgatggttactggggacgagatgttggaagctttannnnnnnnnnnnnnnnnnnnnnnnnnnnnnnnnnnnnnnnnnnnnnnnnnnnnnnnnnnnnnnnnnnnnnnnnnnnnnnnnnnnnnnnnnnnnnnnnnnnnnnnnnnnnnnnnnnnnnnnnnnnnnnnnnnnnnnnnnnnnnnnnnnnnnnnnnnnnnnnnnnnnnnnnnnnnnnnnnnnnnnnnnnaagggatatcggtatgc

SEQ ID NO: 5957 - DNA, 417 bp, Homo sapiens
  SIMILAR (3)..(104): 971254mologous to Homo sapiens Hs-CUL-1,accession number U58087,Smith-Waterman Score=161.
tgagaatcatgaagatgaggaaggttctgaaacaccatcagttacttggcgaggtcctcactcagctgtcctccaggttcaaacctcgagtccctgtgatcaaggtacaggactttacatagcagtcacattcctttcttaatttagaagataaaagatgtagcaaaaagtggattgattgctgtagcatgaaggaggagggagctggcttctttgtatgtagatttctataaaagaaagtcggcttcagtttaactgttgaaacacacatacaaagtgcacagatgatgaagtgccagcttgatgactttcacagtcaatacactgtgtgatcagcacccaggtaagaattgaaacatgcccggcatcccggaagcccaaccaccccagccagcacctgtgtcccatagaaaatcg

SEQ ID NO: 5958 - DNA, 924 bp, Homo sapiens; identical to SEQ ID NO: 304
  SIMILAR (277)..(882): 821254mologous to Oryctolagus cuniculus elongation factor 1 alpha,accession number U09823,Smith-Waterman Score=824.

SEQ ID NO: 5959 - DNA, 2583 bp, Homo sapiens
  SIMILAR (125)..(2452): 1001254mologous to Homo sapiens cullin 1,accession number AF062536,Smith-Waterman Score=3983.
gaagatcctttctgagctgctgtgaataaatttggaatggtactgtatatttccatctaatggagaactagctgtactttgaataaggattgctgcactggacgactttagaacatccctcacaatgtcgtcaacccggagccagaacccccacggcctgaagcagattggcctggaccagatctgggacgacctcagagccggcatccagcaggtgtacacacggcagagcatggccaagtccagatatatggagctctacactcatgtttataactactgtactagtgttcaccagtcaaaccaagcacgaggagctggagttcctccttctaagtcgaaaaaggggcagacacctggaggagctcagtttgttggcctggaattatataaacgacttaaggaatttttgaagaattacttgacaaatcttcttaaggatggagaagatttgatggatgagagtgtactgaaattctacactcaacaatgggaagattatcgattttcaagcaaagtgctgaatggaatttgtgcctacctcaatagacattgggttcgccgtgaatgtgacgaaggacgaaaaggaatatatgaaatctattcgcttgcattggtgacttggagagactgtctgttcaggccactgaataaacaggtaacaaatgctgttttaaagctgattgaaaaggaaaggaatggtgaaaccatcaatacaagattgattagtggagttgtacagtcttacgtggaattggggctgaatgaagatgatgcatttgcaaagggccctacgttaacagtgtataaagaatcctttgaatctcaatttttggctgacacagagagattttataccagagagagtactgaattcttgcagcagaacccagttactgaatatatgaaaaaggcagaggctcgtctgcttgaggaacaacgaagagttcaggtttaccttcatgaaagcacacaagatgaattagcaaggaaatgtgaacaagtcctcattgaaaaacacttggaaattttccacacagaatttcagaatttattggatgctgacaaaaatgaagatttgggacgcatgtataatcttgtatctagaatccaggatggcctaggagaattgaaaaaactgttggagacacacattcataatcagggtcttgcagccattgaaaagtgtggagaagctgctttaaatgaccccaaaatgtatgtacagacagtgcttgatgttcataaaaaatacaatgccctggtaatgtctgcattcaacaatgacgctggctttgtggctgctcttgataaggcttgtggtcgcttcataaacaacaacgcggttaccaagatggcccaatcatccagtaaatcccctgagttgctggctcgatactgtgactccttgttgaagaaaagttccaagaacccagaggaggcagaactagaagacacactcaatcaagtgatggttgtcttcaagtacatagaagacaaagacgtatttcagaagttctatgcgaagatgctcgccaagaggctcgtccaccagaacagtgcaagtgacgatgccgaagccagcatgatctccaagttaaagcaagcttgcgggttcgagtacacctctaaacttcagcgcatgtttcaagacattggcgtgagcaaagatctgaacgagcaattcaaaaagcacttgacaaactcagaacccctagacttggatttcagcattcaagtgctgagctccgggtcctggcccttccagcagtcttgtacatttgccttgccgtcagagttggaacgtagttatcagcgattcacagctttctacgccagccgccacagtggccgaaaattgacgtggttatatcagttgtctaaaggagaattggtaactaactgcttcaaaaacagatatactttgcaggcgtcgacattccagatggctatcctgcttcagtacaacacggaagatgcctacactgtgcagcagctgaccgacagcactcaaattaaaatggacattttggcgcaagttttacagattttattaaagtcgaagctattggtcttggaagatgaaaatgcaaatgttgatgaggtggaattgaagccagataccttaataaaattatatcttggttataaaaataagaaattaagggttaacatcaatgtgccaatgaaaaccgaacagaagcaggaacaagaaaccacacacaaaaacatcgaggaagaccgcaaactactgattcaggcggccatcgtgagaatcatgaagatgaggaaggttctgaaacaccagcagttacttggcgaggtcctcactcagctgtcctccaggttcaaacctcgagtccctgtgatcaagaaatgcattgacattctaattgagaaagaatatttggagcgagtggatggtgaaaaggacacctacagttacttggcttaacccttctggaagggtctgactgtgtgacccgcagcaaatagttcatgttggaaagaatgaaaacaacttcaagttcataggcagccagcctgccgccattggacctcccttttaaaaactgaggacca

SEQ ID NO: 5960 - DNA, 2869 bp, Homo sapiens
  SIMILAR (125)..(2383): 961254mologous to Homo sapiens Hs-CUL-1,accession number U58087,Smith-Waterman Score=3697.
gaagatcctttctgagctgctgtgaataaatttggaatggtactgtatatttccatctaatggagaactagctgtactttgaataaggattgctgcactggacgactttagaacatccctcacaatgtcgtcaacccggagccagaacccccacggcctgaagcagattggcctggaccagatctgggacgacctcagagccggcatccagcaggtgtacacacggcagagcatggccaagtccagatatatggagctctacactcatgtttataactactgtactagtgttcaccagtttgttggcctggaattatataaacgacttaaggaatttttgaagaattacttgacaaatcttcttaaggatggagaagatttgatggatgagagtgtactgaaattctacactcaacaatgggaagattatcgattttcaagcaaagtgctgaatggaatttgtgcctacctcaatagacattgggttcgccgtgaatgtgacgaaggacgaaaaggaatatatgaaatctattcgcttgcattggtgacttggagagactgtctgttcaggccactgaataaacaggtaacaaatgctgttttaaagctgattgaaaaggaaaggaatggtgaaaccatcaatacaagattgattagtggagttgtacagtcttacgtggaattggggctgaatgaagatgatgcatttgcaaagggccctacgttaacagtgtataaagaatcctttgaatctcaatttttggctgacacagagagattttataccagagagagtactgaattcttgcagcagaacccagttactgaatatatgaaaaaggcagaggctcgtctgcttgaggaacaacgaagagttcaggtttaccttcatgaaagcacacaagatgaattagcaaggaaatgtgaacaagtcctcattgaaaaacacttggaaattttccacacagaatttcagaatttattggatgctgacaaaaatgaagatttgggacgcatgtataatcttgtatctagaatccaggatggcctaggagaattgaaaaaactgttggagacacacattcataatcagggtcttgcagccattgaaaagtgtggagaagctgctttaaatgaccccaaaatgtatgtacagacagtgcttgatgttcataaaaaatacaatgccctggtaatgtctgcattcaacaatgacgctggctttgtggctgctcttgataaggcttgtggtcgcttcataaacaacaacgcggttaccaagatggcccaatcatccagtaaatcccctgagttgctggctcgatactgtgactccttgttgaagaaaagttccaagaacccagaggaggcagaactagaagacacactcaatcaagtgatggttgtcttcaagtacatagaagacaaagacgtatttcagaagttctatgcgaagatgctcgccaagaggctcgtccaccagaacagtgcaagtgacgatgccgaagccagcatgatctccaagttaaagcaagcttgcgggttcgagtacacctctaaacttcagcgcatgtttcaagacattggcgtgagcaaagatctgaacgagcaattcaaaaagcacttgacaaactcagaacccctagacttggatttcagcattcaagtgctgagctccgggtcctggcccttccagcagtcttgtacatttgccttgccgtcagagttggaacgtagttatcagcgattcacagctttctacgccagccgccacagtggccgaaaattgacgtggttatatcagttgtctaaaggagaattggtaactaactgcttcaaaaacagatatactttgcaggcgtcgacattccagatggctatcctgcttcagtacaacacggaagatgcctacactgtgcagcagctgaccgacagcactcaaattaaaatggacattttggcgcaagttttacagattttattaaagtcgaagctattggtcttggaagatgaaaatgcaaatgttgatgaggtggaattgaagccagataccttaataaaattatatcttggttataaaaataagaaattaagggttaacatcaatgtgccaatgaaaaccgaacagaagcaggaacaagaaaccacacacaaaaacatcgaggaagaccgcaaactactgattcaggcggccatcgtgagaatcatgaagatgaggaaggttctgaaacaccagcagttacttggcgaggtcctcactcagctggtcctccaggttcaaacctcgagtccctgtgatcaagaaatgcattgacattctaattgagaaagaatatttgggagcgagtgggatggtgaaaaggacacctacagttacttggctttaaccctttctgggaagggtcttgacttgtgtgacccgcagcaaatagttcatgttgggaaagaatgaaaacaacttcaagtttcattaggcagccagccttgcccgccattgggaccttccctttttaaaaactggaggaccaagactcccatcagctggtcttcgggttttacatcggaactgctcaggattgatacatttcaagtctgtaaatacggacaccaacgccatttaccctaatttaagaacagcggggactgaccctccgtgccgagggctgcatgctaccgcactaagtcaatacatgggctccccgatttgcagctgtcgttttggcagcacttgtcacgttggcagccctttgagagcaagtttgagtggacccccatgtaacctgctatgaaaaccctttgtatagtgtgtttcattttttaatgtgtgaaaataaagcaaattaaaggaaaaaaaaaaaaaaaaaaaaaa

SEQ ID NO: 5961 - DNA, 3097 bp, Homo sapiens
  SIMILAR (39)..(317): 951254mologous to Homo sapiens N- acetylgalactosaminyltransferase IIb cDNA,accession number AAT05873,Smith-Waterman Score=459.
  misc_feature (1)...(3097): n = a,t,c or g
cggagcataacacgcctctgacttctggatttgtgttccaggaatgggccttgacgaattattattcggtgaagcacatggatttgtgccttactgtggtggaccgggcaccgggctctcttataaagctgcagggctgccgagaaaatgacagcagacagaaatgggaacagatcgagggcaactccaagctgaggcacgtgggcagcaacctgtgcctggacagtcgcacggccaagagcgggggcctaagcgtggaggtgagtggcccggccctttcccagcagtggaagttcacgctcaacctgcagcagtaggagggtccgggaggccctgccgtcctgtctcctgcaccactgggtggagtctggtgatcacattattgattatgtttcttaaacttttccgcgaaactaatatacctcagtattccatcatggtctgaaagtcaaacttcggcaaggcacggacgactgtgcagacacagcagcggcaagaagcgagaactgccctccccctcctctcggtgcagcccagccggcgccccttccccaggccggagcgcccctcttccttccagctttcacttctgccggctccgcaactgagtgacacccagcgacaaccgactggggagtggtagaagcaactgaacggatgcgtgcgagctgaggacagggcgggaggagggggcacacatgccccaggggagcgaggagaactcttgaaatctccattttcaatcccttcgaaatcacgtatggttttccacaaagccgagttcgtgttcacgtgggcaggtttacgtcaatagtccctctctctgctcctccattcgcaagtgtcttcctgggccagactcccctccacctcatgtacttgctatattgaggatgaagttttctatggtgggacactaaatataaagctatatagagaaagaatgtacggtcagttccctatggtttctgtagatcatcgtcatcttgtgtattccccacaaagccgttcgcagcttccgggagaaggggccagagcccggtggggccagtttctcacagagggaggaggtggcctttgtcccctggagcccgatcagccagttggtgctactgctgtggccagctggggggcttcctccagaccaccggcctcggccccggcatccctgttgggcgtcagcctgagagtccctactgtgcgtcagaatccaccttgcgtgctgtgcgtatctgtgaacctggagcggttacttattttgacagatatcacctttgggtctttttacattaaatttcttttctctaaggaatataagacataccccatagctctgtgtgagccagcaatatccgctgccccctggcgacagggcagaccaatgatgccaggcagcttgtcacacgctagtattggcttcattgtgatctgagccctgcacgctggggccttcagaattaatggccagcagtgtcagggatgagcccgtcagccaagggcacaggcctgggctcacagtccttcacacctgctggcctnggggagctccaagccaggcaagcgaagtcctgccccgcccgcagctccctcccacaccccgcctggccaagatgactgcttcagggggctttngggggaaagaattaaggaaagggtcagaacccaaacaataccttgcttcatttacactgaggatttcagggcgggagacaggagccttggggtcctgttttaaaccacagacagttatgaactgaaagtcataacggggagaggtgcctggcttctacctggggtgctcaagaatgttcctcgtcacccctgccactctgtggtcggtgccctgcttcctcctccactcctggggcgccttcttccagcgccgcacacacagatgctcagtctcagagaggcttggcacggctgggcagtcttgagaaaagcgttcagtttagggcacacctgcaaggcccctcggtggggacagcggcggcccttggagtttagggagccacccttggagggtgtgccggtgccatgctcctccctgtgtcttgtatgaaaggggccactgtgtgtcttcntcccccggcgggagccccaacaatgtgtgcactgtaggaacagcggccccgaaggttggaagcctggctgggaagggcttgccctataaggtcttctcttcccgcctcccctgccatgcaaccagatgtgttgtgagtggggcagcgttgccccacgctggtagtaactccgcacgcttctgtctttcacggtgggcgctcggggggagcctgaggaaaacccccttaggtacctgtgcgaggctgtggagtgcaggccagagcagggtgtgcgtagcccccagcacccaggttcttctgtcagaccctgtgacctgcgagctgctactactgtaaggagggaaatggatgaatctggctcgttttaaaatcacgttttctgacgaatccttttgccccttcacctttaccccgcccgcacccctaaggccctcttcagccttcctaatcatcccacgtgttttacccagacccttggcggcggccccatgccctgggggccggcgtcctgtccccgagcctgggaggccggcttttggatggtccggggcgtcaaagagcaggggtgggcccggggaggggtccctttgcgggtgagctaatgtttaccatgacaccagtgtgcccaaagtgacttaactgcgggttgcggttagtttcctagtcatccagggacctatcctcacccctccccactccctgtttttaaaacctcagaattcctttccctaagagcccattcgagcaaaagcgtgccgaaggttagttgtcttctctgtgctggtcctttccttatgtcctcataaaagtctcagatgatggtatctgtgagtatgttttgcaaattcaaaatatagtttggtaattttttttttccagttgatttttaaaaagaaactgctgtacagagcttgtactttgtcccattttatagatggaaaccatccttgaaaattgtttaacttaaataaaagagaagatactttctaaaaaaaaaaaaaaaaaaaatgtcg

SEQ ID NO: 5962 - DNA, 488 bp, Homo sapiens
  SIMILAR (41)..(172): 1001254mologous to Homo sapiens beta-signal sequence receptor,accession number D37991,Smith-Waterman Score=242.
  misc_feature (1)...(488): n = a,t,c or g
agtgtgcnccctttgaccgcctgcagtagttccgcacgaggacaggcgattctcccctcattttctggactgggcagcctttggggtcatgacccttccctccatcggcatccccctgctattgtggtactccagcaagaggaaatatgacactcccaaaacgaagaagaactgattggggcttccacagccctcctctcccaagaaatccaggctcctctcccaagaaatccaggtgctttccagactccaaagggtatcttaaatgcaatctcttctctcttagcccttggccactttctcctggaagatgaaatgaaagctatgggactcttggaggatacccagtgtctattctgggttagagaagtgcttactaaggggttttctaataaaaacaaatgccacattgnnnnnnnnnnnnnnnnnnnnnnnnnnnnnnnnnnnnnnnnnnnnnnnnnnnnnnnnnnnnnnnnnnnnnnnnnnnn

SEQ ID NO: 5963 - DNA, 1288 bp, Homo sapiens
  SIMILAR (3)..(359): 961254mologous to Homo sapiens Human secreted protein, SEQ ID NO: 4344,accession number AAG00263,Smith-Waterman Score=576.
  misc_feature (1)...(1288): n = a,t,c or g
ggctctcttcctgtctttgtggctccggaaaggcgtttgggatgccaacgatgaggctgctgtcatttgtggtgttggctctatttgctgtcactcaagcagaggaaggagccaggcttttggtttccaaatcactgctgaacagatacgccgtggagggacgagacctgaccttgcagtacaacatctacaatgttggctcaagtgctgcattagacgtggaactatctgatgattccttccctccagaagactttggcattgtgtctggaatgctcaatgtcaaatgggaccggattgcccctgctagcaatgtctcccacactgtggtcctgcgccctctcaagggctggttatttcaacttcacctcggcaacaattacttacctggcccaggaggatgggcccgttgtgattggctctaccagtgcacctggacagggagggatgctggtgcgagcgggagtttgacaggcgattctccccctcatttttctggactgggcagcctttgggggtcatgaccccttccctccatcgggcatccccctgctaattgtggtactccagcaagaggaaaatatgacactcccaaaacgaagaagaacttgatttggggcttccacaagccctcctctcccaagaaatccaaggctcctctccccaagaaaccccaggtgctttcccagactccaaaagggtatccttaaaatgcaaatctcttcttctcttaagcccttggcccactttcctccctggatccctgcccctgcttctcagcccataagttgaaggaccccagcccctaggaagtcttgcgganagccctccttggttccccatccgtgaaagcccataaaacagggaatgccttttggaaattagcctttgaggcctaggaggggccctcttgatggccccattgagggtgctttttggtttattgctggcaacatgaattctctcaggggttttagaaggggcattttggaagactgccttgacaccaacccctatcccctgcctccccctctcagaagaggggtgggaaagatgaaaatgaaaaggctaatggggactctttggaggatacccaggttgtccattcctggggttagagaaagtgcttacctaaggggttttcctaataaaaacaaatgccacataattgtnanannannanntacctnnnnnnnnnnnnnggggggggcccgggcccccattcccccttatgggggggggtttaaaaatcccgggcccgggttttaacaacggggggattgggaaa

SEQ ID NO: 5964 - DNA, 471 bp, Homo sapiens
  SIMILAR (236)..(469): 1001254mologous to Sus scrofa putative RNA helicase,accession number AJ251914,Smith-Waterman Score=402.
  misc_feature (1)...(471): n = a,t,c or g
tgatgtcnnaggatgnnaancctaggggngcctagnnngtcnaganancaannnngggnngancacgcgtncgggggatgatgagacgaagttgacgctgcatgggttgcagcagtactacgtgaaactgaaggacgacgagaagaaccggaagctctttgaccttctggatgtccttgagttcaaccaggtggtgatctttgtgaagtctgtgcagcggtgcattgccttggcccagcagtttaaagattttcaacgacgaattcttgtggctaccaacctatttggccgaggcatggacatcgagcgggtgaacattgcttttaattatgacatgcctgaggattctgacacctacctgcatcgggtggccagagcaggccggtttggcaccaagggcttggctatcacatttgtgtccgatgagaatgatgccaagatcctcaatgatgtgcaggatcgctttgaggt

SEQ ID NO: 5965 - DNA, 1393 bp, Homo sapiens
  SIMILAR (1218)..(1262): 931254mologous to Sus scrofa putative RNA helicase,accession number AJ251914,Smith-Waterman Score=72.
atggcagagaacgatgtggacaatgagctcttggactatgaagatgatgaggtggagacagcagctgggggagatggggctgaggcccctgccaagaaggatgtcaagggctcctatgtctccatccacagctctggctttcgtgacttcctgctcaagccagagttgctccgggccattgtcgactgtggctttgagcatccgtcagaagtccagcatgagtgcatccctcaggccattctgggaatggatgtcctgtgccaggccaagtcgggcatgggaaagacagcagtgtttgtcttggccacactgcaacagctggagccagttactgggcaggtgtctgtactggtgatgtgtcacactcgggagttggcttttcagatcagcaaggaatatgagcgcttctctaaatacatgcccaatgtcaaggttgctgttttttttggtggtctgtctatcaagaaggatgaagaggtgctgaagaagaactgcccgcatatcgtcgtggggactccaggccgtatcctagccctggctcgaaataagagcctcaacctcaaacacattaaacactttattttggatgaatgtgataagatgcttgaacagctcgacatgcgtcgggatgtccaggaaatttttcgcatgaccccccacgagaagcaggtcatgatgttcagtgctaccttgagcaaagagatccgtccagtctgccgcaagttcatgcaagatccaatggagatcttcgtggatgatgagacgaagttgacgctgcatgggttgcagcagtactacgtgaaactgaaggacaacgagaagaaccggaagctctttgaccttctggatgtccttgagttcaaccaggtggtgatctttgtgaagtctgtgcagcggtgcattgccttggcccagctactagtggagcagaacttcccagccattgccatccaccgtgggatgccccaggaggagaggctttctcggtatcagcaagtttaaagatttttcaacgacgaattcttgtggctaccaaccctatttggccgaggcatggacatcgagcgggtgaacattgcttttaattatgacatgccctgaggattctgacaccctaccctgcatcgggtggccagagcaaggccggtttggcaccaagggcttggctatcacatttgtgtccgatgagaatgatgccaagatcctcaatgatgtgcaaggatcgctttgaggtcaatattagtgagctgcctgatgagataggacatctccttcctacattggaacaggacacggtagaagactcgcccattttgggaatgttgaccgtctgttcctttcagggaggagggacaccagggtgggggtgaaggagacactactggcccccacc

SEQ ID NO: 5966 - DNA, 463 bp, Homo sapiens
agcaggttcagagttgggagagggagaagaggaagtgggcctctcatacttaatgaaagaacaaattcagaagaaggaggtcttcgaggggagaagaggaaacgagatgctgaaaacgatggagaggaagaagatgaatagatcattctaagaccagattctctaatgtttctgggtgtgcaatagagtgatcacatctttgtttcttcatgtacgatagctatccctacagaagataatgtgtaactttttataggaaaagtgtggttttactatttttgccttatcattccgaataagaactagtctgttaatgatcatattgtatgtagagaaaaattttcattgactcccattgtggaattccctagcaatttatttagacttaattttttaaattcaagcttactgtattagtcatttttagcccataattaaaacatgatcccttttaaaaaaaaaa

SEQ ID NO: 5967 - DNA, 652 bp, Homo sapiens
  SIMILAR (18)..(266): 641254mologous to Homo sapiens Similar to RIKEN cDNA 2810018A15 gene,accession number BC003380,Smith-Waterman Score=285.
tctcatacttaatgaaagaagaaattcaggatgaagaagatgatgatgactatgttgaagaaggggaagaagaggaagaagaggaagaaggaggtcttcgaggggagaagaggaaacgagatgctgtgaaagaagaaattcaggatgaagaagatgatgatgactatgttgaagaaggggaagaagaggaagaagatgaagaaggaggtcttcgaggggagaagaggaaacgagatgctgaagacgatggagaggaagaagatgactagatcattctaagaccagattctctaatgtttctgggtgtgcaatagagtgatcacatctttgtttcttcatgtacgatagctatccctacagaagataatgtgtaactttttataggaaaaagtgtggttttactatttttgccttatcattccaaataagaactagtctgttaatgatcatattgtatgtagagaaaaattttcattgactcccattgtggaattccctagcaatttatttagacttaattttttaaattcaagcttactgtattagtcatttttagcccataattaaaacatgatcacttttacacaggtgtagtatggtgcatttcattccttatttataaattaactgaaattacagtttgctataatat

SEQ ID NO: 5968 - DNA, 494 bp, Homo sapiens
cttcatttttcatcacatgaaaggtcaattttttaaaaaagtactcttggtacagaatattttcaaagcctttgtctgaacaagagaagaagttgcaaaattctgagcaagcaccaggaaaaatcatctttgatcagttggttgtaacctacaacatgctacagaagggcccagacgaaaaccggggagccttaggccctgggggtgatcagcccaggaacaccccagtccctagcagacccggctccctagaactttccagcccaataaagcttatggtcgccccccgcaaaaaaggataacctaaataagttatttcagtggttattctttactaagaaatgcatatattctctcaaaaatgtgatacttgggttagtcaggtattttccatatagaaaccacactctccgttcctcaaagtgttgtccttgcacttttaactttttaaacttattaacaaatttttatattaaaatatttaattgtggctg

SEQ ID NO: 5969 - DNA, 1895 bp, Homo sapiens
  SIMILAR (874)..(1599): 811254mologous to Homo sapiens dJ321O10.1 (similar to EEF1A1 (eukaryotic translation elongation factor 1 alpha 1)),accession number AL109752,Smith-Waterman Score=1003.
tcatttagccttctgagctttctgggcagacttggtgaccttgccagctccagcagccttctgatccactgccttgatgacacccacagcaactgtctgtctcatatcacaaacaccaaagtgacccagaggaggatagtctgagaagctctcaatacacatgaggttgccaggaaccatatcaatgatggcagcatcaccggacttcaagaatttagagccatcttccagcttcttaccagaacggtgatcaatcttttccttcagtacagcaaacttgcatgcagtgtgagccatgtggcaatccagtacaggagtatagccagcactgatttggcctggatggttcaggatgatcacctgagcagtgatgccggctgctttcattggtgggccatttttgctgtcaccagcaatgttgccacaacgaacatccttgacagacacattcttgatattgaagccctcattgttcccaggaataaagtttatttcagttgtaacatcgactgcagcaaaggagaccaccataccgggtttgagaacaccagtcttcacttgaccaccaagtacagtaccaatgccaccaattttgtggacatcctggagaggcaggcgcaagggcttgtcagttggaccagatggtggtaggatgtagtccagagcctcaagcagcgtggttccactggcattgccatctttacaggtgactttccatcccttgaacgaaggcacgttagcagttgcctccagcatgttgtcatcattccaaccagaaattggcacaaatgctactgtgttggggttgtagccaattttcttaatgtaagtgctgacttccttaacgatttcctcatatctcttctggctgcagggtggctcagtggaaccacgctgcttgaggctctggactgcatcctaccaccaactcgtccaactgacaagcccttgggcctgcctctccaggatgtctacaaaattggtggtattggtactgttcctgttggccgagtggagactggtgttctcaaacccggtatggtggtcacctttggtccagtcaacgttacaacggaagtaaaatctgtcgaaatgcaccatgaagctttgggtgaagctcttcctggggacaatgtgggcttcaatgtcaagaatgtgtctgtcaaggatgttcgtcgtggcaacgttgctggtgacagcaaaaatgacccaccaatggaagcagctggcttccctgctcaggtgattatcctgaaccatccaggccaaataagcgccggctatgcccctgtattggattgccacacggctcacattgcatgcaagtttgctgagctgaaggaaaagattgatcgccgttctggtaaaaagctggaagatggccctaaattcttgaagtctggtgatgctgccattgttgatatggttcctggcaagcccatgtgtgttgagagcttctcagactatccacctttgggctgctttgctgttcgtgatatgagacagacagttgcggtgggtgtcatcaaagcagtggacaagaaggctgctggagctggcaaggtcaccaagtctgcccagaaagctcagaaggctaaatgaatattatccctaatacctgccaccccactcttaatcagtggtggaagaacggtctcagaactgtttgtttcaattggccatttaagtttagtagtaaaagactggttaatgataacaatgcatcgtaaaacctttcagaaggaaaggagaatgttttgtggaccactttggttttcttttttgcgtgtggcagttttaagttattagtttttaaaatcagtactttttaatggaaacaacttgacccccaaatttgtcacagaattttgggacccattaaaaggttaactggg

SEQ ID NO: 5970 - DNA, 860 bp, Homo sapiens
taaagacacagggtctcactgtatcccagtgaaggagtgcagtggcacaaacccatagctcactataaccttgagctccctgggagctcaagtgatccttctgactcagcctccccagcagctagaaatagaggagcatacagttatgccctggataattaagaaatttttttttttttttggtagagatggagtcttgatgttgtccatgctggtcttcaactcctggactcaagtgatgctcctgcctcagcctccccaagtgctaggattaagggttgagctagatgacacttttttaaaagtgtcttcactggttctcttttgtctaaagcagggctacaagaaaagaatctggaatccttaatcaaatacatttctggccaagtgtgggttttatcagtccctgatggttaataatgagatagttgaactaacttaagaaactttggaatacctttgttgtagagatttggggaaaaatcttacttgctctgactagtgatcttgaagtaaagcctttaacaaagaaagctagtaacaatgataaggccatcaaaatttgttttttattatcaaataattctataaacttacaaaatccataaattcctagcaacacatttttaacaaagataaaaataagaaaaaaatgtcagttaaaaaataaataaaacatacctagaaatggaatccgtctggaaagaaagagaaaaacataggcatactaaatttttatgctttcattaaactattaacctatgattataagtaaatttaatgtagtatcaatagaagcaaacgaatgaacacctaaggttctttatgcataacagtatatacatattttgtttaaaatt

SEQ ID NO: 5971 - DNA, 378 bp, Homo sapiens
  SIMILAR (24)..(260): 961254mologous to Homo sapiens eukaryotic initiation factor 4AII,accession number D30655,Smith-Waterman Score=388.
agaagatgcatgccagagacttcacagtttctgctctggctcgcgggattgatgtgcaacaagtgtctttggttataaattatgatctacctaccaatcgtgaaaactatattcacagaattggcagagggggtcgatttgggaggaaaggtgtggctataaactttgttactgaagaagacaagaggattcttcgtgacattgagactttctacaatactacagtggaggagatgcccatgaatgtggctgaccttatttaattcctgggatgagagttttggatgcagtgctcgctgttgctgaataggcgatcacaacgtgcattgtgcttctttctttgggaatatttgaatcttgtctcaatgctcataacgg

SEQ ID NO: 5972 - DNA, 300 bp, Homo sapiens
ttacatcatcttactgaacactactgactttactgaatctattccgtgatttgatgttaccttccatacaaatcacagtagaaaaacgtatgaatgtttttcaatacagccaagatgctggcttctcacctgtgaatatagttttcacgattggtaggtagyttaccaaagacacttgtgcacatcaatcccgcgagcctgaaacacaatggcatgttttaaaaattgattcaaaaaaacttgacacctgtcatgtaggccacaaaatagtagcgaactatactaagtggtatagcccac

SEQ ID NO: 5973 - DNA, 1769 bp, Homo sapiens
  SIMILAR (40)..(246): 1001254mologous to Mus musculus protein synthesis initiation factor 4A,accession number X56953,Smith-Waterman Score=372.
ggggctttttcagtcgggcgctgagtggtttttcggatcatgtctggtggctccgcggattataacagagaacatggcggcccagagggaatggaccccgatggtgtcatcgagagcaactggaatgagattgttgataactttgatgatatgaatttaaaggagtctctccttcgtggcatctatgcttacggttttgagaagccttccgctattcagcagagagctattattccctgtattaaagatccaaaaggtaattctggcacttggagactatatgggagccacttgtcatgcctgcatttgtggaacaaatgttcgaaatgaaatgcaaaaactgcaggctgaagcaccacatattgttgttggtacacccgggagagtgtttgatatgttaaacagaagatacctttctccaaaatggatcaaaatgtttgttttggatgaagcagatgaaatgttgagccgtggttttaaggatcaaatctatgagattttccaaaaactaaacacaagtattcaggttgtgttgctttctgccacaatgccaactgatgtgttggaagtgaccaaaaaattcatgagagatccaattcgaattctggtgaaaaaggaagaattgacccttgaaggaatcaaacagttttatattaatgttgagagagaggaatggaagttggatacactttgtgacttgtacgagacactgaccattacacaggctgttatttttctcaatacgaggcgcaaggtggactggctgactgagaagatgcatgccagagacttcacagtttctgctctgcatggtgacatggaccagaaggagagagatgttatcatgagggaattccggtcagggtcaagtcgtgttctgatcactactgacttgttggctcgcgggattgatgtgcaacaagtgtctttggttataaattatgatctacctaccaatcgtgaaaactatattcacagaattggcagagggggtcgatttgggaggaaaggtgtggctataaactttgttactgaagaagacaagaggattcttcgtgacattgagactttctacaatactacagtggaggagatgcccatgaatgtggctgaccttatttaattcctgggatgagagttttggatgcagtgctcgctgttgctgaataggcgatcacaacgtgcattgtgcttctttctttgggaatatttgaatcttgtctcaatgctcataacggatcagaaatacagattttgatagcaaagcgacgttagtcgtgagctcttgtgaggaaagtcattggctttatcctctttagagttagactgttggggtgggtataaaagatggggtctgtaaaacctttctttcttagaaatttatttcctagttctgtagaaatggttgtattagatgttctctatcatttaataatatacttgtggactaaaagatataagtgctgtataaaatcagccaattatgttaaactagcatatctgcctttattgtgtttgtcattagcctgagtagaaaggcctttaaaatttttttagaaagcatttgaatgcattttgtttggtattgtatttattcaataaagtatttaattagtgctaagtgtgaactggaccctgttgctaagccccagcaagcaatcctaggtagggtttaatccccagtaaaattgccatattgcacatgtcttaatgaagtttgaatgttaaataaattgtatattcacttgaaaaaaaaaaaaaaaaaaaac

SEQ ID NO: 5974 - DNA, 894 bp, Homo sapiens
  SIMILAR (295)..(891): 1001254mologous to Mus musculus protein synthesis initiation factor 4A,accession number X56953,Smith-Waterman Score=1011.
atggaccccgatggtgtcatcgagagcaactggaatgagattgttgataactttgatgatatgaatttaaaggagtctctccttcgtggcatctatgcttacggttttgagaagccttccgctattcagcagagagctattattccctgtattaaagggtatgatgtgattgctcaagctcagtcaggtactggcaagacagccacatttgctatttccatcctgcaacagttggagattgagttcaaggagacccaagcactagtattggcccccaccagagaactggctcaacaggttgtgttgctttctgccacaatgccaactgatgtgttggaagtgaccaaaaaattcatgagagatccaattcgaattctggtgaaaaaggaagaattgacccttgaaggaatcaaacagttttatattaatgttgagagagaggaatggaagttggatacactttgtgacttgtacgagacactgaccattacacaggctgttatttttctcaatacgaggcgcaaggtggactggctgactgagaagatgcatgccagagacttcacagtttctgctctgcatggtgacatggaccagaaggagagagatgttatcatgagggaattccggtcagggtcaagtcgtgttctgatcactactgacttgttggctcgcgggattgatgtgcaacaagtgtctttggttataaattatgatctacctaccaatcgtgaaaactatattcacagaattggcagagggggtcgatttgggaggaaaggtgtggctataaactttgttactgaagaagacaagaggattcttcgtgacattgagactttctacaatactacagtggaggagatgcccatgaatgtggctgaccttatttaa

SEQ ID NO: 5975 - DNA, 1273 bp, Homo sapiens
  SIMILAR (2)..(103): 911254mologous to Saccharomyces cerevisiae eIF4a,accession number X58099,Smith-Waterman Score=160.
  misc_feature (1)...(1273): n = a,t,c or g
gctgatcactactgacttgttggctcgcgggattgatgtgcaacaagtgtctttggttataaattatgatctacctaccaatcgtgaaaactatattcacaggtgagaagccagcatcttggctgtattgaaaaaaattcataccgtttttctactgtgatttgtatgaaaggtaacatcaaatcaaggaatagattcagtaaagtcagtagtgttcagtaagatgatgtaattaaatttgtactagggaaggttgatgagaacanaccaaggtgggaaaacttgtaaacatttgcccagattgtggacataggggttttttccacaattgttggtcgtaccttatgcttgagctttaagtgatggtccttggtgtccatgtggtttttcttggtgaatttttttcctataagttggggaatttccttgggtgtcgcctggtaagcaatttgagtgaaccccgggtttagttataggtgggctttaatcccctaaattaaattggaattgtaaccttgtttatatggatgttaaaaaaaaggactttttaaaaaatacaggagtcgatagcagcagttggtgacgagatggcactcagaaacggcgttgacgtaatttaggacgtggaatcataagccgaaacagcacactgtttgaataaagagcgagtccggtatttatatttgtttttcttttgtcatgattatttgatttttaagttgctccagctaaggcatttttttgtattagtatttctattagggaacctttcttattaggtggtttgtattgtctggtttctaacatgcaggtagctgtttgggcagttaaacacgtttaggagtaatttgagttacaacgtgtggaaactggaggcaaaaaagcagtgataagtttgggttaccataccaaatatttgttttcccactggaaaaaagtaagttttagaaaatagttaacctttgcagcatttgtttacagtttacagttccagaagtgcgtcgaaatggattacataactgctcttttattcctgggtgttcacatctggcccaggctgacaccctgctccttgggctgggcccacttttgggtatgggcctttaaatttcactaccccaaacacgatactgtcatctgctttataataatgctcaagatgcctgataaaaatctcatttttgcagccagaccaagcccttgaatccctttgggcactaactggcaaagggaagatttttttcctccnagatatgcattaagcagctagtgc

SEQ ID NO: 5976 - DNA, 1933 bp, Homo sapiens
  SIMILAR (16)..(600): 1001254mologous to Homo sapiens eukaryotic initiation factor 4AII,accession number D30655,Smith-Waterman Score=1014.
gtggtttttcggatcatgtctggtggctccgcggattataacagagaacatggcggcccagagggaatggaccccgatggtgtcatcgagagcaactggaatgagattgttgataactttgatgatatgaatttaaaggagtctctccttcgtggcatctatgcttacggttttgagaagccttccgctattcagcagagagctattattccctgtattaaagggtatgatgtgattgctcaagctcagtcaggtactggcaagacagccacatttgctatttccatcctgcaacagttggagattgagttcaaggagacccaagcactagtattggcccccaccagagaactggctcaacagatccaaaaggtaattctggcacttggagactatatgggagccacttgtcatgcctgcattggtggaacaaatgttcgaaatgaaatgcaaaaactgcaggctgaagcaccacatattgttgttggtacacccgggagagtgtttgatatgttaaacagaagatacctttctccaaaatggatcaaaatgtttgttttggatgaagcagatgaaatgttgagccgtggttttaaggatgcaaatctatgagattttccaaaaactaaacacaagtattcaggttgtgtttgcttctgccacaatgccaactgatgtgttggaagtgaccaaaaaattcatgagagatccaattcgaattctggtgaaaaaggaagaattgacccttgaaggaatcaaacagttttatattaatgttgagagagaggaatggaagttggatacacctttgtgacgttgtacgagacacctgaccattacacaggctgttatttttctcaataccgaggcgcaaggtggacctggcctgacctgagaagatgcatgccagagacttcacagtttctgctctggtttattaatttgcagcatggtgacatgggaccagaaggagaagagatgttatcatgagggaattccggtcaagggtcaaagtccgtgttctgatcactactgacttgttgggctcgcggggattgatgtgcaacaacgtgtctttggttataaatttatggatctacctaccaatccgtgaaaacctatattcacagaattggcagaggggggtcgaatttgggaggaaaaggtgtggctataaacttttgttacttgaagaagacaagaggattcctccgtgacattgagacctttctaccaatactacagtggaggagaatgcccatgaaatgtgggctgaccttattttaattcctggggatgagagttttggatgcagtgctccgctgttgctggaataggcgatcacaacgtgcattgtgcttctttctttgggaatatttgaatcttgtctcaatgctcataacgggtccagaaatacagattttgatagcaaagcgacgttagtcgtgagctcttgtgaggaaagtcattggctttatcctctttagagttagactgttggggtgggtataaaagatggggtctgtaaaatctttctttcttagaaatttatttcctagttctgtagaaatggttgtattagatgttctctatcatttaataatatacttgtggactaaaagatataagtgctgtataaaatcagccaattatgttaaactagcatatctgcctttattgtgtttgtcattagcctgagtagaaaggcctttaaaatttttttagaaagcatttgaatgcattttgtttggtattgtatttattcaataaagtatttaattagtgctaagtgtgaactggaccctgttgctaagccccagcaagcaatcctaggtagggtttaatccccagtaaaattgccatattgcacatgtcttaatgaagtttgaatgttaaataaattgtatattcactttaaaaaaaaaaaaaaaaa

SEQ ID NO: 5977 - DNA, 752 bp, Homo sapiens
  SIMILAR (28)..(714): 1001254mologous to Homo sapiens MHC cell surface glycoprotein,accession number M60333,Smith-Waterman Score=1209.
actcccaaaagagcgcccaagaagaaaatggccataagtggagtccctgtgctaggatttttcatcatagctgtgctgatgagcgctcaggaatcatgggctatcaaagaagaacatgtgatcatccaggccgagttctatctgaatcctgaccaatcaggcgagtttatgtttgactttgatggtgatgagattttccatgtggatatggcaaagaaggagacggtctggcggcttgaagaatttggacgatttgccagctttgaggctcaaggtgcattggccaacatagctgtggacaaagccaacttggaaatcatgacaaagcgctccaactatactccgatcaccaatgacaagttcaccccaccagtggtcaatgtcacgtggcttcgaaatggaaaacctgtcaccacaggagtgtcagagacagtcttcctgcccagggaagaccaccttttccgcaagttccactatctccccttcctgccctcaactgaggacgtttacgactgcagggtggagcactggggcttggatgagcctcttctcaagcactgggagtttgatgctccaagccctctcccagagactacagagaacgtggtgtgtgccctgggcctgactgtgggtctggtgggcatcattattgggaccatcttcatcatcaagggattgcgcaaaagcaatgcagcagaacgcagggggcctctgtaaggcacatggaggtgatggtgtttcttagagagaag

SEQ ID NO: 5978 - DNA, 1254 bp, Homo sapiens
  SIMILAR (65)..(832): 771254mologous to Homo sapiens cell surface glycoprotein,accession number M60334,Smith-Waterman Score=966.
attcttgtctgttctgcctcactcccgagctctactgactcccaaaagagcgcccaagaagaaaatggccataagtggagtccctgtgctaggatttttcatcatagctgtgctgatgagcgctcaggaatcatgggctatcaaagaagaacatgtgatcatccaggccgagttctatctgaatcctgaccaatcaggcgagtttatgtttgactttgatggtgatgagattttccatgtggatatggcaaagaaggagacggtctggcggcttgaagaatttggacgatttgccagctttgaggctcaaggtgcattggccaacatagctgtggacaaagccaacctggaaatcatgacaaagcgctccaactatactccgatcaccaatgtacctccagaggtaactgtgctcacgaacagccctgtggaactgagagagcccaacgtcctcatctgtttcatcgacaagttcaccccaccagtggtcaatgtcacgtggcttcgaaatggaaaacctgtcaccacagggggtttcagagacatgttttcctgccaagggaaaacacccttttccgcaattccattattttccccttcctgcctccaactgaggacgtttacgacttcagggtggagccactggggcttggatgagcctcttctcaagcactgggagtttgatgctccaagccctctcccaaaggactacagagaacgtggtgtggtgccctgggcctgactgtgggtctggtgggcatcattattgggaccatcttcatcatcaaggggattgcgcaaaagcaatgcagcagaacgcagggggcctctgtaaggcacatggaggtgatggtgtttcttagagagaagatcactgaagaaacttccgctttaatggctttacaaagctggcaatattacaatccttgacctcagtgaaagcagtcatcttcagcattttccagccctatagccaccccaagtgtggatatgcctcttcgattgctccgtactctaacatctagctgggcttcccggttaattcccttttcctggatctattttcctctatttcctatccttttattatccccatgcaatgcctctggaataaaacatacaggagtctgtctttgctatggaatgccccatggggcatctcttgtggacttattgtttaaggtttcctccaactgtgatttttctgaacccaataaactatttttatgatcttgggtggaaaaaaaaaaaaaa

SEQ ID NO: 5979 - DNA, 3063 bp, Homo sapiens
  SIMILAR (688)..(2748): 711254mologous to Homo sapiens mixed lineage kinase MLK1,accession number AF251442,Smith-Waterman Score=2447.
atggacataaacagcatcgtgctgctacgtatattgatcctccagaaggtggagaatggagacctgagcaacaagattctgaagatcactgattttggcctggctcgggaatggcaccgaaccaccaagatgagtgcggcagggacgtatgcttggatggcacccgaagtcatccgggcctccatgttttccaaaggcagtgatgtgtggagcattctgcctacttgggcagtagttctcacattccttttagctgtagaacccctgaagtgggatagaatgcagacaaacaaagaaacaagccaggatggaggtgggcatttattccaagagcaagcaatggaggataacagtggctttgacctaggaatctggttggcaatgctgagagttcctggaggtcacttggtagaagctccccagcatgaccactacctggataagtcacatgaaagctatggggtgctactttgggagttgctgactggtgaggtgccctttcgaggcattgatggcttagcagtcgcttatggagtggccatgaacaaactcgcccttcctattccttctacgtgcccagaaccttttgccaaactcatggaagactgctggaatcctgatccccactcacgaccatctttcacgaatatcctggaccagctaaccaccatagaggagtctggtttctttgaaatgcccaaggactccttccactgcctgcaggacaactggaaacacgagattcaggagatgtttgaccaactcagggccaaagaaaaggaacttcgcacctgggaggaggagctgacgcgggctgcactgcagcagaagaaccaggaggaactgctgcggcgtcgggagcaggagctggccgagcgggagattgacatcctggaacgggagctcaacatcatcatccaccagctgtgccaggagaagccccgggtgaagaaacgcaagggcaagttcaggaagagccggctgaagctcaaggatggcaaccgcatcagcctcccttctgatttccagcacaagttcacggtgcaggcctcccctaccatggataaaaggaagagtcttatcaacagccgctccagtcctcctgcaagccccaccatcattcctcgccttcgagccatccagttgacaccaggtgaaagcagcaaaacctggggcaggagctcagtcgtcccaaaggaggaaggggaggaggaggagaagagggccccaaagaagaagggacggacgtgggggccagggacgcttggtcagaaggagcttgcctcgggagatgaaggcctcaagtccctggtagatggatataagcagtggtcgtccagtgcccccaacctggtgaagggcccaaggagtagcccggccctgccagggttcaccagccttatggagatggccttgctggcagccagttgggtggtgcccatcgacattgaagaggatgaggacagtgaaggcccagggagtggagagagtcgcctacagcattcacccagccagtcctacctctgtatcccattccctcgtggagaggatggcgatggcccctccagtgatggaatccatgaggagcccaccccagtcaactcggccacgagtacccctcagctgacgccaaccaacagcctcaagcggggcggtgcccaccaccgccgctgcgaggtggctctgctcggctgtggggctgttctggcagccacaggcctagggtttgacttgctggaagctggcaagtgccagctgcttcccctggaggagcctgagccaccagcccgggaggagaagaaaagacgggagggtctttttcagaggtccagccgtcctcgtcggagcaccagccccccatcccgaaagcttttcaagaaggaggagcccatgctgttgctaggagacccctctgcctccctgacgctgctctccctctcctccatctccgagtgcaactccacacgctccctgctgcgctccgacagcgatgaaattgtcgtgtatgagatgccagtcagcccagtcgaggcccctcccctgagtccatgtacccacaaccccctggtcaatgtccgagtagagcgcttcaaacgagatcctaaccaatctctgactcccacccatgtcaccctcaccaccccctcgcagcccagcagtcaccggcggactccttctgatggggcccttaagccagagactctcctagccagcaggagcccctccagcaatgggttgagccccagtcctggagcaggaatgttgaaaacccccagtcccagccgagacccaggtgaattcccccgtctccctgaccccaatgtggtcttccccccaaccccaaggcgctggaacactcagcaggactctaccttggagagacccaagactctggagtttctgcctcggccgcgtccttctgccaaccggcaacggctggacccttggtggtttgtgtcccccagccatgcccgcagcacctccccagccaacagctccagcacagagacgcccagcaacctggactcctgctttgctagcagtagcagcactgtagaggagcggcctggacttccagccctgctcccgttccaggcagggccgctgcccccgactgagcggacgctcctggacctggatgcagaggggcagagtgttccagaggccactggcttcaaggttgtcccctgccctaagcagtataacgaggtgattccagaagccctgcttatggaagtggagagttggtgctggaatggtgagcacctgcagactgctagcagaatccaacccttgctcaatgccattgtagcggcgtcatttgtctggggtaatatgcgagctttgttgtctcacaccagggaaatcaaggacgcagatgcacaagaagaaaggtccctgggcaaagcctgtgaccacagccacacctgtgagtataaggcctgccacaagctcaaatcccacagccagggatggcagatccaggttcacacttcctcagggaataattactcggagtccttcctgacgcacaaagaccaagggaagaccctggcagtttga

SEQ ID NO: 5980 - DNA, 1338 bp, Homo sapiens
  SIMILAR (1)..(1335): 1001254mologous to Homo sapiens FLAME-1,accession number AF009616,Smith-Waterman Score=2298.
atgtctgctgaagtcatccatcaggttgaagaagcacttgatacagatgagaaggagatgctgctctttttgtgccgggatgttgctatagatgtggttccacctaatgtcagggaccttctggatattttacgggaaagaggtaagctgtctgtcggggacttggctgaactgctctacagagtgaggcgatttgacctgctcaaacgtatcttgaagatggacagaaaagctgtggagacccacctgctcaggaaccctcaccttgtttcggactatagagtgctgatggcagagattggtgaggatttggataaatctgatgtgtcctcattaattttcctcatgaaggattacatgggccgaggcaagataagcaaggagaagagtttcttggaccttgtggttgagttggagaaactaaatctggttgccccagatcaactggatttattagaaaaatgcctaaagaacatccacagaatagacctgaagacaaaaatccagaagtacaagcagtctgttcaaggagcagggacaagttacaggaatgttctccaagcagcaatccaaaagagtctcaaggatccttcaaataacttcaggagcatacctgaagagagatacaagatgaagagcaagcccctaggaatctgcctgataatcgattgcattggcaatgagacagagcttcttcgagacaccttcacttccctgggctatgaagtccagaaattcttgcatctcagtatgcatggtatatcccagattcttggccaatttgcctgtatgcccgagcaccgagactacgacagctttgtgtgtgtcctggtgagccgaggaggctcccagagtgtgtatggtgtggatcagactcactcagggctccccctgcatcacatcaggaggatgttcatgggagattcatgcccttatctagcagggaagccaaagatgttttttattcagaactatgtggtgtcagagggccagctggaggacagcagcctcttggaggtggatgggccagcgatgaagaatgtggaattcaaggctcagaagcgagggctgtgcacagttcaccgagaagctgacttcttctggagcctgtgtactgcggacatgtccctgctggagcagtctcacagctcaccgtccctgtacctgcagtgcctctcccagaaactgagacaagaaagaaaacgcccactcctggatcttcacattgaactcaatggctacatgtatgattggaacagcagagtttctgccaaggagaaatattatgtttggctgcagcacactctgagaaagaaacttatcctctcctacacataa

SEQ ID NO: 5981 - DNA, 691 bp, Homo sapiens
  SIMILAR (425)..(676): 721254mologous to Mus musculus putative,accession number AK013779,Smith-Waterman Score=339.
ctgtataagcaccagcacaggctccgacaacatgcaggtgaggaaggggacagaagggcctaagatcccaccatggagagagagggaggagaggggaggggggcttgtagcatcagcttatcagaaggaccccctggtgcaccagaagattgtagtcctgggtgaacaagagctgccctcgggggttagcagcctgttgcttctgttgacttggctttctgccctgcagccagtgaaacctgacagcttcctcacctataaaattgaaacagtaatagtacccacattggagtattctgaggattatatcagtaatacatgtaaaacaatgagaccagcatctgtacaaggtaagcactcaacaaatattggccatgatggtgatgatgatgatgaagatgatgatgaagagatgatgattgcctctgcctgcctgctccaggctgagctggtaaactatgaacgagtcaaggaatattgcctcaaagtcttgaagaaggaaggggagaacttcaaggccctttaccggtctggtgtggccttctaccaccttggggactatgacaaagcactctactacctgaaagaagcaaggacccaacaaccaacagacaccaacgtgattcggtatatccagctgacggagatgaaactcagccgatgctcccagagagaaaaagaagccatgtaa

SEQ ID NO: 5982 - DNA, 5291 bp, Homo sapiens
  SIMILAR (383)..(997): 571254mologous to Mus musculus putative,accession number AK013779,Smith-Waterman Score=576.
  misc_feature (1)...(5291): n = a,t,c or g
ctcggggccacggtccccccgcagcgctagtcccgggcccgcgagcaccggcccccgccacccgcaggttgcggagggaggagggcgggagcgggcggcgcggagccgggaggcgggggaggggccggcgtccgaggcggcggcggcggcggctggagcagcctctggcagcagcggggagaatgggagtgcggggcgccagaccgccgcggggtgtcacggccgccacgaagcctgcgaggcgcggggccggcgcccgcggcttttaaacccgggaaggcgcggcggcggcggcggcggcgggcagatcgcggcgcgcaccaggcgccggggcggcggccgaatggagagaaagggctcggcggccggggccaaggggaacccgagcccgcccgcggccggagaggggcagcggccaccgccgccgctgtgcgtcccgggcggcggcggaggagccccagcgaggggccaggtcggggcggcggccgagccggccgagctcatccgacgagcgcacgagttcaaaagccaaggggcgcagtgctacaaggacaagaaattccgtgaagccataggcaaataccaccgggcgttgctggagctgaaggggctgctgccgccccccggggaacgggagcgggactcgcgcgcggcctccccggctggggccctgaagcccggccgcctctcggaggagcagagcaagacggtggaagccatcgagatcgactgttacaacagcctggcagcctgcctgctccaggctgagctggtaaactatgaacgagtcaaggaatattgcctcaaagtcttgaagaaggaaggggagaacttcaaggccctttaccggtctggtgtggccttctaccaccttggggactatgacaaagcactctactacctgaaagaagcaaggacccaacaaccaacagacaccaacgtgattcggtatatccagctgacggagatgaaactcagccgatgctcccagagagaaaaagaagccatgtaaccaggaagcagctccagagctgcgcccacgcctgaccggggacttccaggcatcccctggcagagagccccgtcctggattctgtccctttctccccacttcttctggctcctcatttttcctcctgttgcaccccagctctttgtctcctcccagtacgaaaaggagagatgcaaatttggaatctggtaggtcgcccagacaatggagacatcctctcctcttagcaggtcagcgactgagaggggcctgacttctgctggggacagctgggagagggagtctcatgggcttggggatgctgtttgttggcttttgatttttggccagttgtttcttgacagagggcggctggggccaaagttttaaccattcccacaggcagcaggcaccacagcccatgggctggatccttccacatttttncttgacagaccagaaccagagcatctcgaggcaactgttagaaatccagggacgagacaaacagagaagcgctggtgaagccaacatagagactgtccaatgtgtaacactggagttcccacccccaccccccacccgtcacttagcccctgcctccttcccccactcgttgtcttggcttgtgctttctcctctccccatcggggatccgagactctgccaggattcacatgccactgaagcccactcagtgccctctggtgaccacacataccattccccctggactcccaccgagcaggcagctgtgcaccccagaagggcaggatgaagtgggccaaggtttgggacaggttgactgtgtaggtgacagggagggaaagatgatggccaggggaaagagcatcgtataggctaggggattgaactgtggactgattcagtgtaaataaaaataaattaacaggtagtagttcctgtcagttctgttggaagcagcccactccctcacttttactccttcctccaaccctcaatcagagctacttacaagccaggccaggatggggctttccccaaagcaattgcccgtttgtccagtggcagacaatggtggctacagcctttgtgcttttaagagtgggctgggattgtggagactgcccaggggctttggctttgtcagaacttgtacaatcttcttttgatgaaattatctgaactcaacatctagcacatagaatgtgttcaacaaatgcttgttgaatgaataaattatgactgcagactggctctcctgccttaaactaatttccatcccccagccctagtctccctgatggcctgtgccccgttatgcctatgcccatgttgcttcagtcaaacaagaaacaccttacctgagggccatatggtttgccccatcattgtgcaatatgcctgtgggacatgggatgtcgtctcagtcttcaaggaaatggaagggttaagaaatgcatatgagattattaccaatgacccccgttaatttatatgatgctttaaaattatcagagcactttcatgtatttttcgtgtgactagtgaaaaagacaatgttgtacaaaattaaaatatatacagatgcaataatgtgaatagttaggatttattaaatgcattatcttcagatctttacatgtataatctcatttctttcatgcagttactctgggatactgttcccatttgatgggtaagaatattgaaaaccagaaaaattaattatcccaaggttgcatggcctttagtggcatagctaggatttgaaccaggcctgcctgactccagagctctggctagtatctatgctatacttagttgcctctctataagtataatattgggcaattataaccatttgagaacaggacaatatgtattaacctgaaaagtgttcatgatgtcagtgatagtacatggcctccttatgtatttactcaagggccccaaaagaccagaggccagaatccctagtagtcagagcagtgacaggtcagaaaaaggcagctgaggtccaatagttatgtctgtgtattgctcattctacttactgatggagccagcatgtatctcaacaactcacctagcattcatcacccatccccagcattgggaaagggtcacaattaagaccgaaaggaaacacaaagttaaatatgggttaattatgtaagcagatgccccaccacggcaggatccaatcacagccgaggggcccagaagagagcagcgtaagttatattcacatagttccccaaaggctttcaacgggggctacaggaaggtgctagaaatattgaggggcctgccattactcacctagagctcactctctggagaagaggaaaaggaagaagctatttccgctgccacattctccccaatccctactatattatgctgtctttcctcttcctcctagctggctttacatgaccctaacccaaaactaccctatggccccacacgggaatgtgttcaaacgccccgacccccacccccacccccattcccaagcctccaacttagaacgtttgtgatttggcagatggtttgttaggatctgaaggatgaagagaagggtagaggtcacctggagaatgagttcaaactgccagggtcttcccttggtctttgtgcgtcaggaaggactccgagtaattattccctatgcagagacaggagagaggtcttgtttacatgagtgtgctggggcagggctggacaatccaggatatgattgtagccatcccatgtagaaagatcaaaaaccagaacgaaatgaagacagcctctcagaacctcatagaacaagcgtccaggtcatctgcttgtttggtgacttagatatacaggcttactggaactccattcactgtgacctgaagttaaataatcccaaagagaaaaagctacctggggtattggttgatgtttggggtgatagggctgaattttctgtgcatttgtccaacaaaggctttagagcacaaaaccaggttcattctccctaccaaatcttcagcttccttctcctcatccctccccaaaacaagaactgtgatttaattccgtacgttgcggatgtcactgctggacctatgtaggctgggagtactaatcagggcatctgacctggcactgtcatcccctgcctggacttttgcgatgggacttttcggggggaaaaactaacgctttttaattattgtggaaagcatcatgtgtgtattgtagaagttttaggaaaaaaaggacaaaatccaatccataagcttaccacccaagacaaacgtgtattcttttgaatataccttttagttctttttgggtgtaaatgtacacacggcacacacagttgtggggattttttttaaacaaaaactgggatacactggaatatactctttaataacttttccaagtgtgtatttattattttaggatatgtaatcctacacagatacaaaattcaaaaagtacaaactgctctgtagtcagaagtaaatcttctccctaccccgtctgccagcatctagtttccctctaatttattttgcatcctagtggagatgcttacacattgtcaaacatatgtatatattcttttatcacacacaaatggcagcatattggacactttttgttttttgctccttctgttccttcacttaataatatcacgaacattttcggcatatcaaactttctcaacagcatcttcattgtatggatggaccctttttttatcatcaatcctcaaatagtgattatttcatttgttcccaatcttcattgtaaatagtgttgcaactgacattcttgtagctaaattttgcacatgtctataacgatttccttaggataaactccaagaagagacttgcttggctatttttaagaattttgatacatcgtgntgccaaccaccctccagaaagtttgtaccaaaacgctctcctatttggatcctagagagtaccctgtttcctgcaccctaacacctaggtatccatccacctatccaaaacctttccccaaattggtagtctgggataatagtatgtccaatgttaatttaactttcctttgaatcttcgcgaataacattttccatatgtcttattgaccatttgtacttctttctttgtgaattttctatttatttgatattggtatgtttattatcaatttgtaattttattaagaatattatttttgtcaacaaatgctgcaaatatgctttccaagtgctttgctttcaaattttgtttatggtgctctttgacaaacataaattcttaattctgca

SEQ ID NO: 5983 - DNA, 1191 bp, Homo sapiens
  SIMILAR (2)..(148): 931254mologous to Homo sapiens BTG1 binding factor 1,accession number L46722,Smith-Waterman Score=237.
  misc_feature (1)...(1191): n = a,t,c or g
gaagtacctcatgaagagctgcaaaaatctcaaaggtggatttcaggaggtggcagaacatttagagctggaacggataggaccacaacatcaggcaggatctgattcattgctcacaggaatggcctttttcaaaatgagagaagtatgaagacatcactgcctttttctcagttggttgttaggttgagaacattaaaaatcttgtggccaaagattttgggcaaccaagtacctactaaggtaaagatatatttagagatcccatatgagtcacatccaccacacttaaaaatattcaaaaataagtcatcttgaaatgtagttcaaaaggaactgggagaacatgttcatcatagaaccaacaattttaaaacataaactacctgagaagtcatgtaggtccaaccatattatttctcaggtgagaaaacaggctaataacttccatgattaaacacattactagtgggagaactccagagttcttttctgactcccattggtgctcctcctacaaggcaaggaatctttatattaggtttattctagcatgaccccttttaaggtttaaactggtgataaatatattatttgctcatgtcattcttcagtgctttgaagattttataagagaagaactcaggctcttttactgcattgagtcttaaaaggggggttgaattccgaaggaatcaaataaatccaacgtagtagttgcatcagaaaccatattaggaaaaccctccttaaacggcaaaaggcagagatcagttccttgagtataaagtgttagggatggaagaatgaaactaaatgaacccattatctactcctaagtaattaagtggatgtgcacagatacacctagctataggtaaacaggaaaattggttgtgcaaaaaacaagtgaggtttttcttgactataagttttcccttttggaaaaattcgctgtggatttgagtatattttctcttaagacattaaattgagactgagaatttaaaactttttgtagcaatgtattgataatagaaagcattaaagctgttttgctaagtagtgttgttgattcagaagtgatttggactatccattcatgacaccgtaaatattttggttttggactccttcccattgtttcattagataattgaaacaaccttttggattttttngctttgcatt

SEQ ID NO: 5984 - DNA, 928 bp, Homo sapiens
  SIMILAR (3)..(719): 811254mologous to Homo sapiens BTG1 binding factor 1,accession number L46722,Smith-Waterman Score=966.
caagacccattggagaattcaggagcaatgctgactatcaataccaactattgcggtgtaatgtagacttgttaaagataattcagctaggactgacatttatgaatgagcaaggagaataccctccaggaacttcaacttggcagtttaattttaaatttaatttgacggaggacatgtatgcccaggactctatagagctactaacaacatctggtatccagtttaaaaaacatgaggaggaaggaattgaaacccagtactttgcagaacttcttatgacttctggagtggtcctctgtgaaggggtcaaatggttgtcatttcatagcggttacgactttggctacttaatcaaaatcctaaccaactctaacttgcctgaagaagaacttgacttctttgagatccttcgattgttttttcctgtcatttatgatgtgaagtacctcatgaaagagctgcaaaaatcctcaaaggtggattaacaggaggtggcagaacagttaagagctggaacggataggacccacaacatcaggcaggatctgattcattgcctcacaggaatggcctttttcaaaatgagagaaatgttctttgaagatcatattgatgatgccaaatattgtgggtcatttgtatgggccttggttctggttcatcctatgtacagaatgggcacaggggaatgcatatggaagagggaagccaacaaggcagtccatggacatggaaatagtccttttaatttttatttcgagctacacacatgcttgtatataggttttatctctggttgaatccctcgaacattaggacagtaccctttcccccccctttccatgggcccattttattgtctgcctttcagtactaagtatgaccgttcctatctcagatcttaataaaaagaaaaaaaaaacgc

SEQ ID NO: 5985 - DNA, 575 bp, Homo sapiens
tgaatttagcaccaattgcattaacgcacatctcttccacaactaacagacttaaaataacagtgtccttcgtattaatatctgtgccattcatttagaattagcagagctaatatggaggggctgaactagtagccacatcttgttcatcacatagactaatagaaaggaggctgtggctaaagcagaaatggaacttccggatctgaaattagccaatataatgttcttttgtatttgggtatttttcatcttaatttttacagcatatactcttcttaccagtatcctttgaatttgggttttccacaacctcaaagggttatttgaaatcttttgttgtattttaaaatattttttggaagagctgctaattttattttaaaaaacaaagttgtgaaaacatgcctcctttttaaaaaataacccctccatccaggatatggaatccagcaccacagtgcacaggtcagggctcggagggagcctctgtgcagatgtgctttctttacagtggctgtaaaaagtttgtatttattatgtataaaatgttgaataataaaaaaaaaggaatt

SEQ ID NO: 5986 - DNA, 4399 bp, Homo sapiens
  SIMILAR (4230)..(4192): 611254mologous to Homo sapiens FLJ00007 protein,accession number AK000007,Smith-Waterman Score=42.
cctttttttttttttttttaattccatttttttttattattcaacattttatacataataaatacaaactttttacagccactgtaaagaaagcacatctgcacagaggctccctccgagccctgacctgtgcactgtggtgctggattccatatcctggatggaggggttattttttaaaaaggaggcatgttttcacaactttgttttttaaaataaaattaggcagctcttccaaaaaatattttaaaaatacaacaaaaggatttcaaataacccttttgaggtttgtggaaaaacccaaattcaaggggcaatttgggctaggctaaaggacaggaatacaaggactggggtgggcaaggaactgctctattttaataaagcatttggaaggatttttaatatggttaggcaaactttaaaaatcttaaaaaaaccacccttttaatttcttttttaaacttaagaataagtttgataaacacaaaagacctcaaatagatcaacaggttaagaagtgtaaaaaacaacaacgaaaaaaaaccccaaatcatggagaaggattcattaatgggtattgtcactggaagtgatcaaaggaactaaaaatttcttcagttatcaccttacttttgggtcaaaaaaaccccaggggaacatttgggcgagcatttcaagttttttaaggattcttagggaggggatgggagttttcaaaaacataatacaacttgtaggattaaattcttgccaaatttgatttcttaaccaaggaaaaaaaaaaaaaaaacaaaccacaaccggcgaacatcccttagtccctaggtattgtgctccctaccttctacaggagcggacagcggacagtcagcacctgacgtgggggcacctgctggctgcaggcttgctggcctgcagagaaggccactcctggctttccctgtgacacacagaagacacttgtcttttcctggtcaatctgtacttgtgcagggtgcgcaatccttcagtcctttctcatagaaagctggtttcctccacgagccaccaggttcttccttccacggaaatgtcagggtagtgggacctggaagctgcattttccaccatagcagttggtctggaccagccacagcctggctgtctgggccggtctgctggcttgggaataaaataatgccggggcgtccccagtagagaagctcaacaatgcaggtatgtgtcctcaacttatctagacatttggattctaaggatactggtaagaagagtatatgctgtaaaaattaagatgaaaaatacccaaatacaaaagaacattatattggctaatttcagatccggaagttccatttctgctttagccacagcctcctttctattagtctatgtgatgaacaagatgtggctactagttcagcccctccatattagctctgctaattctaaatgaatggcacagatattaatacgaaggacactgttattttaagtctgttagttgtggaagagatgtgcgttaatgcaattggtgctaaattcagggcagtccaatttttcccaataaggtttcactttctcagtctggggactaaccttggggaggagccagcctctcctgaaatccctccttctgtttccttatgtagccaacatgatctgattaattctcaatcagatgagcaaaagccacttgaagaaagatgagaatctttgccacatccttgtggtcacagtaatatactgtacgagtgcacatgatcagtaatttagggactgtgccctggaatgaggcctgttcttgagtctcatataaaaacagaccactgttaggcatgagggctgcccccctctttgctcctagggtccgctaggatttgtgctatggtaggagaaatgacatagaaaatgacaacaaaaaaaaaaggcacgaaatattcaaaacgtgggaggagtctaccaggccacccagtcacacataatcctccttgttttttgctctgttcaagagtcatcatcatgcaaaggtgcctaaaaaacaagactggccaaactccaagcctggccttgattgtagcagtaatggatgggcaagcccatcatcacaccagtgtgatttccacatcttcaatcttctctgctggccttcggtgattctgtgtaggtggagggggagctgcccggacaggtcgcagtttgccatatgaggtctcaggagtatgccttgatgcctgtgagaatcctggtgactcagcatgaaggcttttttcgtttgctgaaggagaccggggaaagtacagggagctcctcttatctgggctggggtaggggctgctgggaggctggtcgtacaacggcagtggaggcagggaggcgtgtggcttgggggaaggagagatctgaatctctctcatccatggagtgtcaccattttctgaggctgaaagttcttccactagcaccgatgggaaaactccaatacgcccattgaattccccttcccagaagccatcatcatcttggttttctttgttcaagatacggattattgctccctcaggaaaagataactcatcatctgtctggccctcataatcataaagtgctttcacaaaacatacactggcatctccgttgaggctgcctgaaacgagttctgcttccgtggaattgctggacgtgtgtgaccgactgtccaaagcggccagggactgcagcatgctcaggaggctgttcgaggtgggaaactgtaggtacttttctggcacataacccacttggccaactttatttcgagcctttacccagtcttccatatctccatcttcaatcacttctaacacctcatgttcctcaatggtcaactcatctggttgagaagccttgtaggaataaacaactttgcaggtgagtggataatttcttaaggtgccagaagggctggaactgctgtcatcgaaaacatccatgttatcttcaaactcttcgccttcttctctttcggtatctgcattaagcgagtgtaaagtgccattactggtcactgcaggagggcgggcccatcgctcattttccagttcttccattacttggttcatggcactctttagccatgtgtccacagaaacaccaatctgctttagcaggtccaaccgggcttcagctttcaatttaattatctctgctttacgaatattttctctagcttcatctattttctgttctagctctgctcggctttgttctgatacagcagctccatgacactccagatcatttagaacccgttgttggtgaacaatgtttttatgctcacgtgccacacgtgtggcccattttcgagcttccttatttagactgtgctcctctgtggtcccagtttctgattctaactgtcggctagtatcactgtcacaaggctggaactggaagggctggggtttgtgaaatacagcgttttcttgcaaaaacagctgaagattgtagtcccggaccaccttgctggagttttctaataaaaactggaatgtgttctgcacagcttggcatgtttctagctcagtccggctgaaggctattaaataatccttgagatgatcatacacatttccatcaagagccttcataatgttaactaaatctgtttgatagtagcgatcctgatgtgcatttgctgccgctagggtaagaagataatcattccttgcgtgggtagctttggaattacactcagatcgccgggcttttaactttacacttgccttctgtaaactgattcttgattgaaaaagactaagtttagattttgcctcgatgtcagctttctctcgtactgcatgagccatctgttcagtctcaaagtatttctttttgcctttagctaaatctttcactgtctcttgtaattcagtttggatctttgtcaactggtccacacacctttttagttgctgttcttttaagcttctcactgtccttgcaggctcagaaatgaagtttttatagttttcacatatattcatccgagactgggctacctgcattgttccctcgagaaaagatttccaaacgggatacatgctcctgtaatcattccgatcatcagcttttactccaggccaatctctcttcaggtattgactagccaacttctgcataccctgtgcatactctctttcaatagcagccttcttctgactgaatgtccttcctcggcggcggctgcatgatgctgaagggacatcaatcctccccgacggcagcgttagcaaggaccaggaggaggaggagggccggagaggaggggacggcccagcgagcgcgcgcgtgtgtgaaaggagcgcttaagaagcaagacttgccccggagggagcaggccagcgggcggcaggcggac

SEQ ID NO: 5987 - DNA, 1980 bp, Homo sapiens
  SIMILAR (96)..(956): 551254mologous to Homo sapiens fanconi anemia protein E,accession number AF265210,Smith-Waterman Score=654.
gttcccctcagcctctgagctgaggccccacaccagagtagggggcggcgcggcacccgtgccccggcatggcgacaccggacgcggggctccctggggctgagggcgtggagccggcgccctgggcgcagctggaggcccccgcccgcctcctgctgcaggcgctgcaggcggggcctgagggggcgcggcgcggcctgggggtgctccgggcgctgggcagccgcggctgggagcccttcgactggtctgcccagtctgccttgtgctcccttcagccaaacacttaactgcttgctctccctctgctacccaggaaaccactgttgctgcgattgccccggatatgccagaggaacctgatgtccctgctgatggccgttcggccatcgctgccggaaagtgggctcctctctgtgctgcagattgcccagcgccagagacagctccaaagtctatgtagggggctgggcctggggggcaggaggttgaaatccccccaggctccagaccctgaagaagaggagaacagggactcccagcagcctgggaaacgcagaaaggactcagaggaagaggctgccagtcctgaggggaagagggtccccaaaagattacggtgttgggaagaggaagaagatcatgagaaggagagacccgaacataagtcactggaatccctggcagatggaggaagtgcatctcctattaaggaccagcctgtcatggcagttaagactggcggaaggggtggcttcagtgacttgtcactgagggctctgccagccctaacatgagatttgtctccccaggttgagacagcctagcagaggcagagtgcatgtcccggtgtcctctctccccccgcactctgtaagcagatggacttgctgtgtgcccagctgcagctccctcagctctcagacctcggtctcctgcggctctgcacctggctgccctgtaacaggctgggcattctgttaccgcctccctgctttctgctgtcttctgccatttccccccagacttccccttctgctgtcctctacccaggtcctgctcaaagcagcagatagatactcaggcttgggtgggaggccaggcatttttcactagggcctctgctttgcaccaggactggctgaatgaagagcccaagcctttcttgtgattactgctccatctcccaatgtgtgcaggtggagatgacccctgagaagttcagtgtcttaatggagaagctctgtaaaaaggggccgctctacttggtgtccggaatctacgggggagtccgccgtgggccgcccgcccgtctcgaagcctagacctcggaggcttccaggcagtccgagcgtgtggactccgcggccctgagcgccctgtcgcttctctcccgcagcagcaaatgccgaccctggggcacggcgcgggtggcgagggccggcgggtgcttaacccccctcctctctcgaaggttcctggagacgagacccttcaccggcccttgggacccagggctaggcgtaacctgttggtgctgtcccccaaaacgcaggcttaagtccactccccgccctaagttctctgtgtgtgtcctgggggaccagcagcactgtgacgaggctaaggccgtggatgccacatttgaggtgtgccttggtgaccaggttctaagcaatgccaatggcttcctctctctatcagccaagaagtatgatgcgtttttggcctcagagtctctgatcaagcagattccacgaatcctcggcccaggtttaaataaggcaggaaagttcccttccctgctcagggaggaaggacaggccatctgctattcgtccaccaacctgacttgatcctctcttccctcctcccaggtgttatgtctggctgtagctgttggtcacgtgaagatgacagacgatgagcttgtgtataacattcacctggctgtcaacttcttggtgtcattgctcaaga

SEQ ID NO: 5988 - DNA, 2888 bp, Homo sapiens
  SIMILAR (1051)..(944): 581254mologous to Homo sapiens glycosylphosphatidylinositol anchor attachment 1 (GPAA1),accession number AB002135,Smith- Waterman Score=94.
cgcggcgtgagaagccatgagcagcaaagtctctcgcgacaccctgtacgaggcggtgcgggaagtcctgcacgggacccagcgcaagcgccgcaagttccttggagacggtggagttgcagatcagcttgaagaactatgatccccaggaaggacaagcgctttctcgggcacccgtcaggcttaagtcccactcccccgccctaagtttctctgtgtgtgtcctgggggacccgccagcacttgtgacggaggctaaggcccgtggatatccccccacatggacatcggaggcgcttgaaaaaacctcaaccaagaataaaaaactggtccaaaaaagctggccaaagaaagtatgatgccgtttttggccctcagagtctcttgatcaagcagattcccacgaatccctcgggccccaggtttaaataaggcagggaaagtttcctttccctgctcacacacaacgaaaacatggtgggccaaagtggatgaggtgaaggtccccaatcaagtttccaaatgaaaaaggtgttatgtctggctgtagctgttggtcacgtgaaaatgaccgacgatgagcttgtgtttaacattcacctggcctgtcaacttcttgggtgtcattgctcaaagaaaaactggcagaaatgttccggggccttatattatcaagaggcacccatggggcaaagccccaagcgcctatattaaggcacatttgaataaattctattaccagttaaaaaaaaaaaaaaaaaagttggcggccgccaacttttttttttttttttttttttttttttttttttttttttttttttttttttttgctgaaacagacactcatttatttccccagaaggaggcaaaatggggtccttggggagtctctgtcccagcccggacaggcagatctcacttccagaagagcacattccagaaaagcagccagcaggggtagaggcccagggacagcagtgggaagagcagggcggccgtaggtgtggtgctccagcacaccctgggctagcgctgccaggaagagcttgccagccctcggccagtgacagtggcgcctcctgcagctcccgccacaggaacaggctgccaaggagcgtggctgccgggctggtcaccaccagcagggcaacataaagggtccggggcccatgaggcttggcaagcgcaacagtgggcaccatggtggtggccagcaggaagcccagtgagaagttggtgagggcgatgcagcccacctgcagtgctaggtagatcagggctaccaggctcagtgccatccagcccctgtctgggggcctgtgtgcttacccaccccgtgggtattgtggggcagggccaggccagctgcataaatcgccagcagtgtcagcaccacagcctcaggcctctgcaactgggaagtgctgggtggcaacgtgttggcccagcactggcaggacatagagggccagtcccatggcctgtgagatcagcagaggtgccacgagcgaggccagccccacaccctgtgatggggggaaggggtacactggggccaggggcacccccgggctcctcaaggcccattccagcctcatgcagctgcatccacagttccagagccttgagaccaaggaccaggagcaagaagccgacagcgggcatgtagaggccgatggagacaaagcgggagaggccggggagcaagtaaaggaagaaggactggtgcaggcgctccaggaggtggttgagcttgcggaacatgccctccaaagccttgcccactgccaccaggtcatacttgtactggcggaagctattgatgccacgcagggttagggcctccacacggtagcgcaggaagaggccatgggagccgtgggggcggccggaggcctgccgcagaaccatgagcagcagtgtctgcaggccctgcagcggtccatccaatgatgtccagtcctcgggctgcagcttgccctgaagcgtgcacaacaggccccctttctggcagaaggtctggaagagattgagcaggtcaaggttgggcagctgcccgttaagcccctccacggccacatcgaggctggtgaccacatcactgctcagctccagggccacggctgcctgaatggccccagctcggccctgcaggggagacgactgcatgccagtgacattgacatcgtggtaggcttcaagccaagcctcagtgcccagaaggtcatgttctgttaccaggaagacgatatctttggcccaataaatctgcccccggaagtgggcagccagtgccagcagcagccccacagcctggctgttggtagagtcagagccacagggcacggtgagcacaagcgactcggtgctggcagcacgcggggcccgcaggatgccgtacacgttggtgcccgcattccatatagcgctcgtgggtctcatctgggaagggcagtttccgggagaaactctgcgtgtagacctccagccctactgaccgcatcgtccgttcaagccaggccactggcagagcccccgacttcttgcggtgggcggcgaagtcccgggcaaaagcccgggcacggtctccgcccgcaaactgctcctcccccatggtggagcccatggcgttctccgacatgtaagtgcgctgggtcagcggcgggaaaaccagcgccaagaaccaggcggatgcccgcctacgtagctcagcacgcacaacggcgcgttgaggcgcagcactaggcgggcgagcgcgcgccggcgaaccgggtccgacaggaggcccatggcggggcagggcggcgcggctacggaccctctcccgcctccaactaccgccgcggtgcccacaggctgctcctgtcagacccggggacccgcgc

SEQ ID NO: 5989 - DNA, 438 bp, Homo sapiens
cccacgcgtacgcggacgcgtgggggcgtttcccacttacgggacagatctggaagcatctttgctaagttttgaaaaacttgaccgtgcctcaccatatctttggccagaacaattaccaggtgttgctgaatttgcagcttccttcaaaagtcctattactagttctccacccaaatggatggctgagatagaacgtgatgacatcgacatgttgaaagccacagagatgacacgggggaaattcctcaatattctagagaagcccaagaagtagcagctgcttgcggacaggatgtcctggggtccgaaaccaagctcccttcccggtgcacctctaacaatgcacacctcactgcttgcttgggagaggccagagggtgtacctccaggactgccctctcccctgctcctgggactctacacgtctgaggacat

SEQ ID NO: 5990 - DNA, 843 bp, Homo sapiens
  SIMILAR (31)..(333): 361254mologous to Drosophila melanogaster CG15929 gene product,accession number AE003435,Smith-Waterman Score=182.
atggcgtctcccacagacgggacagatctggaagcatctttgctaagttttgaaaaacttgaccgtgcctcaccagatctttggccagaacaattaccaggtgttgctgaatttgcagcttccttcaaaagtcctattactagttctccacccaaatggatggctgagatagaacgtgatgacatcgacatgttgaaagaactggggagtctcaccacggctaatttgatggagaaggttcgaggcctacagaacctagcctatcagctggggctggatgagtccagagagatgacacgggggaaattcctcaatattctagagaagcccaagaagtagcagctgcttgcggacaggatgtcctggggtccgaaaccaagctcccttcccggtgcacctctaacaatgcacacctcactgcttgcttgggagaggccagagggtgtacctccaggactgccctctcccctgctcctggcactctacacgtctgaggacattcagcagcaagagaagaatctgctctacccaaggatcattgcagttactcaatcaactttcagacttgaaccttcttagcctcggatattggtaacagctgagggcatatcattcttaaaggtcgaagtcctgctttctcatttctggaagtgattcaggagccccaggatcttacggttgatttgactcagtcatggcagtcagttgtgacatgttgattggatgggttcttttgaattgttcttgatctcttagaaagtgtttacgatgtgaggagaccagagaccaagtagattctggaccagaccatgcagcctgacctgtgaactctccagtatatac

SEQ ID NO: 5991 - DNA, 1057 bp, Homo sapiens; identical to SEQ ID NO: 2029
  SIMILAR (1)..(693): 1001254mologous to Homo sapiens FLAME-1,accession number AF009616,Smith-Waterman Score=1158.

SEQ ID NO: 5992 - DNA, 423 bp, Homo sapiens
  SIMILAR (141)..(329): 361254mologous to Drosophila melanogaster out at first,accession number L31349,Smith-Waterman Score=150.
aaattcggtttcatattctacttaacaatttaaataaactgagatatttctaactgaaaggagcaaggagagagacaaaaaagagataaaagctatgaccaaagaactaaaaaaaaagcggaactgcctaaaatgcaaagcaggtgggggaccgcgggaagccctgcgtctgccactatggcctgagcctggcctgggacccctgcatgctcaagtactgccacagccgcgaccggcccacgccctacaagtgtggcatccgcagctgccataagagctacagcttcgacttctacgtgccccaaaggcagctgtgtgtctgggatgaggatccctacccaggctagggtgggagcaacctggcggggggctgctctgggcccactgctcttcaccagccactagaggggggggcagcccccc

SEQ ID NO: 5993 - DNA, 380 bp, Homo sapiens; identical to SEQ ID NO: 5591
  SIMILAR (30)..(92): 901254mologous to Homo sapiens ryudocan core protein precursor,accession number D13292,Smith-Waterman Score=89.

SEQ ID NO: 5994 - DNA, 313 bp, Homo sapiens; identical to SEQ ID NO: 5592
  misc_feature (1)...(313): n = a,t,c or g

SEQ ID NO: 5995 - DNA, 310 bp, Homo sapiens; identical to SEQ ID NO: 5593

SEQ ID NO: 5996 - DNA, 422 bp, Homo sapiens; identical to SEQ ID NO: 5595
  misc_feature (1)...(422): n = a,t,c or g

SEQ ID NO: 5997 - DNA, 2721 bp, Homo sapiens
  SIMILAR (2678)..(2085): 1001254mologous to Homo sapiens ryudocan core protein precursor,accession number D13292,Smith-Waterman Score=1002.
ctttttttttttttttttttagaaagtaccaggttttattatctttttatcaaaaaaaaatcagtaactagacaacaggtgtgagaggtgccttacagagggagggtggctcacttcccacacagccccaaggggaaagggcacttgggggcagaagaaggaaccagccagcttgggacccttgggttgcagtggtgacggggagcttaatggcccactggtgcaagcaagggaggggtggttccccttcaccgcagccactggggtcaggaggaagacacgaacctggccaggctaaagccaccaaggcctccccctctcaggagagggagacaagggtcgtcccagacaacagggccccagctggcgttccaaatcaagccctccccccattctacctacatcctacccagggggagacaagggggtcgtccccaagcacaagcttgaggctgtgaactcggttagagccagatctagtgtctctaggaataagtgctggtccaacagaatggacattgctctccgctgtccagttacagtagcccatgaactcacatacagtgacgccctctagaaaacgtggttaagtgcaactggaggagggaatgtgtaatcttaatgtgattttaattggcttaactttaaaccagccgcatgtggttacttgtattggatagcacagccctagagccctgaagatagcaaaccaaagaacacccagctgggtccccaaacagaaggcagaaggggtagaacccatccaccttaactttttccagccccatcagaaggccccaggaacagggcaaggagaaaaaggcaaaaacccacccagcccacatgaaaattcactcactcaaccacccagcaacatcaaactggaaacaccacacttatttcctgaaaaaaatatatttatctatttttctagaaccaaggaagaataataatatattataagaagcacagacacaaatatcccaccatccccttcattatattttgggatctgctaaaaaaaaactatgtttcggcaaaagctattttataagaggaagcagcttcagaaatggccaaggccatgaggagcgggggtttaaagtataaaaaaaaaaaactggggaaggggtttaatgaaaaagagcaaaaaaaaaaaaggggaaagggggccccctttaaaggtttggatagtgaaaaaaaaaaaaaaaaaaaaaaagaattaataaaaatcatctctccggctcttctctcattttcaagaaacaaacaaaaacaaaaacaaaaaccattaaatacaaacttagcaggtgctgtggaaatgtgcgagagaatgaagacacctcggcacctccacactcttgcccaggcagagatatacactctgcacaaaggaatgaacagttaaaaaaacgaacaaacactaaaaatagatttacaaaatttctattaatcccattccagcatagtctctaagctcttttcaccatcctcccccccaaataaaaaaggttggtttccaaaggtcacttgacagagcctagaatggccccaggtatataccacagagattaccgtaggtgtggtcccaagtacccatttacagaaacatctcaaggtgcaggtggttctagttccttcccccatttcctggcagagagaccggctgtgaaaggaagggaggaaggccactgggggaggacctccagccaggactccacacaacatccgttagccccctggcttcagaggagctctggatgaggcatggtcagtatgggcttgagggcggacctagattcttaactggaagtttaagaagtgatccaatcccagtcttgccttcagaaaggccaagttgaaatcatttttactgacaggggaactgagggccaaagctcaagaagaacctggcagaacagtagaagacaatgtctcttctgaacacttcaaaggtaatcagagctggagatactgacaagtcagtattaggttgacctcaccctaccctaatgtccacccttcaaaatcccctggcttccctccccgctaaagtccaagccagtgcccacaagcaagcttcacgcgtagaactcattggtgggggctttcttgtagatgggtttcttgcccaggtcatagctgccttcatccttcttcttcatacggtacatgagcagtaggatcaggaagacggcaaagaggatgcccacgatgccacccacaatcagagctgccaggacctccgttctctcaaagatgttgctgccctgcacagtgctggacattgacaccttgttggacacatcctcactctcttcaacgggtgagattctcttggggataacctcattctcctctagtttcttgggttcggtggggacttggctcccagaccctgccctctcagggatatggttatctagaggcaccaagggatggacaacttcagggccgatcatggagtcttccaagtcatccagatctccagagccagacagctcaaagtcatcagattcctgcccgggccccactacatcctcatcgtctggtagggctccggagaagtatcggccttctaggaggtcctgggggtcgatgacctcagtctctcggatcgactcggcgactccgcctacgaagaacagcagcagcgcgaacagacgggcgggggccatggcaccgcggactggagaaggcgcgcaggctgcggcgagtggc

SEQ ID NO: 5998 - DNA, 405 bp, Homo sapiens
cgcgtccggacatcgggaggttcaagattcttatgaagcttatggccaggacgactggaatgggaccataacgtcgctgaaggccctcctgctaggccagtgaagggagcatacagagagcacccatatggacgttattaaaaacaaacatgaggggaaaatatcagttatgagcaaagttgttactgatttcttgtatctcccaggattcctgttgctttacccaccttattccattcttaactctgcattctggcttctgtatgtagtattttaaaatgagttaaaatagatttaggaatattgaattaattttttaagtgtgtagatgcttttttctttgttgtttaaatataaacagaagtgtaccttttataataaaaaaaggaggtggagtaaaaaaaa

SEQ ID NO: 5999 - DNA, 1215 bp, Homo sapiens
  SIMILAR (1)..(1212): 1001254mologous to Homo sapiens Sam68deltaKH,accession number U78971,Smith-Waterman Score=2181.
atgcagcgccgggacgaccccgccgcgcgcatgagccggtcttcgggccgtagcggctccatggacccctccggtgcccacccctcggtgcgtcagacgccgtctcggcagccgccgctgcctcaccggtcccggggaggcggagggggatcccgcgggggcgcccgggcctcgcccgccacgcagccgccaccgctgctgccgccctcggccacgggtcccgacgcgacagtgggcgggccagcgccgaccccgctgctgcccccctcggccacagcctcggtcaagatggagccagagaacaagtacctgcccgaactcatggccgagaaggactcgctcgacccgtccttcactcacgccatgcagctgctgacggcagaaattgagaagattcagaaaggagactcaaaaaaggatgatgaggagaattacttggatttattttctcataagaacatgaaactgaaagagcgagtgctgatacctgtcaagcagtatcccaaggaggaagagctgcgcaaaggtggagaccccaaatatgcccacttgaatatggatctgcatgtcttcattgaagtctttggacccccatgtgaggcttatgctcttatggcccatgccatggaggaagtcaagaaatttctagtaccggatatgatggatgatatctgtcaggagcaatttctagagctgtcctacttgaatggagtacctgaaccctctcgtggacgtggggtgccagtgagaggccggggagctgcacctcctccaccacctgttcccaggggccgtggtgttggaccacctcggggggctttggtacgtggtacaccagtaaggggagccatcaccagaggtgccactgtgactcgaggcgtgccacccccacctactgtgaggggtgctccagcaccaagagcacggacagcgggcatccagaggatacctttgcctccacctcctgcaccagaaacatatgaagaatatggatatgatgatacatacgcagaacaaagttacgaaggctacgaaggctattacagccagagtcaaggggactcagaatattatgactatggacatggggaggttcaagattcttatgaagcttatggccaggacgactggaatgggaccaggccgtcgctgaaggcccctcctgctaggccagtgaagggagcatacagagagcacccatatggacgttattaa

SEQ ID NO: 6000 - DNA, 1009 bp, Homo sapiens
  SIMILAR (3)..(146): 971254mologous to Homo sapiens Sam68deltaKH,accession number U78971,Smith-Waterman Score=276.
aatattatgactatggacatggggaggttcaagattcttatgaagcttatggccaggacgactggaatgggaccaggccgtccctgaaagcccctcctgctaggccagcgaagggagcatacagagagcacccatatggacgttattaaaaacaaacatgaggggaaaatatcagttatgagcaaagttgttactgatttcttgtatctcccaggattcctgttgctttacccacaacagacaagtgactgaaaactcctgaggcatttcctggactagaatgggtagtgaagacccatgtcagctatcagaggactcctgaaacctggagagctacctgctgtataaaggctggcctgagggcatttgctgaacacagagaaacccaggagaggagatcagcagttttctttcactctacttggatctgtcagatttacccacagaaagcccagtccagggatcccttaagagtctttaggcccagaatggagtccctcaaggcttcagggggactgtggtgctaacaattaaactgttcaagactttaaagagttgaaggggactaatgggtatccctagcatggcctcctagatgggaattaactggcaactccttactgtgcccattcccagaatgtgtgcttccctttagcctcccatagaattggctgaaacaccctaccaaccgttttctgtttccccactaccacacctgtgttatgggtgtcagcctgtgagtccttgaacccttccagagggctcccaagggagggtgatcactgcccttccataaaaggctgaggaaagccaagtgagaagattccattaatttgggcagagttatttaacatctgaacctgtttttctcttcattgtttattacttaccttgtccaaaaaggtcataaagggtagggctttttctgttccacctctgtactatatttctccccaacaaatatctgcccctgaggacctcaataaaggtttggtcaagtgaaaaaaaa

SEQ ID NO: 6001 - DNA, 2726 bp, Homo sapiens
  SIMILAR (107)..(1435): 831254mologous to Homo sapiens p62,accession number M88108,Smith-Waterman Score=1893.
ggcttcggtcgctaccgctcccgctctgccacccccgccaaccgccgctcgggcctccgtcgctgccgcgtcgctttctcgctccttggatcgcacatcctcccagatgcagcgccgggacgaccccgccgcgcgcatgagccggtcttcgggccgtagcggctccatggacccctccggtgcccacccctcggtgcgtcagacgccgtctcggcagccgccgctgcctcaccggtcccggggaggcggagggggatcccgcgggggcgcccgggcctcgcccgccacgcagccgccaccgctgctgccgccctcggccacgggtcccgacgcgacagtgggcgggccagcgccgaccccgctgctgcccccctcggccacagcctcggtcaagatggagccagagaacaagtacctgcccgaactcatggccgagaaggactcgctcgacccgtccttcactcacgccatgcagctgctgacggcagaaattgagaagattcagaaaggagactcaaaaaaggatgatgaggagaattacttggatttattttctcataagaacatgaaactgaaagagcgagtgctgatacctgtcaagcagtatcccaagttcaattttgtggggaagattcttggaccacaagggaatacaatcaaaagactgcaggaagagactggtgcaaagatctctgtattgggaaagggctcaatgagagacaaagccaaggaggaagagctgcgcaaaggtggagaccccaaatatgcccacttgaatatggatctgcatgtcttcattgaagtctttggacccccatgtgaggcttatgctcttatggcccatgccatggaggaagtcaagaaatttctagtaccggatatgatggatgatatctgtcaggagcaatttctagagctgtcctacttgaatggagtacctgaaccctctcgtggacgtggggtgccagtgagaggccggggagctgcacctcctccaccacctgttcccacgggcacgtggtgtgggaccacctcggggggctttggtgcgtggtacaccagtaaggggagccatcaccagaggtgccactgtgactcgaggcgtgccacccccacctactgtgaggggtgctttttgttgtaagagcacggacagcggggcatccagaggatacctttgcctccacctcctgcaccagaaacatatgaagaatatggatatgaggatacatacgcagaacaaagttacgaaggctacgaaggctattacagccagagtcaaggggactcagaatattatgactatggacatggggagggttcaaagattcttatgaagctttatggcccaggacgaactggaaatgggaccaggcccgtcgctgaaggcccctcttgctaggccagtgaagggaggcatacagagagcccccatatggacggttattaaaaaccaaacatgagggggaaaatatcagttatgagcaaagtttgttacttgatttcttgtatctcccagggattcctgttgctttacccacaacagaccaaggtaattggtctaagtgttttttcttccgtgggtccccttccttctccccaaccttaattccatttctttaactctggcattctgggcttctgtatgttagtattttaaaaatgagtttaaaataggattttagggattatttgaattaaatttttttaagtgtgtagatgcctttttcctttggtggtttaaatattaacagaagtgtaccttttataataaaaaaaagaagttgagtaaaaaacaaaaccccccaaacctgttagtttcaaaaatgacattgcttgcttaaaggttctgaagtaaaggcttgttaaggttctctaagttttgatttgaggcatcccgtaaagttgtagttgcagaatcccaaactaggctacatttcaaaattcagggctgtttaagatttaaaatcacaaacattaacggcagtaggcaccaccatgtaaaagtgagctcagacgtctctaaaaaatgtttcctttataaaagcacatggcggttgaatcttaaggttaaattttaatatgaaagatcctcatgaattaaatagttgatgcaatttttaacgttaattgatataaaaaaaaaaacaacaaaattaggcttgtaaaactgactttttcattacgtgggttttgaaatctagccccagacatactgtgttgagagatacttagagggagggagtaggttttgaagaggttgatggtggtggggagggaaggcctcctgaattgagtttgatgcagagctttttagccatgaagaatctttcagtcatagtactaataattaaattttcagtatttaaaaagacaaagtattttgtccatttgagattctgcactccatgaaaagttcacttggacgctggggccaaaagctgttgattttcttaagttgacggttgtcaatatatcgaactgttcccaagttagtcaagtatgtctcaacactagcatgatataaaaagggacactgcagctgaatgaaaaaggaatcaaaatccactttgtacataagttaaagtcctaattggatttgtaccgtcctcccattttgttctcggaagattaaatgctacatgtgtaagtctgcctaaataggtagcttaaacttatgtcaaaatgtctgcagcagtttgtcaataaagtttagtcctttttta

SEQ ID NO: 6002 - DNA, 1124 bp, Homo sapiens
ttaagcaatactgcccttggacccaggcactgggggtcctgttgtgggccctgatttagaagggccttgctccggctcttcttgggctgtgcccttccacagtgagtgccggctattggacttttgtccagtgacagctgagacaacaaggaccacgggaggaggtgtaggagagaagcgccggacacagcgatcgcccagcaccaagtccgcttccaggctttcggtttctttgcctccatcttgggtgcgccttcccggcgtctgactcagttttgtaggttccttatctcggttgtttaccgcgggctttgcggaatgcccccgcttccgtttccgcccggctccgaacccccgaaccccttctacccgcaactccgccccggattcccagaaaggggcgacctgggccacagcggtacaagctgcaccccgatggacctgagagaccggaagtaacccttggccaactctggccgccccctgcagccgcagccccagaggcccacccgcgagcttcagtggcgggccctcagcgtcgtgtaaactttgcttaaaatgatcttgagagttcaattcttggggtgaactgttgagaagatctggcatttttcctttcgaaagttgttgggaacgtggactttcccaacaattgtgtatgcgctcgatctcactcagtgggagccgccgccctgttgatgcttttgactttctgtccttgttcctcgtcccatctggagcatttccaattctggttttgcggagcagcaggtctgagcttgtccggcgagggtgggagttggtcccggcggagatccagtgggaagagccggcggctgcccgggcgtgagtagaccgagaatcctgcccgatccccgcccctgggctggtgtcgccctgggctcctgggacgtcggggcactgtcccccgatactggcagaaaaggattgagtcctcgcttttggccctaggtctccttgagcctccagaggactcacaacactccggggcatgttgctctttcaaataccaggaatggactctggggaatggggcacccttgaagtctgattatttcttccctgtagagccccaggggctaattaaactcgtgtttatggaa

SEQ ID NO: 6003 - DNA, 2085 bp, Homo sapiens
  misc_feature (1)...(2085): n = a,t,c or g
cgaggtttttttttttttttttttttttttttttttttttttttttttttttcagcagaaatcacaaatttattaactcttaaatatatcaatcagtcctttaccattatggcaagaaatatatacagtgtcccatggtaaactgcagtgtttcaaaatgatagaagataataaatgtgtaattcatttgtggtggagagaacaaatcacaatttcctcacatcttagtgcggaagacaaacttgatctacagtaatacttcaacaccacatgctaagttaaaagtgtaaaaaaaacactctacatctattttttttttctttaaatacatgtatgccacggtatagctggcttcacaaaagggtaaaagaaattaaaaagagaaaaatgaggccattattttttcacagatactcatttggcaggttaacatggctcaatatatttactgtatatatttattttaaatatatatgttgttttaaattgtgtaataattatcagaaaagcttcaacccatctaccatacatccactagcaataatatcctaagatgattagtattcaacacagagaggtgagatgagagaaaagaggaagggttgtttttgttattttgtttttcttttttgcttctgctttaaaaataggcttctgaggacttgtgaatttactatcgttaaaataacaatgatggagattccatgcactgtaaagcactttcagggaagagaacaaaaatcacaggaattgaatcaacaaaggaaaaatgagaagccacaaagaaaacctaggacatttccctttttgttttaaaactggggaaattctaactccttggggggaagacaatgatactctgattcaagagagaagcctaaaaaagcaccaagtcaccaaggttccaggttccaaaacacttatgagaatggcaaacatttgtaagcctcttctacccctagaaaactaggctagtgatgatgcagaagtgaccctttcattccccaagggcggaaggtgaagtgccgtttggccataaaaacccccctcctgcctatccaagttgggtatcccnccctggcaactgtccccaatcaagtaagacgttgccagtccacaggaggaacttgccttttatccctaactttaaacaatggcaaataccccccaacatagttaggataccctaagtcccaaactagagcttaagcagaattataaacctttaaaatcttgacaacatttttgggggcccttgaagatgatcaaaagtgctagtatagctaccttcaaaagacttttatttccccttttacattcattatgcaaatttcacttctattcttttctcacacactactagccagcctccccaaaaaaggaaaagggaaaaaagtaagaaaagaatggaacaaaagaaaaataagaaagcaaacggaaaggaacaaagaaacagggataaagaaaaggagatcacagatttgagaaagaaaaacaattcaattcagcaaattcaccaaaacaatgtgaatatatcctaaagtgattaaactcagaaatgatgtgaatttttccagtttacacagtttgaccaaaatacagcatggctttatgtggtagcaaaccaactgattcttgcttctactttcataagtgattttgcccacatatcatcccactttaattgttaatcagcaaaactttcaatgaaaaatcatccattttaaccaggatcacaccaggaaactgaaggtgtattttttttttaccttaaaaaaaaaaaaaaaaaaccaaacaaaccaaaacagattaacagcaaagagttctaaaaaatttacatttctcttacaactgtcattcagagaacaatagttcttaagtctgttaaatcttggcattaacagagaaacttgatgaagagttgtacttggaatattgtggatttttttttttgtctaatctccccctattgttttgccaacagtaatttaagtttgtgtggaacatccccgtagttgaagtgtaaacaatgtataggaaggaatatatgataagatgatgcatcacatatgcattacatgtagg

SEQ ID NO: 6004 - DNA, 863 bp, Homo sapiens
  SIMILAR (4)..(270): 441254mologous to Plasmodium vivax pva1,accession number X92485,Smith-Waterman Score=173.
tgttttctttgagatagggttttgctctgtcacccaggctggagtgcagtggcccacaatcacagctcactgcaaccttgaacccctgggatcaaacaattctcttgcctcaggcttagagtagttaggactacaggtgcacatcaccatacctggcaatttttttttttttttaattatttttgtagaaagcagagtctcgctacggtgcccaggacaatttcaaattcctggcctcaagcaatcctcctgtcttggtctaaacatgttgagattacagggttttgagccaccatgcccagcctgaaaaacttttaagacaagacattaggaattcttaaagttttaaaaaggttgtcaaattattaaaacaatagcaaaagccaaaattaatactaacagctggtcatatatgattttatctgcctaattttactttgggacaatggcccagtggtttaaaagcctgcatagatacttctattctgcctcctttagtcactggtagggaggatatgttgtcatgtagataatttctaatttccttttaagaagaatccacactaataattaacctcttactctgccccatgtaaagacaagcattattcctaaaataatgaattatgcaattccttctacagattgatagacataatccatgtaaagacaagcattattcccaaaataatgagttacgcaattccttctatagattaatagatacaatctctgttctctgttagagtggattacccaatttcttagcatttacctttgaacatgtacctgtttgctaatttttggactcttagaaagtaaagatgttacttctcaaacagcatttatagaaattctaatat

SEQ ID NO: 6005 - DNA, 419 bp, Homo sapiens
  misc_feature (1)...(419): n = a,t,c or g
cggccgcgtcgacttttaacttttatttttattttgagataattgtagatttacatgcagttnnnnnnnnnnnnnnnnnnnnnnnnnnnnnnnnnnnnnnnnnnnnnnnnnnnnnnnnnnnnnnnnnnnnnnnnnnnnnnnnnnnnnnnnnnnnnnnnnnnnnnnnnnnnnnnnnnnnnnnnnnnnnnnnnnnnnnnnnnnnnnnnnnnnnnnnnnnnnnnnnnnnnnnnnnnnnnnnnnnnnnnnnnnnnnnnnnnnnnnnnnnnnnnnnnnnnnnnnnnnnnnnnnnnnnnnnnnnnnnnnnnnnnnnnnnnnnnnnnnnnnnnttttggtacaaaacctttttaaattggcctttttcattcagcataattctctggaattataagttgctgcctgtacccatagtttgttctttt

SEQ ID NO: 6006 - DNA, 599 bp, Homo sapiens
ttttttttttttgtgtttttttaacttctatttttattttgagataattgtgagatttacatgcagttgaaataatacagagattccatgtgcccttcacccaatttcccccagtggtaacatcttgcaaaactatagcacaatatcacaactgggatactgacatcgatagctgtgatatagaacatttccatcatcacaaggatccctcatgtttctcacagccacgcccaattctctcccatcctcaccccctccttaacacagccaccactaatctgttctccatttctataattatgtcacttcaagaacgttatataaatggaatctttttgggtacaaaaacctttttaaattggcttttttcatccagcataattctctgggaattataagttgctgcctgtacccatagtttgttcttttttattgctgagtagcactcacggtatgaatgtactatggtttgtgtaatcatttacccaatgaagaaaatctgggttgtttttggttattacacataaaattgcaataaacatcaatgtacatgtttttgtgtgaaaacatgcttataataatgtgaaactctatgccta

SEQ ID NO: 6007 - DNA, 3626 bp, Homo sapiens
  SIMILAR (1576)..(3177): 931254mologous to Homo sapiens CTCL tumor antigen se2- 2,accession number AF273044,Smith-Waterman Score=2478.
gagtacctattcaaaattttattaaaaaccagcaaattaattttaatctctagccataaaaacataagtaatagtaagctcctaagcttggacaaaggctggattctcttcactataactgagtggtaatttaaagacaacaatttaatgtcactaattttcaaaattaaatagtttaagctcaatttaattttgctagatatttaacaaaacatacggctcaacctcataacctatatgtgtgtatgtctacatctgtgtatatatcataggatttgagaatcttaacacatgtataaataagtatatataaactccaattttaaatcttaaaattgctgaatttaccctcatattctttaaaaaacttaaagcattatgaatgtagagaaattcaccagagctcactgcctatttgatggctgtaacaagtcttcaagtatatacttttataataagttgaaaatttcatataattttatttattaagaattccaatctaagtataaaggtacaaggtagtgagaaggaaatactacagttcggagaactgcttatttccaagtatatttaacttataaagttaataaatagttaaatgaaacaaagtttataggtgacctttagtaaatggggaaattaacaggactttcttcttcatcttcaaactcttcagaagcagcaacagggctagttaattcaactcccaattgttctgaaagtttttttaccttctcttctaagagaatattcttcttcacttcttccttgtaattatacttaagatcttcaatttcttcaaaaaatgaaggatcaaaattttccagttcttttttcagcttctttatttcctcctaatggaaacattatctttaaaagttgcatataggaaatatacatattttacgtttgaacaaggagatttaattgtaaatatgaaagccaaagtattcctgaatggtcaaatacagcaataaaggcagaagaattaagatttttctttgttccattgtacagtgtaaataactaagttgttaactgtcaagtccagttatgtattctgtaagttgtgttctagtctttgactaaaatttatcatctcttataatgggacttaatctttctctaaaagcatataagagcttgtcaatagagcaatcaatcaaaaagattttgtgattcataacattgaagttagtctggttaagagttttggtttagacttcatttatattttccttactaatatctaatatttaatgaataatgatcaattttttataaagttattaatatgatcagggaaacctttgggacttctgacaggcatctggtgaagagacaattcaagccttagtgactatttagaatagccagtgatcactagctaattctcatatccatgcctttttgtcctgtttacagtcttaaaagaggtaaaacagcaaatatttttttaagggaactataaccttaggattcctgaaaagaatttcaaaaaaaaaataaagacactgttgccaatgtgacccaaaacttaagaacatactaatggcatatatttgttacaattaaaaaataaatttactacttaatcctaaaaaaaaaaaaaaaaaaaaaaaaaaaaaaaaaaaaaaaaaaaaaaaaaaaaaaaaaaaaaaaaaaaaaaaaaaaaaaaaaaaaaaaaaaaaaaaggaggaagtagacctaaaacctatgaaagaaaagaatgctaaagaagaattaattaggtgggaagaaggtaaaaagtggcaagccaaaatagaaggaattcgaaacaagttaaaagagaaagagggggaagtctttactttaacaaagcagttgaatactttgaaggatctttttgccaaagccgataaagagaaacttactttgcagaggaaactaaaaacaactggcatgactgttgatcaggttttgggaatacgagctttggagtcagaaaaagaattggaagaattaaaaaagagaaatcttgacttagaaaatgatatattgtatatgagggcccaccaagctcttcctcgagattctgttgtagaagatttacatttacaaaatagatacctccaagaaaaacttcatgctttagaaaaacagttttcaaaggatacatattctaagccttcaatttcaggaatagagtcagatgatcattgtcagagagaacaggagcttcagaaggaaaacttgaagttgtcatctgaaaatattgaactgaaatttcagcttgaacaagcaaataaagatttgccaagattaaagaatcaagtcagagatttgaaggaaatgtgtgaatttcttaagaaagaaaaagcagaagttcagcggaaacttggccatgttagagggtctggtagaagtggaaagacaatcccagaactggaaaaaaccattggtttaatgaaaaaagtagttgaaaaagtccagagagaaaatgaacagttgaaaaaagcatcaggaatattgactagtgaaaaaatggctaatattgagcaggaaaatgaaaaattgaaggctgaattagaaaaacttaaagctcatcttgggcatcagttgagcatgcactatgaatccaagaccaaaggcacagaaaaaattattgctgaaaatgaaaggcttcgtaaagaacttaaaaaagaaactgatgctgcagagaaattacggatagcaaagaataatttagagatattaaatgagaagatgacagttcaactagaagagactggtaagagattgcagtttgcagaaagcagaggtccacagcttgaaggtgctgacagtaagagctggaaatccattgtggttacaagaatgtatgaaaccaagttaaaagaattggaaactgatattgccaaaaaaaatcaaagcattactgaccttaaacagcttgtaaaagaagcaacagagagagaacaaaaagttaacaaatacaatgaagaccttgaacaacagattaagattcttaaacatgttcctgaaggtgctgagacagagcaaggccttaaacgggagcttcaagttcttagattagctaatcatcagctggataaagagaaagcagaattaatccatcagatagaagctaacaaggaccaaagtggagctgaaagcaccatacctgatgctgatcaactaaaggaaaaaataaaagatctagagacacagctcaaaatgtcagatctagaaaagcagcatttgaaggaggaaataaagaagctgaaaaaagaactggaaaattttgatccttcattttttgaagaaattgaagatcttaagtataattacaaggaagaagtgaagaagaatattctcttagaagagaaggtaaaaaaactttcagaacaattgggagttgaattaactagccctgttgctgcttctgaagagtttgaagatgaagaagaaagtcctgttaatttccccatttactaaaggtcacctataaactttgtttcatttaactatttattaactttataagttaaatatacttggaaataagcagttctccgaactgtagtatttccttctcactaccttgtacctttatacttagattggaattcttaataaataaaattatatgaaattttcaactt

SEQ ID NO: 6008 - DNA, 963 bp, Homo sapiens
  SIMILAR (391)..(657): 791254mologous to Homo sapiens Human secreted protein encoded by gene 3 clone HNHCT15,accession number AAB38012,Smith-Waterman Score=360.
atgggcaaagacttcatgactaaaacaccaacaccaatggcaacaaaagccaaaattgacaaatgggatctaaataaactaaagagcttctgtacagcaaaagatactatcgtcagagtgaacaggcaacctatagaatgggagaaaatttttgcaatctatccatctgacaaacggctaatagccacaatctacaaggaacttaaacaaacttacaagaaaaaaataaacaacctcatcaaaaagcaaacagggtgtggagcagacctccagcaaactccagcagacctgcagcagacgggactgagtgttagaaagaaaactgataaacagaaaggaatagcatcaacatcaacaaaaaggacgtccacacagaaaccccatccaaagatcaccaacatgaagaccaaagaaatacaaactaccataaaagaatactatgaacacctctatacaaataaactagaaaatctacaagaaatggataaattcctggacacatacaccttcccaggactaaaccaggaagaagtccaatccctgaatagaccaataacaagttctgaaattgaggcagtaattaatagcctaccaaccaaaaaaagtccaggaccagacagattcacagccgaattctaccagagggacatggatgaagctggaaaccatcattctcagcaaactaacacagggacagaaaaccaaacactgcatattctcactcataagtgggagttgaataatgagaacacatggacacagggaggggaatatcatactccagggcctgttagagtttgggggaatagaggagggatagcattaggagaaatacctaatgaatgcagctcctcaccagcaacagaccaaagctggatggagaatgactttgacgagttgaaagaagaaggcttcagacgattggtaataacaaacttctccgagctaaaggaggatgtttga

SEQ ID NO: 6009 - DNA, 1281 bp, Homo sapiens; identical to SEQ ID NO: 5034
  SIMILAR (797)..(889): 931254mologous to Homo sapiens putative p150,accession number U93574,Smith-Waterman Score=148.

SEQ ID NO: 6010 - DNA, 937 bp, Homo sapiens
  SIMILAR (5)..(658): 1001254mologous to Escherichia coli Potassium-transporting ATPase (EC 3.6.1.36), b chain (ATP phosphohydrolase (potassium- transporting), B chain),accession number D90708,Smith-Waterman Score=1074.
ggttattaaaacggtgatgattaccggcgataaccgtctgactgccgccgcgattgctgcggaagcgggtgtcgatgattttctcgccgaagcgacaccggaggccaagctggcattgatccgtcagtatcaggcggaaggtcgtttggtagcgatgaccggcgacggcaccaacgatgctccggcgctggcgcaggcagatgtcgcggtggcgatgaactccggcacccaggcggcgaaagaggcgggcaatatggtcgatctcgactctaacccgaccaagttgatcgaggtggtgcacattggcaaacagatgctgatgacccgtggctcgctgaccaccttcagcattgccaacgatgtggcgaaatacttcgccattattccggcggcattcgcggcaacgtatccgcagttaaatgcgctgaacatcatgtgcctgcattcgcccgactccgcaatcctcagtgcggtgattttcaacgccttgattatcgtctttttgattcccctggcgttaaaaggcgtgagttataaaccgcttaccgcttctgccatgttgcgccgtaacttatggatttacggtctgggtgggctgctggtgccgtttatcggtatcaaagtcattgatttactgctgaccgtttgcggtctggtggacatggatgaagctggaaaccatcattctcagcaaactatcacaagatcagaaaatcaaacaacgcacgttctcactcataagtgggagttgaacaacgagaacacatggacacagggaggggaacatcacacaccggggcctgtcaaggccaaatacagcaaggatcctctgtgcttcaaaagcacacctcgggcttcccctcaggtcttccttgccttaggcaaaaagggccagagaagtgagaaccgtctttgcattttgcccatcagcaagtag

SEQ ID NO: 6011 - DNA, 909 bp, Homo sapiens
  SIMILAR (404)..(631): 821254mologous to Homo sapiens putative p150,accession number U93564,Smith-Waterman Score=345.
atgagtgaactcccattcacaattgctacaaagagaataaaatacctaggaatacaacttaaaagtgatgtgaaggacctcttcaaggagaactacaaaccactgctcaatgaaataagagaggacacatacaaatggaaaaacactccatgctcatggataggaagaatcaatatcatgaatatggccatactgcccaaagtaatttatggattcaatgctatcctcatcaagctaccattgactttcttcaccgaattagaaaaaactactttaaagttcacacagagcctaaaaagagcccatatagccaagacaatcctaagtaaaaagaacaaagctggaggcatcatgctacctgacttcaaactatactacaaggctacagtaaccaaaacagcatgcactattcacaatagcaaagacttggaaccaaccgaaatgcccagcaatgatacgctggataaagaaaatgtggcatatatacaccatggaatactatgtagccacagcaaaggacgagttcatatcctttgcagggacatggatgaagctggaaaccatcattctcggcaaactaacacaggaacagaaaaccaaacactgcatgttctcactcataagtgggagttgaacgatgagaacacatggacacagggaggggaacatcacatatcggggcctgtcagaaccaacaacaaaaaccacatgattatctcaataggtgcagaaaaggcctttgacaaaattcaacagcctttcatgctaaaaactctcaatcaactaggtattgatggaacatacctcaaaataataagagatatttttgacagacccatagccaatatcttactgaatgggcaaaaacgggaagcatcccctttgaaaactggcacaagacaaggatga

SEQ ID NO: 6012 - DNA, 1197 bp, Homo sapiens
  SIMILAR (427)..(495): 1001254mologous to Homo sapiens CASH beta protein,accession number Y14040,Smith-Waterman Score=112.
tttacattctgatgaattctgaaaaagaatgtggggtttccttgcagatgagttcatctgttggttcatttcctttacaatgtaggttttcttctctgtctttttggattagtctgtttttggttctgtctaccaaggatccctttctttagacttctatagatccctttctatagaacttaatctacttaagtcagggagaccacccagaaggaaagagcccatactttcaatcttaggcataagttagcttgataagattttcagaaaaattcccttttaaccacagaactcccccactggaaaggattctgaaagaaatgaagtcagccctcaaaaatgaagttgactgcctgctggctttctgttgactggcccggagctgtactgcaagacccttgtgagcttccctagtctaagagtaggatgtctgctgaagtcatccatcaggttgaagaagcacttgatacagatgagaaggagatgctgctcttttttgtgccgggatgtttgctatagatgtggttccacctaatgtcagggaccttctggatattttaacggaaagaggtaagctgtctgtcggggacttggctgaactgctctacagagtgaggcgatttgacctgctcaaacgtatcttgaagatggacagaaaagctgtggagacccacctgctcaggaaccctcaccttgtttcggactatagagtgctgatggcagagattggtgaggatttggataaatctgatgtgtcctcattaattttcctcatgaaggattacatgggccgaggcaagataagcaaggagaagagtttcttggaccttgtggttgagttggagaaactaaatctggttgccccagatcaactggatttattagaaaaatgcctaaagaacatccacagaatagacctgaagacaaaaatccagaagtacaagcagtctgttcaaggagcagggacaagttacaggaatgttctccaagcagcaatccaaaagagtctcaaggatccttcaaataacttcaggatgataacaccctatgcccattgtcctgatctgaaaattcttggaaattgttccatgtgattaacatggaactgcctctacttaatcattctgaatgattaaatcgtttcattttctaaatgtgtaaaaaaaaaaaaaaaaaaaaaaactcgagggggggccc

SEQ ID NO: 6013 - DNA, 1983 bp, Homo sapiens
  SIMILAR (1594)..(1773): 1001254mologous to Homo sapiens bA16L21.4 (novel protein (supported by GENSCAN)),accession number AL135787,Smith-Waterman Score=315.
atgggagatggcaccagtgacttcgaccctatcggagacattgggattcgtcaatctaattactcatgtggagggtgcccaaggataccttatgtttggagagtcactggaagggctcacgggacccagactatagttgtattcatggctaaggtttattacggcaatgtaatgaggagggagaaagactcaggtggagcctggggaaatccatgggcaggcatcctactgccccctccctccacgaggaattgcacagtgcactcttccttcagcaatgaaaatatatttccccagcatacaagttcctgtgtagttgtacataatcaatatattggagcagatttcccctggagtaatttctcatttgtggtggaatacaattatgtggaagactcttgttggactaaacactgcaaagagttgaatattccttacatggcctttaaagtgattcttccagacacagttttagaaagaagcaccttgctggatagatttggaggttttcttttggaaattcagattccatatgtgttttttgcatctgaaggacttcttaatactccagacatacttcagctgctagaatccaaggacatggatgaagctggaaaccatcattctgagcaaactgtcacaaggacagaaaaccaaacactgcatgttctcactcataggtgggaattgaacaatgagaacacttggacacaggatggggaacatcacacaccggggcctgtcgtggggtggcgggagcttataattgccccaggagtagaagcaactgccttgataattcgacaaattgctgaccacagtttaatgacctcaaagagagatcctcatgaatggttggataaatcctggcttaaagtttcaccatctgaggaaaataggaatcagattagtaccttgtcttctcaaagttcagcttctgatttagactctgtcattcaagaacataatgaatattatcagtatttaggattaggagagacagtgcaggaagacaaaaccaccattttgaatgacaactcttccattatggaactaaaagaaatctcaagttttttaccacctgtgacttcatacaatcagaccagctactggaaagactccagctgtaaatctaatatagggcagaatactccttttctaattaatatagaatcaaggagaccggcttataactcctttctaaaccacagtgattcagagtcagatgtcttttctttgggtctaacacaaatgaactgtgaaactataaaatcaccaactgacactcagaagagagtgtcagttgtcccccgttttataaattctcagaaaaggagaacacatgaagcaaaaggtttcataaataaagatgtatcggaccctatcttttcactagagggcactcaatctcctcttcattggaactttaagaaaaatatatgggaacaagagaatcacccgttcaacttacaatatggtgcacagcagactgcatgtaacaaattgtactctcagaaaggtaatttattcactgatcagcaaaaatgtctatcagatgagtctgaaggcctcacatgtgaaagttcaaaagatgagactttctggagagaattaccatctgtccccagtttggatttatttcgtgcttctgattctaatgcaaatcaaaaagaattcaacagcctttatttctaccaaagagctggaaaaagtttaggacagaaaaggcaccatgaatcttcatttaactcaggagacaaggaatcattaacagaagagaaaacagaggcacaagagaagatgaccacagaagacagaggcagaggctggggttatgctaccacaaaccggagaatgccaaggattgctggcaaccaccaggagcctggggagaggcgtggaacccctcctccctcagaggccccagaaggatccaaccctgctaataccttgattttagacttcccacccccagaactgtga

SEQ ID NO: 6014 - DNA, 588 bp, Homo sapiens
  SIMILAR (264)..(103): 921254mologous to Homo sapiens guanylate cyclase activating protein 3,accession number AF110001,Smith-Waterman Score=265.
tcagtgttccctggcctgagaggtgtagactctctctcctgcaattctgtaggcatgaatcatgcatcttgattccagctggtccctttcccgcttagaatttcttaaaatcatgaacatgtccagtagttcatttttgtcaatagaaccatttccatcagcatcatacagcttaaaataccattttaatttttgctccattttttcttgcatgattagatttacagcagcaataaactccaaaaagtcaacaaatccatcccgccgacaggcccctccctgtgtccatgtgttctcattgttcaactcccacttatgagtgagaacatgaggtgtttggttttctgttcctgtgttagtttgctgagaatgatggtttccagcttcatccatgtcccactgaacttcttcaatgcctttcttcttctgaatttcttcagattttgtcctcttctttcttgtcacatgataaaaaagagtagtagttagagacctttgaagtataaagggtgttccctccatttgggtcactttggacgtgacgtcatccttatcaatttccacaatgccaaggtagtgtctggccat

SEQ ID NO: 6015 - DNA, 600 bp, Homo sapiens
  SIMILAR (308)..(388): 661254mologous to Homo sapiens PRO1546,accession number AF116638,Smith-Waterman Score=85.
atggatgagaatctgccatctgagctgaaagccaatccaacacagacttcttatatgcccagcattaagagctatagaggggcaggtcaattaaaaatagctcaagaaagtggagtgtctgttcagggccattggtccatgaagagggaaggcttccagaaacttgaaagaacacataaaaattttcaaatgaagtttagcagatgggggatagctgtggggaagcttaatgagcagcatgattgtcataaggaggaggcagttactggaaccagttgtatgaaagagctgaaggacaagagctacagaaggatacagcaacacagggacatggatgaagctggaaaccatcattctcagcaaactatcagaagaacagaaaaccgaacactgcatgctctcactcataagtgggaattgaacaatgagaacacatggacacaggaagatccatctactcctgtcaactctactgccactaatcgaatccaagtcacatcatctggactttggcaaaaggcttcatcagtctccccacttctacccgtgcccacccttccctggtccagattccacataatagctcaagggatcttttaa

SEQ ID NO: 6016 - DNA, 858 bp, Homo sapiens
  SIMILAR (411)..(286): 901254mologous to Homo sapiens Human secreted protein, SEQ ID NO: 7217,accession number AAG03136,Smith-Waterman Score=194.
atgacctcttacaatgaacaaaacaagaaaccagtgactgaccctaatgagatggcaatacatgaggactctaaccaagaattcaaaatagcggttgtaaatgaaactcagagatctccaagaagctcccccactgagcaccttatgacccccccacccctgcccaccagagaacaacaaccccctttgactgtaattttccactacctacccaaatcctataaaacggccccacccctgtctcctttcccagactctcttttcggactcagccagcctgcacccagggacatggatgaagctggaaaccatcattctcagcaaactaacacaggaacagaaaaccaaacactgcatgttctcgctcacaagtgggagttgaacaatgagaacacatggacacagggaggggaccgtcatacaccggggccttcttggacaattttcccaacaacttataaacaagtcagaattcagcaatacggtgtgcagagagaaatcaggcagggtcttgcaagtgaatatggagagtccattatgaatgattcaggacgcacttcaggaccaaactaccccaaagggtccaatcactgttttcctctagctcttctatttggaccaccttctaaggtcttctcacaaagtggcttcttatctcagcacagaaagcagaagcagaggttctattactgtactttttataagatgttcagaaccatagctgtcactgtggtgctactcttactgttactgttaccggtggcagagacccgaatcaccctgagtaaccagcggcagattcgtaccagtcggcagcaacttaaattcttgccttctcggaagaaagaatttgactga

SEQ ID NO: 6017 - DNA, 696 bp, Homo sapiens
  SIMILAR (342)..(187): 811254mologous to Homo sapiens Human secreted protein, SEQ ID NO: 7217,accession number AAG03136,Smith-Waterman Score=215.
atgcaaagccttctggaaatccacaagctgaagatgcttgcacaatggagaacaattgaaggagtgagtctgggcagtgagcagattggaggctatttcattattagcaatgtgctggaagagaactctagaacagaagttgataaaaattcaggagcttttattgaattaaagccacatttgcctgaagaagtcagcaaagtcactgactggaacatggatgaagctggaaaccatcattctcagcaaactaacacaggaacagaaaaccaaacactgcatgttctcactgataagtgggagttgaacaatgagaacacatggacacagggaggggaacatcacacactgggcctgtcatgggatgggggaagggaaatggatgaagctggaagccatcatcctcagcaaactaagacaggaacagaaaagcaaacactgcatgttttcaacactcacaagtgggagttgaacaatgagaacacatggacacaggaaaggtgtgaagcatttaatatgggaattatgaacacacttcgacatgtgaaagaatggagatccagaaagccaccactgaacatctcaacttgtaaagctgaagtgggagtttcctcagattcacatggaagatgctacaattctcaaaaatctctagaagtttctatcaagtactcaaacatcaacagaaaatcatga

SEQ ID NO: 6018 - DNA, 2466 bp, Homo sapiens
  SIMILAR (937)..(1248): 991254mologous to Bacillus amyloliquefaciens precursor (AA - 29 to 443),accession number X52988,Smith-Waterman Score=535.
  misc_feature (1)...(2466): n = a,t,c or g
atgacccttacaagctccgggagaaagtcccctctccgactccctcccggtgcattggtggaggccctattcggggtctgtgagatctccgcggcggtttcccactcagatcctagacttgtggggatcagaaagcgtgggtcgccggactcgttcagcgagcggaacagggacatggatgaagctggaaaccatcattctcagcaaactaacacaagaacagaaaaccaaacactgcatgttctcactcatatgtgggagttgaataatgagaacacatggacacaggggtggcggcatcacacaccgggacctataggaagnagatcccctactttacttatgcatgtgcactacatcaaagttatatcctggagagaactcttgttgatttggctccgagctgccaatgcatctatcaaccccggagttgagcagtcaccctccggggatccaaagacagtcacgggcttccctttcctgcggctggaggccgcagactgggtggaagaggcatctgtccccaagggcgtgcacattgccctctccagccaagagcagcgtgctggggaccctcgtgatttggaagcaccttctaacttagttatttctgagcgaacccatcgttcttttagagtgagctggacaccaccttctgacagtgtggatcgatataaggtggaatactatccagtttctggagggaaacgtcaagaagtcgtgcgaacacctggggtcccggatctccgcttgcctgccatcatcccccaggctgcttggctgctggctcatctgcccgcaccgtccgccccgccgactgagctccccacaaagcacacagaggcgcagagccagcgctgttggagtcttttattgtgttctgtcaccgaggtcgcagccccgagccaggtagtaaaagaagctccaccttctttccacacgggaacagaaaacggataccaaggcgaagaatctttatttaacaaagcgtactacggcggcggcacgaacttcttccgtaaagaaagccagaagcttcagcagagcgctaaaaaacgcgatgctgagttagcgaacggcgccctcggtatcatagagttaaataatgattacacattgaaaaaagtaatgaagccgctgatcacttcaaacacggtaactgatgaaatcgagcgcgcgaatgttttcaaaatgaacggcaaatggtacttgttcactgattcacgcggttcaaaaatgacgatcgatgagaataaaatacctaggaatccaacttacaagggacgtgaaggacctcttcaaggagaactacaaaccactgctcaaggaaataaaagaggatacaaacaaatggaagaacattccatgctcatggataggaagaatcaatatcgtgaaaatggccttactgcccaagcttccacaacctccaccctcaggcatataaggctataccgcaccctgcttcccttgggaaaacctgatataatcaggacaataacaatgctggtaaactcttcaaagccaacaggaacccagctttgggttgtcagcagccagtatgttcaaagacagatggcttcagattctaagggaatgaacacctgtagtatggtcaaagccaggaaatattcaaagcctctgctggtgacacccaggcaaacagcatctggagtggacctccagcaaactccaacagatcttcagctgagggtcccgactgttagaaggaaaactgacaaacagaaaggaaatccacaccaaaaccccatccatatgtcaccatcatcaaaaaccaaaggacacagttcctcaccagcaacggaacaaagctggatggataatgactttgacgagctgagagaagaaggcttcagacgatcaaattactctgagctatgggaggacattcaaaccaaaggcaaagttgaaaactttgaaaaaaatttagaagaatgtataactagaataaccaatacagagaagtgcttaaaggagctgatggagctgaaaaccaaggctcgagaactacgtgaagaatgcagaagcctcaggagccgatgcaatcaactggaagaaagggtatcagtgatggaagatgaaatgaataaaatgaaggacatggatgaagctggaaaccatcattctcagcaaactatcacaaggacaaaaaaccaaacactgcatgttctcacttataggtgggaattgaacaatgagaacacttggacacaggaaggggaacatcacacactggggcctgttgtgggacttggaaaattgccttttttcatggctccaattctggtggctccaagtcagaagtctgcgtgtgaggaccactgccatggctgtgcttatggatggaaaaatacacccatgaaggaacgcttgctgccaatgaagtttaaaaaatttattgttcctcctttaacctggactttcggacttgaaagccctgtttag

SEQ ID NO: 6019 - DNA, 716 bp, Homo sapiens
  SIMILAR (283)..(405): 851254mologous to Homo sapiens PRO1546,accession number AF116638,Smith-Waterman Score=184.
ttttgttgtaaaactgtaaaataagcaaggccaaatatttattgtttggcaacacatagagatatatagagttttacatgtaaaattacctataaatgtcaacagcacattgacatggtaaatacgaagttcaaaatgggatatccctggcatggaatagagagctgggatggcggagggccacacgggaagctgcaatagaatttttgatgtttgcttcattctctaggtgatgtgttcactggtgttcatcttatcatgtttttaaattgacaagcatgttacatatacaccacagaatactatgcagccataaaaaatgatgagttcatgtcctttgtagggacatggatgaagctggaaaccatcattctcagcaaactgtcacaaggacaaaaaaccaaacaccgcatgttctcactcataggtgggagttgaacaatgagaacacatggacacaggaaggggaacatcacacaccggggcctgttatgcttgattctgctcctcctacccttggacatcagactccaggttcttcagcctttggactctgggacttgcaccagaggcttaggcttcctaggccacagactaaaggctccactgtcggcttcccgggttctgaggctttcaaacttggactgggccactactggctttcctttttccccagcttgcagacggcctacagagggactttgccttttaatcat

SEQ ID NO: 6020 - DNA, 2286 bp, Homo sapiens
  SIMILAR (114)..(1): 861254mologous to Homo sapiens Human secreted protein, SEQ ID NO: 7217,accession number AAG03136,Smith-Waterman Score=174.
atggatgaagctggaaatcatcattctcagcaaactatcacaaggacagaaaaccaaacaatgcatgttctcactcataagtgggagttgaacaatgagaacgtatggacacaggtgtacaaggaaagctctccacataaggcagctgctgcccagggtgccggcaagaaaaaaggctttgtgaattactatggaccacagagatttgggaagggaaggaaagttcacacagaccaaattggactagctttgctgaagaatgaaatggatgctaaaggcacactttcattgatgcctgaattcaaagtgcgtgagagagcattgttggaggcattgcaccgctttggcatgaccgaggaaggttgtatccaggcatggttctctttaccccattccatgcgcatattctatgttcacgcatataccagcaaaatttggaatgaggcagtatcttacagacttgaaacctatggagcaagagtagtgcagggtgatttggtctgtttggatgaagacattgatgacgagaatttcccaaatagtaaagtggttcttccagtacttggatacaatattcagtacccgaagaacaaagtagggcagtggtaccatgacatacttagcagagatggactacagacatgtaggtttaaagtacctactctgaaactgaatataccaggttgctatagacagattttgaaacatccctgtaatctctcataccaactaatggaagatcatgacattgatgtcaaaacgaaaggttcccacattgatgaaacagctttgtctcttttgatctcttttgatcttgatgcttcatgctatgctaccgtttgtctgaaggaaataatgaagcatgacgtttaaaactgatacccttggtataaccatatatatgtcactctttgaaggaaagggggctaaaatgtcttaagcaccttccatgtgttaggaacttcataattgttatctcttttaattttcacagcatcctgagaagttaggatttgatactgtaattttatagaggatatgtaagtgtcagggtccaaatttaaggtccatgtgaccccaaagcctgtgttttttttctattatatgtttcagtgacctttattctgtgtcataaagttacaatcttttaaaaccattaggaatatatataatactgcaagataacatttaagaaaaaaagttgtgaatattcatatcctccagctccttgcttagaacactagtaaaattaggtcgcagtgaagcaaatgttggagagaaagatagatgaagcattttgctaattattattgtccccctttcctgtttttgaaattattgatcagaacaatatacaagggaaatgccatacctctgtttgtgatagataccccaaagtagttattacctctttgtgagataagtaatctttgatgaagattgaaatacaatttctcatccaatttttatatcttggcatacgctgaccctcttgaccatttgtaattttttcatattatctaaaacaggtgttagagtcagacagattcattcttagattctagctctgacacttactagtgattttgagtatgttgttgatttttttgtgtgtggttactgatagaatcaagacaattacaacttcataaatgacaaataataggattatctccacattttctgttgctggaggaacaaaacattgtgcccatttgaaaattttaatttttgttggtttaactatcgccacatggtaaatcatccttcgccattgtgatatcaattaaatatgggtgtgttggggaggaatgactggcatgtagacatgtattgatttaagaagatctgagcatttctttcattgttggtaagatataatgatgaaatttaaaaagcagtatggagcattatatatcagtaatgtgatatatatacttaagccagtttaaccattttggggaaatgttagcattagggaaataaaatccaaaagaagggaaggagaaggctatatgcaattgcaaatttgcttattgcaatattttgcatatacagacactaaaaacagttttcaaagtccagcattacgtaactaaagtaagtaaaatgatgtgtatcaacttgatggtaaaatatgtagttatttaaaaaagcaatgaacaatttagtttcatgagaaaatgttgccccctaaaagtagaacacatatgttacaactgcaataatactctgaattcatctttcacaaataagagacatgttagcatagtgattaaaagcaca

SEQ ID NO: 6021 - DNA, 2283 bp, Homo sapiens
  SIMILAR (130)..(447): 561254mologous to Homo sapiens Human secreted protein, SEQ ID NO: 6833,accession number AAG02752,Smith-Waterman Score=272.
atataataataataaataaataaataaataattaaaaaaatttaaaaacaaccctctttaaaaaaaaaaaaaagaaataccatttgatccagcaataccattactgggtatatacccaaaggatttataaatcattctactataaagacacatgcacacgtatgtttactgcagtactattcacaataacaaagactgggaaccaaccccaaatgtcccatccaatggatagacctggattaagaaaatgtggccccttatacacccatggaatacctatgcagccataaaagaaggatcagttcatgtccctttgcagggacatggatgaagctggaagccatcatcctcagcaaactaacacaggaacagaaaaaccaaacactgcatgttctcactcataggtgggagttgaacaatgagaacacatggacacagggtggggaatatcacacactggggcctgttgacggcttccagaagaaagaagaggcagcaattggtgctattctgcagcctctgctggtgatacagacagtgttgggagtggacctccagcaaactctagcagacctgcagcagaggggcctgttagaagaaaaactaacaaacagaaaaaaaatagcacatacagtcagagaccacatccaaagggaacacaactcctctccagcaagggaacaaaactggatggagaatacgtttgatgaattgacacaagtaggcttcagaaggtgggtaataaactcctctgagctaaaggagcatgacctaacccaatgcaagaaaggaacatggatgatgctggaaaccatcattttcagcaaactaacacaagaacagaaaaaccaaacactgcatgttctcactcataagtgggagttgaacaatgagaacacatggacacagggaggggaacatcacacactgggtcctgtctggaggatgtttcaaatctatgtagtggccgaaagaatgttagacaagattccaagtttggcttttggactgttggacttacgccagtggtttgccaggggctgttggtcatttggccatagactgaaggctgcacggatcacagctcctcgcttagcaagggaacaaaactggatggagaatgagtttgacaaattgacagaagtggtcttcagaaggtgggtaataacaaagtccaagctaaaggagcatgctctaacccaatgcaaggaagataagaaccttgaaaaaaaggaactggccacacaacagaagatgagcagcaggacagccagtgaagcttcatctgtatttacagccactccccattgctaccattactacctaagctccgcctcttatcacatcagtggcagcattagattccctgtactggaaaaaatcagattacacatgggcttggagaataagtgcaaggttttattgagtggtggaagtagctctcagcagatgtatggggacttagaaggcggatggaatgggaaggtggtctttccctggagttgggctgttcaggagccagcctctcctccaaccacccttggccaaatttccctcactgtctgttgttccaccgtcaatggtctgccagcatctgttgatgtgttcttctgcagggaggcattgcctcgaaacctccaaaagtttcctgctaaagacctaggctgcatcttactccagtacatagacaaccttctgctaggatactccacagcagtcgggtgtgcaagaaggatggatgccttgcttcgacacctggaggactgtgggtataaggtgtccaagaagaaagctcagatctgcagacagcagacagagggagaacaaacaataagagaaagatggataaagttatcagatggaagaatagctgtgccacagctgctaggagctgcagttgtgcttgctgtacataaaactatccatttaggccaagaatcacttgaaaaactgttaggccagtatttctacatctcacacttgccagctcttgctaaaacagtagcacagcaatgtgttacctgtcaacaacgccatgcaaagcaaggcccctctgttcctcctggcatacaagcctatagagtggcttcttttgaaaatcttcaagtagacttcacagagatgcctaaatgtggagatcaaggactagaacgtggctccactgtggccttggtagaagggaccccagatcattatcctgaccactcccacagctataaaggtagaaggaatcccaaactagattcacacagctgcgtgaagcctgcaaccgctaagacctag

SEQ ID NO: 6022 - DNA, 495 bp, Homo sapiens; identical to SEQ ID NO: 5791
  SIMILAR (45)..(116): 871254mologous to Xenopus borealis actin,accession number X07507,Smith-Waterman Score=108.
  misc_feature (1)...(495): n = a,t,c or g

SEQ ID NO: 6023 - DNA, 492 bp, Homo sapiens
  SIMILAR (484)..(287): 721254mologous to Homo sapiens Human secreted protein, SEQ ID NO: 4718,accession number AAG00637,Smith-Waterman Score=232.
ccctcccatcagacctggcgcagcctgttagcagtccatgtggcagaggcgaggagtgccactccagctgcaccgtagctgcactctgtcttggtgtggggttctggcaggtctgggagcttaccgcactggttggcagcagagcagaattggaaacagggcacgtctttctgggatgtaagtcctgatgtttccccattaagaaaaaaggccaggcatcccaacactttggaaggctgaggcggacagatcatgaggtcaggatattgagaccatcctggctaacaggtgaaacccggtctctactaaaaatacgaaaaattagctgggcatggtggccggcacctgtagtcccagctactcaggaggccgaggctggagaatcgcttgaacttgggaggcagaggctgcagtgagccgagttcacgccactgcactgcagcctgggcaacagagtgagactctgtctcaaaaaaaaaaaaaagtcgacgc

SEQ ID NO: 6024 - DNA, 2009 bp, Homo sapiens
  SIMILAR (563)..(691): 1001254mologous to Homo sapiens CASH alpha protein,accession number Y14039,Smith-Waterman Score=215.
gcagcggctgtccccactcagtcctggtggggtcgcacgtaactgtcctgagctatgcataagccgtttgaccacgcatggagaattttaccacccagagacacgcgagtggccctgtgcaagtttcaactgcgcggggggcggggaattccgcagacaggattctagaatttatgtcttgtgtgctaacatttcagccggtgggtggcggggattaggcgtgaagcggttcagcaggcagaggttctcggacgccctccggcgaagccacctgttgatgcttttgactttctgtccttgttcctcgtcccatctggagcatttccaattctggttttgcggagcagcaggtctgagcttgtccggcgagggtgggagttggtcccggcggagatccagtgggaagagccggcggctgcccgggcaactcccccactggaaaggattctgaaagaaatgaagtcagccctcagaaatgaagttgactgcctgctggctttctgttgactggcccggagctgtactgcaagacccttgtgagcttccctagtctaagagtaggatgtctgctgaagtcatccatcaggttgaagaagcacttgatacagatgagaaggagatgctgctctttttgtgccgggatgttgctatagatgtggttccacctaatgtcagggaccttctggatatttttacggtgaaagaggtgtgctgtctgtcggggacttggctgaactgctctacagagtgaggcgatttgacctgctcaaacgtatcttgaagatggacagaaaagctgtggagacccacctgctcaggaaccctcaccttgtttcggactatagagtgctgatggcagagattggtgaggatttggataaatctgatgtgtcctcattaattttcctcatgaaggattacatgggccgaggcaagataagcaaggagaagagtttcttggaccttgtggttgagttggagaaactaaatctggttgccccagatcaactggatttattagaaaaatgcctaaagaacatccacagaatagacctgaagacaaaaatccagaagtacaagcagtctgttcaaggagcagggacaagttacaggaatgttctccaagcagcaatccaaaagagtctcaaggatccttcaaataacttcaggctccataatgggagaagtaaagaacaaagacttaaggaacagcttggcgctcaacaagaaccagtgaagaaatccattcaggaatcagaagcttttttgcctcagagcatacctgaagagagatacaagatgaagagcaagcccctaggaatctgcctgataatcgattgcattggcaatgagacagagcttcttcgagacaccttcacttccctgggctatgaagtccagaaattcttgcatctcagtatgcatggtatatcccagattcttggccaatttgcctgtatgcccgagcaccgagactacgacagctttgtgtgtgtcctggtgagccgaggaggctcccagagtgtgtatggtgtggatcagactcactcagggctccccctgcatcacatcaggaggatgttcatgggagattcatgcccttatctagcagggaagccaaagatgttttttattcagaactatgtggtgtcagagggcccagctggagaacagcagcctcttggagggtggatgggccagcgatgaagaatgtggaattcaaggctcagaagcgagggctgtgcacagttcaccgagaagctgacttcttctggagcctgtgtactgcggacatgtccctgctggagcagtctcacagctcaccgtccctgtacctgcagtgcctctcccagaaactgagacaagaaagaaaacgcccactcctggatcttcacattgaactcaatggctacatgtatgattggaacagcagagtttctgccaaggagaaatattatgtctggctgcagcacactctgagaaagaaacttatcctctcctacacataa

SEQ ID NO: 6025 - DNA, 721 bp, Homo sapiens; identical to SEQ ID NO: 4886
  SIMILAR (2)..(238): 661254mologous to Canis familiaris beta-actin,accession number AF021873,Smith-Waterman Score=262.
  misc_feature (1)...(721): n = a,t,c or g

SEQ ID NO: 6026 - DNA, 440 bp, Homo sapiens
  SIMILAR (2)..(439): 741254mologous to Sus scrofa beta actin,accession number U07786,Smith-Waterman Score=559.
cactggcatcgtgatggactctagcgatgggatcacccacactatgcccatctatgaggggtacaccctcccccatgccatcttgcctctggacctggctggccaggacctgactgactacttcatgaagatcctcaaggagggcggctacagcttcaccaccactgctgagcgggaaatcatgcttgacatcaaggagaagctgtgctacatcaccctggacttcgagcaggagatggccactgcagcctctagctcctccctggagaagagctaggagctgctcaacggccaggtcatcaccatcagcaaccagtggttccactgccccagtacctcttccagccttccttccttcacctccatcatgaagtgtgatgtggacatctgcaaagacctgtacgccaatacagtgctgtctggcggcactaccatgtacc

SEQ ID NO: 6027 - DNA, 439 bp, Homo sapiens
  SIMILAR (26)..(211): 961254mologous to Anopheles gambiae actin 1D,accession number U02964,Smith-Waterman Score=315.
  misc_feature (1)...(439): n = a,t,c or g
tcccgggtcgacccacgcgtccacgcgtcgggagatcactgccctggcacccagcacaatgaagatcaagatcattgctcctcctgagcgcaagtactccgtgtggatcggcggctccatcctggcctcgctgtccaccttccagcagatgtggatcagcaagcaggagtatgacgagtccggcccctccatcgtccaccgcaaatgcttctaggcggactatgacttagttgcgttacaccctttcttgacaaaacctaacttgcgcagaaaacaagatgagattggcatggcnnnnnnnnnnnnnnnnnnnnnnnnnnnggnnnnnnnnnnnnnngggctggccccaggattaaaaaccggaaccgggaagggggacaccacccgttggaggggaccttccccaaaagtaaaaatggggcccggggcttttattggg

SEQ ID NO: 6028 - DNA, 443 bp, Homo sapiens
  SIMILAR (6)..(443): 981254mologous to Oryctolagus cuniculus gamma non-muscle actin,accession number X60733,Smith-Waterman Score=747.
aaatcgtggaattcgagcaggagatggccaccgccgcatcctcctcttctctggagaagagctacgagctgcccgatggccaggtcatcaccattggcaatgagcggttccggtgtccggaggcgctgttccagccttccttcctgggtatggaatcttgcggcatccacgagaccaccttcaactccatcatgaagtgtgacgtggacatccgcaaagacctgtacgccaacacggtgctgtcgggcggcaccaccatgtacccgggcattgccgacaggatgcagaaggagatcaccgccctggcgcccagcaccatgaagatcaagatcatcgcacccccagagcgcaagtactcggtgtggatcggtggctccatcctggcctcactgtccaccttccagcagatgtggattagcaagcaggagtacgacgagtcgggc

SEQ ID NO: 6029 - DNA, 2119 bp, Homo sapiens
  SIMILAR (328)..(1149): 931254mologous to Homo sapiens mutant beta-actin (beta'- actin),accession number X63432,Smith-Waterman Score=1299.
  misc_feature (1)...(2119): n = a,t,c or g
atgtcgacgcggccgcgacgcccgccgcagctggggcgatccacgggaagggcccggctcgcgtccagagtcgccgccgccgccggccccccgggtgcccgggcccccctcgcgggggaccgtgcccccgccgccggggccccgcggcgggccggcgccggcccctgccggcccgaccctttcccccccgccgccggccccacgcggggctccccccgggaaggggggaagacggggaaccggggaaaagagagagaaaaagggcgccgggcacagagcctcgcctttgccgatccgccgcccgtggccacccgccgccagctcaccatggatgatgatatcgccgcgctcgtcgtcgacaacggctccggcatgtgcaaggccggcttcgcgggcgacgatgccccccgggccgtcttcccctccatcgtggggcgccccaggcaccagggcgtgatggtgggcatgggtcagaaggattcctatgtgggcgacgaggcccagagcaagagaggcatcctcaccctgaagtaccccatcgagcacggcatcgtcaccaactgggacgacatggagaaaatctggcaccacaccttctacaatgagctgcgtgtggctcccgaggagcaccccgtgctgctgaccgaggcccccctgaaccccaaggccaaccgcgagaagatgacccagatcatgtttgagaccttcaacaccccagccatgtacgttgctatccaggctatgctatccctgtacgcctctggccgtaccactggcatcgtgatggactccggtgacggggtcacccacactgtgcccatctacgaggggtatgccctcccccatgccatcctgcgtctggacctggctggccgggacctgactgactacctcatgaagatcctcaccgagcgcggctacagcttcaccaccacggccgagcgggaaatcgtgcgtgacattaaggagaagctgtgctacgtcgccctggacttcgagcaagagatggccacggctgcttccagctcctccctggagaagagctacgagctgcctgacggccagggtcatcaccattggcaatgagccggttccgctgccctgaggcactcttccagccttccttccttgggcatggagtcctgtggacatccacgaaactaccttcaactccatcatgaagtgtgacgtggacatccgcaaagacctgtacgaccaacacagtgctgtctggacggacaccaccatgtaccctgggcattgccgacaggatgcagaaggagatcactgccctgggcacccagcacaatgaaagatcaagatcattgctccttcttagcgcaagtactccgtgtggatcggcggctccatcctgggcctcgctgtccacctttccagcagatgtgggatcagcaagcaggagtatgacgagtccggcccctccattcgtccaccgcaaatgcttctagggcggactatggacttagtttgcgtttacaccctttctttggacaaaaccttaactttgcggcagaaaacaagattgagatttggcatgggtttatttgtttttgtttgttttgttttggttttttttttttttttttgggttgaattcaggatttaaaaactgggaacgggtggaagggtgacaggcagtcggttggggagcgagcatccccccaaagtttcacaatgtgggncccgagggacttttggattggcacattggttggtttttttaatagtcattccaaatatggagatgcattgtttacaggaagtcccttgccatcctaaaagccaccccacttcctctctaaggagaatggcccagttcctttacccaagtccacacaaggggaggtgatagcattgctttcgtgtaaattatgtaatgcaaaatttttttaattttcgccctaaaaacttttttattttgttttattttgaatgatgagccttcgtgcccccccttcccccttttttgtcccccaacttgagatgtatgaaggcttttggtctccctgggagtgggtggaggcagccagggcttacctgtacactgacattgagaccagttgaataaaagtgcacaaccttaaaaaaaaaaaaaaaa

SEQ ID NO: 6030 - DNA, 393 bp, Homo sapiens
  misc_feature (1)...(393): n = a,t,c or g
ggcacgagtttgaagaaacttttggatgtggggcatcatccgcatctttctctctcctccaaatgacaaagtttggggaatttttgaattttcctagcatcgcccttgtgctcatcaggtaatctgctaaggaggaaaaaagaaaagaaaaaaggnnnnnnnnnnnnnnnggcaaaccaaaaccaaaaccaaaacccttaccaaaacccaaaagtagagagatttcccatataccttagggactttgaaaggccggcccttttagggcaccagggaggcctgggtgcaaaccatgttggctgggcccttcacggccctggagggaggtaaggctgcccttgaaaggcgtcccctgaaaaggtcttgggtgaaaacttgaccttgaaaaaccca

SEQ ID NO: 6031 - DNA, 473 bp, Homo sapiens
  misc_feature (1)...(473): n = a,t,c or g
gctccaggagaggcagctcccctgcccaagggtccttgggcagaccccagctgttgtctgcccagtacaagtgggtgggggtaggaggggatagggtgtccttgtgaacaatggatcccagcttagccccaaagaccaaccaaagagccagccagagtaagctggacctgcaacctgcctgagccccgtggcctctcagctctgcggacaccccgttccctccccagcttcctgcccaaagagccccacattcaagccaacttgagggaagggggcgtctcgtcagctggtccctgctagggagctattgatgtgcaatattagaaaggagacatgnnnnnnnnnnnnnnggggcggccgttttaaagaatcaaggtttacttacccgggcttgcaaggtaatagtttttttatgngggccccaaaatccaatccctggcccgccgtttaacacggtggagacgggaaaacct

SEQ ID NO: 6032 - DNA, 2150 bp, Homo sapiens
  SIMILAR (28)..(630): 541254mologous to Homo sapiens Human INTERCEPT 340 SEQ ID NO: 2,accession number AAB66263,Smith-Waterman Score=607.
gatcattacgccagagcgctggaattacagatctttaaaaccttacactacctcagcaacctcatccagagcattatgacgcccctgggcaccaaagagaaccccgcccgggtctgcagggacctcatggactgtgagcagaccatggtggatggtacctactgggtggatcccaaccttggctgctcctctgacaccatcgaggtctcctgcaacttcactcatggtggacagacgtgtctcaagcccatcacggcctccaaggtcgagttcgccatcagccgggtccagatgaatttcctgcacctgctaagctccgaggtgacccagcacatcaccatccactgccttaacatgaccgtgtggcaggagggcactgggcagaccccagccaagcaggccgtacgcttccgggcctggaatggacagatttttgaagctgggggtcagttccggcccgaggtgtccatggatggctgcaaggtccaagatggccgctggcatcagacactcttcaccttccggacccaagacccccaacagctgcccatcatcagtgtggacaacctccctcctgcctcatcaagggaaagcagtaccgcctgggaagttggacctgcgtgcttcctctgacctctgacctcgtgggccactctagggcttcacggaggagggaagaggaagaggcaaggggagggtactgaggggcagatggcttccaggagaggcaagttccctgcccaagggtccttggggaagaccccagctgttgtttgcccagtagaagtgggtgggggtaggaggggatagggtgtccttgggaacaatggatcccagcttagccccaaagaccaaccaaagagccagccagagtaagctggaccctggcaacctgcctgagccccggggcctttcaagctttggggccaacccccgttcctccccagcttcctgcccaaagagccccacattcaagccaacttgagggaagggggcgtctcgtcagctggtccctgctagggagctattgatgtgcaatattagaaaggagacatgaaaaaaggagaaaaggaaatgacagaagtgtatatatatattatttaaacaaacaaaaagaaggtgcgttactattttttttttcacccgggaaagaggtgagaaggatgggaaggagcagccaggcgtgggaaacggcgagatccctcgggctgggggtgccccacgtttgcctacctccccactgtgaaatcgctggtgcctcacaattgtctctcacagtgtatgtgattttttttaaggaaaacacaaaaacatccctatttaagattctgaaggtgctaccattattttgccacagactttgaagaaacttttggatgtggggcatcatccgcatctttctctctcctccaaatgacaaagtttggggaatttttgaattttcctagcatcgcccttgtgctcatcaggtaatctgctaaggaggaaaaaagaaaagaaaaaaggaaaaaaaaaaaaaaaaagcaaaacaaaaacaaaaacaaaaaccctaccagaaaccagaagtagagagatttaccatataacttatggacctttgaaaatgtctgtccttttaaggcagcagggaggcctgggtgcgaagcatgcttggcttggcccttcacggtcctggagggaggtgaggctggccttggaaggcgtgccctggagaggtcttgggtgaaaacttgaccttgaagaaaccaatcacaaaagcggcgttgggtcagggctaggcttagaggtgaagcatcaacatggaaccatctcaggaagccgcatcgcctcttccgaggtcctcacttccagggagcctgtccttgcaagatgcaattcatcgttcctgctttttcattgttcattaaatttcttgtaagaaacccatttgttcatttagctccaagtgttaaatttggggtcaagggagacaagaataattaatgggggaatctcggagttccgacaccatagtgaacgtttcagcgtccctctgaattgtggctacatcagcggaacaagttcggcgcttggaattgggttttgaaggttattttaaaccatgggaattatttttaattaggaagggggaaaatgtatgtggaaatctt

SEQ ID NO: 6033 - DNA, 594 bp, Homo sapiens
  SIMILAR (112)..(579): 321254mologous to Mus musculus putative,accession number AK019469,Smith-Waterman Score=250.
  misc_feature (1)...(594): n = a,t,c or g
atgacatcagtgcacagtgcagatgacggaaacatttggcagcatcctctccagtgtggaggtgatgaccgagatttagtggagtttaacttgggtagtcccaagaatgtgggtcccttccttgcagtggaccagaagcacaacatcctgctcaaataccgctgccatggtccacccatccgcttcacgactgtctttagcaatgagctccattatgtggcgaatgagctgaatggcattgtgggagggaagacacagtgcaccttccctttggaagtgtacatccggcggctcaggaacatccgtcgagcagtggttcggctcctcgatcgaagcccanagaccgtggtggtcatccggacggccaacgcccaagagctgggacctgaggtgagccttttcaacagcgactggtacaactttcagctggacaccatccttcggaggatgttctcaggggttggagtatatctcgtcgatgcctgggagatgaccctggcccattatctaccgcacaagctgcatccagatgaagttattgtgaagaaccagctggacatgttcttgtcctttgtgtgccccttggaaacctag

SEQ ID NO: 6034 - DNA, 2456 bp, Homo sapiens
  SIMILAR (849)..(911): 901254mologous to Mus musculus putative,accession number AK012971,Smith-Waterman Score=92.
atgcctcgccctgcttcggcttgcgcacgtttgaaagctgaatggctctatagtcaaggcaaggggagagcatatcggcctggccagcacatccagcttgtccaatatctggctacagtctgccccctcacttctacacttggtcttcaaactgcagaggatgccaaactagagaagattttgagcaaacagaggtttcaccagaggcagttgatgaaccaaagccaaaatgaagagttgtctcctcttgttcctgttgaaacaagggcatcccttattcctgagcattcaagccctgttcaagattgccagatatcccaggaaagtgaacccgtcattcaagtgaattcttgggttgggataaacagtaatgatgatcagttatttgcggttaagaataattttccagcctctgtacacactacgagatattctcgaaatgatctgcacctggaagacatacagacggatgaggacaagttaaactgtagtcttctctcttcagagtctacttttatgccagttgcatcaggactgtctccactatcacctacagttgagctgaggctgcagggcattaacttgggcctagaagatgatggtgttgcagatgaatctgtgaaagggctggaaagccaggtgttggataaggaagaggaacagcctttatgggctgcaaatgagaattctgttcaaatgatgagaagtgaaatcaatacagagtcaactgagcagaaacaatcagacataaagaaaccagaaaatacacaaccagaaaataaagaaaccatatctcaagcaacttcagagaaacttcccatgattttaacccagagatcttgttacttttgggacaagacaaagttgcccttcagaaattaaatgatgcagccaccaagcttcaggcctgtggcgatttagtggagtttaacttgggtagtcccaagaatgtgggtcccttccttgcagtggaccagaagcacaacatcctgctcaaataccgctgccatggtccacccatccgcttcacgactgtctttagcaatgagctccattatgtggcgaatgagctgaatggcattgtgggagggaagaacacagtggttgccatagctgtatggtctcacttcagcaccttccctttggaagtgtacatccggcggctcaggaacatccgtcgagcagtggttcggctcctcgatcgaagcccaaagaccgtggtggtcatccggacggccaacgcccaagagctgggacctgaggtgagccttttcaacagcgactggtacaactttcagctggacaccatccttcggaggatgttctcaggggttggagtatatctcgtcgatgcctgggagatgaccctggcccattatctaccgcacaagctgcatccagatgaagttattgtgaagaaccagctggacatgttcttgtcctttgtgtgccccttggaaacctatcctgtcttggaagggactggaggaatcatattcaatgaccttctcaattgacctgagttacagaaagtggccccagagagagatgactgcccttaataagtataaaatttcaaaaagatctggacttaatatgatgacttataaggagcttagaaaatgcaggctacatttatatctacctataggattttatccaatgttgacttagccatggtagaactcttaactgcatctacacactatattgctcttgtaaccaaagatgctaatgagtgtatttgaattagcttctcctaggaggggtgactactttgctaaagagtatgaaaaatgttttgatggaagggacaagtttggttggtagtagagtgtttgtagcttatctggtaaaggaaattgagtgcatctgcatgcatagcacaagtaatccatcttctggcggttaactagagaaagcttatagtcagaggctcttgtgaatgcactgaagactgctgtgtctcaggagtttctcttgatgatctaccttttctgaattacttgaaaaggccaactgtgcttggttcgagttttttagtgaatatttacaatttcctgcttttatctagaaaagaagcaaaagggaaatatgaaagcagtatatataaaatctgtgctttggaattgatatttgcatttggtgattgttttttatttgattcagctaaattttatgtgttgaatacttactctagaataactacttttggaactggaagggggaaatctgtaaatggaaatttatttttatgttctgaaatttgagggtttaggaatttgacttttgtgtaaagaatgctacggtattataaagctgtggaagttttttccactagtttcaggtgtttttttttgttgttgttgttgttgttattttgaactacttaccaaaattagaagttaaaatctaattagaaattaataagatactaaaattcatgacagttaaaa

SEQ ID NO: 6035 - DNA, 383 bp, Homo sapiens
ataccacagcccccaatcctttcaaaggctttgcatgtatttcagctacaagtgacaaggatattaaggatttaaaaggataagagagtgggaaagatgtataaggaagtgcctttgtcaaaaggcagcaaaaagtataatgatataaacataatatgaaataagcaaattttagaatactttgaaacagatttatagaggaatacatagtaaatagttatagacacacacacacccgttttaccattttctcagtgctttttctgctttcattcctttgattttagttagaagcacaagccatgatggatgtgggactcttctcaattgctctttaaattgtcactttttaaatcctattaaatgaagtgtcgattcctgaa

SEQ ID NO: 6036 - DNA, 2007 bp, Homo sapiens
  SIMILAR (1)..(951): 1001254mologous to Homo sapiens cadherin-7,accession number AF047826,Smith-Waterman Score=1628.
  misc_feature (1)...(2007): n = a,t,c or g
ggcacgaggcaagttcttaacatcaatgatcatgctcctgagttctctcaatactatgagacttatgtttgtgaaaatgcaggctctggtcaggtaattcagactatcagtgcagtggatagagatgaatccatagaagagcaccatttttactttaatctatctgtagaagacactaacaattcaagttttacaatcatagataatcaagataacacagctgtcattttgactaatagaactggttttaaccttcaagaagaacctgtcttctacatctccatcttaattgccgacaatggaatcccgtcacttacaagtacaaacacacttaccatccatgtctgtgactgtggtgacagtgggagcacacagacctgccagtaccaggagcttgtgctttccatgggattcaagacagaagtcatcattgctattctcatttgcattatgatcatatttgggtttatttttttgactttgggtttaaaacaacggagaaaacagattctatttcctgagaaaagtgaagatttcagagagaatatattccaatatgatgatgaagggggtggagaagaagatacagaggcctttgatatagcagagctgaggagtagtaccataatgcgggaacgcaagactcggaaaaccacaagcgctgagatcaggagcctatacaggcagtctttgcaagttggccccgacagtgccatattcaggaaattcattctggaaaagctcgaagaagctaatactgatccgtgtgcccctccttttgattccctccagacctacgcttttgagggaacagggtcattagctggatccctgagctccttagaatcagcagtctctgatcaggatgaaagctatgattaccttaatgagttgggacctcgctttaaaagattagcatgcatgtttggttctgcagtgcagtcaaataattagggctttttaccatcaaaatttttaaaagtgctaatgtgtattcgaacccaatggtagtcttaaagagttttgtgccctggctctatggcggggaaagccctagtctatggagttttctgatttcccctggagtaaatactccatggttattttaagctacctacatgctgtcattgaacagagatgtggggagaaatgtaaacaatcagctcacaggcatcaatacaaccagatttgaagtaaaataatttaggaagatattaaaagtagatgagaggacacaagatgtagtcgatccttatgcgattatatcattatttacttaggaaagagtaaaaataccaaacaagagaaaatttaaaggagcaaaaatttgcaagtcaaatagaaatgcacaaatcgagagaacatttacatttctatcacattgacatgaaaattgaaaatgtatagtcagagaaattttcatgaattattccatgaagtgttgtttcctttatttaaaaagaatgctaggtaatcttagtagaaaactaaaaagtatgataaacaacagatggaagaattcatggaaaatagacgagaaaaagtaaataaggctttctggagatgacggaaattttgtatgaataaaagccttataaacaatgaatacatttggataaacaactcattaaaatgcacattaatggaatacctgtacaaatagttttaatacttgtgtccagtggcactaaagagatatattaaaatagattctggttgagttgattataagattgtcaatcataggatacacagggaaagcacagacacgattgctcatctctttggtagtctaaaatatgttccttttaaccacatcaaaagatactatctggattctaatacagaaggtggcaacttcctagggaattatactttgtattatattcaattaattattttatgttttgcatcacctggggtggttggccaaggaacacagctcttggaactaaaaagggcctttaccttaaggatttatttttggtaaatttttnaataaacctt

SEQ ID NO: 6037 - DNA, 447 bp, Homo sapiens
  SIMILAR (416)..(33): 1001254mologous to Homo sapiens Human signal peptide containing protein HSPP-95 SEQ ID NO:95,accession number AAY87318,Smith-Waterman Score=659.
ccaatgattttatttgccatattagattttcattgatgtaatatgattaggatgattctacttaccttaaatagaatgtacagtatatataaaaaaatcccaaaaccgtagattggaataatttgccccatcagacctcttccactacctcctcctccagcacctccacctgatcctttggcctttgcaaatgcctcggcaaggtgagacctctggaaacgagccccaggagtctggccatctgagggtgcctggtgatgatgcatcataggtggaaatcggcccaattttccttcaggtgtcggcggcggctcctgccgcttcccgcgggacaggaaggccttgggcagcagcagcgacagagccaggacaagcccagaagccagagcgactctttgcactgtggagtacgccatgactgctcacggtggtcgcaggtgcagacgc

SEQ ID NO: 6038 - DNA, 1165 bp, Homo sapiens
  SIMILAR (761)..(501): 981254mologous to Homo sapiens Human signal peptide containing protein HSPP-95 SEQ ID NO:95,accession number AAY87318,Smith-Waterman Score=452.
ctgtctggaatgatgacacacagtcctatgtactcaacttccatgggcgcgtcacacaggcctccgtgaagaacttccagatcatccatggcaatgaccaaacccagagatgtgatacaattttgatctgacagaacaaatactggaatattttgggcttttctaataatcataggagcacagacttgtaaaagaacaaatgccacagaaaatgaggttaaaggacacaaactgggagtgcattgaattgtatcactcactggattaagaaccaaaatatccatgttcaagtcctagttctgccttgttagttgtgaattttggggcaaaacacttaaacattgagtaaacatttcttatgtgaaactgaaataatggctatcctaagtacctcatgaagaggaggcaggatttaaagagatgatggatttgaaataattttatgaactataagaagttttaatgtagacaatgatttttattgccatattagattttcattgatgtaatatgattaggatgattctacttcccttaaatagaatgtacagtatatataaaaaaatcccaaacccgtagattggaataatttgccccatcagacctcttccactacctcctcctccagcacctccacctgatcctttggcctttgcaaatgcctcggcaaggtgagacctctggaaacgagccccaggagtctggccatctgagggtgcctggtgatgatgcatcataggtggaaatcggcccaattttccttaaccgtcaaatccaatggctttttgtcagttctcactcttaattttcttcaggtgtcggcggcggctcctgccgcttcccgcgggacaggaaggccttgggcagcagcagcgacagagccaggacaagcccagaagccagagcgactctctgcactgtggagtacgccatgactgctcacggtggtcgcaggtgcagacgccagccggaaccggaaccggaaccggagcactggctgccgctcccgaccgaaccgcgggcggccggacgcgtcgcgcgagggacatagctgcgaggcgcacgcatcttcacctccactgtcgggagttgacctgctcctcccgcgtggttacccgtcgctgtaaatggtaccctcgccttcccgttcatactaactaaaaac

SEQ ID NO: 6039 - DNA, 603 bp, Homo sapiens
ttggggcgcacccagcgagcagcgagagtcgcggtgtcccgggcgctcgctggcaccgtggccgcagcggccggcctgggagccaggagggcgaggcggctgcaccttcggggccagattggagttcgaagagtggcgggtaccccagaagctcggggccggggcgatggctgcagcctcgggagggtatcgccggatcgaactccgggaaagggaagcaaaggcatggaacctccgcacactggatgagaatccatcttccattcgagctgggaatagactttgtgaaagatattatgtaatggagtctcgggaaccctgagacctctccagcgaagctgaagtgaattaattaagtgctttaaacggttctgggtgctgtgttacgggagagagtgactggaaagtaacaaagctgaatctttctccctggagtaaggccgaagactggattactacacgcctagacgtgacactacacccatagatctcatgcatcattaatgccatatgacattgccattttctttctcagttcacggacaaaagtggtgggttttcattgtcttcactgattgttcaatggcattaattaaagaagat

SEQ ID NO: 6040 - DNA, 2301 bp, Homo sapiens
  SIMILAR (233)..(2158): 1001254mologous to Homo sapiens Human Trk oncogene A coding sequence,accession number AAA09303,Smith-Waterman Score=3321.
gtcgaccggagggcaggaggagcaggaggagcaggagcaggaggagcaggaggagcaggaggagcaggaggagcaggaggagcaggaacaggaggaggaggaggaggagaaggaggagcaggaagagcaggaggaggaggagcaggagcaggaggagcaggagggagaggaggctgcaacgccgagcggaggaggcaggaaccggagcgcgagcagtagctgggtgggcaccatggctgggatcaccaccatcgaggcggtgaagcgcaagatccaggttctgcagcagcaggcagatgatgcagaggagcgagctgagcgcctccagcgagaagttgagggagaaaggcgggcccgggaacaggctgaggctgaggtggcctccttgaaccgtaggatccagctggttgaagaagagctggaccgtgctcaggagcgcctggccactgccctgcaaaagctggaagaagctgaaaaagctgctgatgagagtgagagaggtatgaaggttattgaaaaccgggccttaaaagatgaagaaaagatggaactccaggaaatccaactcgaagaagctaagcacattgcagaagaggcagataggaagtatgaagaggtggctcgtaagttggtgatcattgaaggagacttggaacgcacagaggaacgagctgagctggcagagtcgcgttgccgagagatggatgagcagattagactgatggaccagaacctgaagtgtctgagtgctgccgaagaaaagtactctcaaaaagaagataaatatgaggaagaaatcaagattcttactgataaactcaaggaggcagagacccgtgctgagtttgctgagagatcggtagccaagctggaaaagacaattgatgacctggaagacactaacagcacatctggagacccggtggagaagaaggacgaaacaccttttggggtctcggtggctgtgggcctggccgtctttgcctgcctcttcctttctacgctgctccttgtgctcaacaaatgtggacggagaaacaagtttgggatcaaccgcccggctgtgctggctccagaggatgggctggccatgtccctgcatttcatgacattgggtggcagctccctgtcccccaccgagggcaaaggctctgggctccaaggccacatcatcgagaacccacaatacttcagtgatgcctgtgttcaccacatcaagcgccgggacatcgtgctcaagtgggagctgggggagggcgcctttgggaaggtcttccttgctgagtgccacaacctcctgcctgagcaggacaagatgctggtggctgtcaaggcactgaaggaggcgtccgagagtgctcggcaggacttccaacgtgaggctgagctgctcaccatgctgcagcaccagcacatcgtgcgcttcttcggcgtctgcaccgagggccgccccctgctcatggtcttcgagtatatgcggcacggggacctcaaccgcttcctccgatcccatggacccgatgccaagctgctggctggtggggaggatgtggctccaggccccctgggtctggggcagctgctggccgtggctagccaggtcgctgcggggatggtgtacctggcgggtctgcattttgtgcaccgggacctggccacacgcaactgtctagtgggccagggactggtggtcaagattggtgattttggcatgagcagggatatctacagcaccgactattaccgtgtgggaggccgcaccatgctgcccattcgctggatgccgcccgagagcatcctgtaccgtaagttcaccaccgagagcgacgtgtggagcttcggcgtggtgctctgggagatcttcacctacggcaagcagccctggtaccagctctccaacacggaggcaatcgactgcatcacgcagggacgtgagttggagcggccacgtgcctgcccaccagaggtctacgccatcatgcggggctgctggcagcgggagcccagcaacgccacagcatcaaggatgtgcacgcccggctgcaagccctggcctaggcacctcctgtctacctggatgtcctgggctagggggccggcccaggggctgggagtggttagccggaatactggggcctgccctcagcatcccccatagctcccagcagccccagggtgatctcgaagtatctaattcgccctcagcatgtgggaagggacaggtgggggctgggagtagaggatgttcctgcttctctaggcaaggtcccgtcgtagcaattatatttattatgggaattc

SEQ ID NO: 6041 - DNA, 605 bp, Homo sapiens
  SIMILAR (5)..(166): 981254mologous to Homo sapiens skeletal muscle tropomyosin (AA 1-285),accession number X04201,Smith-Waterman Score=259.
gcacgagctcaaggaggcagagacccgtgctgagtttgctgagagatcggtagccaagctggaaaagacaattgatgacctggaagatgagctctatgcccagaaactgaagtacaaggccattagcgaggagctggaccacgccctcaatgacatgacctctatagcgtctctacagccaacttgagcgaaaccgcctgctttctaatgagctgaagctaacgctgcatgatctgtgtgactgatgggcagggctcaatgatgcccattaaactgagcttactgctcacaccactgacctggaccccaacaaaaagctgattgtctttttaaaagttattattttgccctgagcaaattgcattttaattggggcagttagaatgttgatttcctaacagcattgtgaagttgaccattgtgaagtttctgtccctttagaagagattatgggtgaagaagggaggggcctgagagattatagtgagaaaacttgcgagaattttgttttccacccttatttgctgctctttcacttgggcactgactgtaggatatgttcccttgcatggatgtttttaacaataaaaggactgacttgaaaa

SEQ ID NO: 6042 - DNA, 1065 bp, Homo sapiens
  SIMILAR (1)..(597): 991254mologous to Homo sapiens skeletal muscle tropomyosin (AA 1-285),accession number X04201,Smith-Waterman Score=949.
atgatggaggccatcaagaaaaagatgcagatgctgaagttagacaaggagaatgctctggatcgggctgagcaagctgaagctgagcagaagcaggcagaagaaagaagtaaacagctggaggatgagctggcagccatgcagaagaagctgaaagggacagaggatgagctggacaagtattctgaagctttgaaggatgcccaggagaagctggaactggcagagaagaaggctgctgatgctgaggctgaggtggcctccttgaaccgtaggatccagctggttgaagaagagctggaccgtgctcaggagcgcctggccactgccctgcaaaagctggaagaagctgaaaaagctgctgatgagagtgagagaggtatgaaggttattgaaaaccgggccttaaaagatgaagaaaagatggaactccaggaaatccaactcaaagaagctaagcacattgcagaagaggcagataggaagtatgaagaggtggctcgtaagttggtgatcattgaaggagacttggaacgcacagaggaacgagctgagctggcagagtctaagtgttctgagctggaggaggagcttgaagaatgtcaccaacaacctcaagtctcttgcaggctcaggcggagaagtactctcaaaaagaagataaatatgaggaagaaatcaagattcttactgataaactcaaggaggcagagacccgtgcctgagtttgcttgagagatcggtagccaagctggaaaagacaatttgatgacctggaagatgagctcttttgcccagaaacttgaagtacaaggccctttagcgaggagctggaccacgccctcaatgacatgacctctatataattatcaccgcgttctgctctgttctggatctgccccctttactcctcggggaaacccaaggcccccactctcgctctggattccatttgggtcagcctggctggtccccaagggcattaggatgggggagcaaaaagcaacttatgtattttcttccacccccaccccaaattaaaatgttaagctgctggaaacctca

SEQ ID NO: 6043 - DNA, 642 bp, Homo sapiens
  SIMILAR (97)..(639): 371254mologous to Homo sapiens envelope protein,accession number M12140,Smith-Waterman Score=308.
atgctaagtattcagtctacacatgcagagaaagaattagagaactttttccaaaacactgaagactggtatttccacacttcacatcaccttgccacttggataaaacaaaaaagtgaaaaggatccagtccaccttcagaaaggaaaaaatggcccctcctgtaccaaaggacaatgtaaccccttagagctagtaataaccaatccccttgatccttgctggaaaaaagaggagcgtgtgaccttaggaattgatggggctggactggatcctcaagtacatatcttagttcgaggagaagtttacaaacactctcctgagccagtgtttcaaactttctgtgatgaactaaatgtgccagtaccagaaattccaggaaaaacaagaaatttgtttttgcaattagcctggcatgtagcccagtgtctcaatgtcacttcatgttatgtatgtggaagaactataataggagatcaatggccacaggaagcccaagaattagtacctacagacccagttcctgatgaattcctggctcaaaagaatcaccctgataatttctgggtcctaaaaccctcaattattggacaatattgcatagctagagaaggaaaagaattcactcaccccataggatga

SEQ ID NO: 6044 - DNA, 1713 bp, Homo sapiens
  SIMILAR (4)..(600): 521254mologous to Mus musculus pol protein,accession number M19005,Smith-Waterman Score=497.
atggcagttggagttttaacccagactgtgcggctctggccaaggccagtggcctatctctcaaaacaactagatggggtttccaaaggctggcccccatgtctaagggccctggcagcaatggccctgttagcacaagaagcagataaactaacccttgggcaaaacctgaatataaaggccttccatactgtggtaactttgatgaataccaaaggacatcattggctaacaaatgctagattaaccaagtaccaaagcttgctatgtgaaaatccccgcataatcactgacgtctgtaacaccctaaatcccgccaccctgctcccagtatcagagagcctggtcaagcataactgtgtagacatgttggactcagtttattctagcagacctgaccttcgggaccagccatgggcatcagcagactgggagttatacatggacgggagcaacttcatcaatccacatggagaaagatgtgcaggatatgcggtggtaactttgaacgctgtcattgaagccaaaccattgccacagggcacttcagcccagaaggctgagctcattgctttaactcgggctctagaactcagtgaagtgcatggagcattatataaggaaaagggcctgttaaactctaggggaaaggacataaaatatcaacaagaaattctacaattattagaggcagtgtggaaacctcagaaggtggcagtcatgcactgcaggggacaccagcgagcctccacctcagtggccttaggaaactcccaaactgactcagaagctcgaaaagcagcatctaccccttactgtgcatcagtagcagcccccttactccctcaaacacctgacctggtacctacctattctaaggaagaaaaagactttttccacacagaagtggggcaagtaataaaagaaggatggatcagactgccagatgggaaggtagctgtgccacagttgctgagagccacagtcgtactggccatgcatgaaaccactcttctaggtcaagagtcacttgaaaagttgttaggccggtacttctacatctcacacttgccagcccttgccaaagcagtagcacaatgcatacaagcttatggagcggctccttttgagggtcttcaggtggatttcacagaaatgccaaaatgtgaaggtaacaagtatttgctggttcttgtgtgtacttactctgggtgggtggaggcttatccaacacaaactgaaaaggcctacgaagtaacccgtgtgcttctccgagatcttattcctaggtttggactgcccttacgaattggctcacataacgggccggtgtttgtggctgacttggactgtgtggaaatcaatgtggatactggtgtcatttgggccacttggataaaaaatgaaaaggatccagtgcagcttcagaaaggaaaaagtggcccttcctgtactaagggacaatgtaaccccttagagctagtaataaccaatccccttgatcctcgctggaaaaaaggggagcgtgtgaccttaggaatcaatggggctggactggatcctcgagtaaatatcttagttcgaggagaagtttacaaacactctcctgagccagtgcttcaaactttctatgatgaactaaatgtgccagtaccagaaattccaggaaaaacaagaaatttgtttttgcaattagccaagcatgtagcctag

SEQ ID NO: 6045 - DNA, 1206 bp, Homo sapiens
  SIMILAR (643)..(873): 961254mologous to Homo sapiens IgE receptor beta subunit,accession number L35848,Smith-Waterman Score=396.
atggcccgttctcaatgcgctgttgggtacacctcccagacagtgctaggccagccagcagcagcagtgtggagccttgggggccacctgctctgccatgagcactgcattctgccctctccctgggctgtgtcccagcaccccaggggcagcatgcaggaccagcagaaccattgcaaatggaatactgaagaagaaagagatgacaagaaaatgccttcagcgaagaagagaaagaaatctgaagaaatgaaaggaaagagtggatgctttcaacatgctctttttgaatttggagctgtagaaaaagccatgaaaggaagttacttaaactctaagacttcggttctcccatttcaatacctggacatcagaggcagatgcagtcaagggaaggatcataaactttctttggaaagagaccatcttactaccaagccagtcgggggcttggatcttgccctaacagcaactgaaggatttgaggctttttctgaaaaggcagccccaggtcctagggaaacattcatgggcaaagtacaagagggaccagtggattttaatgggaataagtatgaagagtttattgatatattttcagatcccatgttgcaacaaacctcgaagatactgccccttagcagtgaggcgggaccagaagagctgaatacttctgtctaccagcccatagatggatcaccagattatcagaaagcaaaattacaagttcttggggccatccagatcctgaatgcagcaatgattctggctttgggtgtctttctgggttccttgcaatacccataccacttccaaaagcacttctttttcttcaccttctacacaggctacccgatttggggtgctgtgtttgtcataaaagcctcaattattggacaatattgcatagctagagaaagaaaagaattcactcaccccgtaggacgacttagttgtctaagacagaaactgtataatggtaccacagaaacagtcacttcgtggagttcaaatcacacagagagaaatccatttagtaaattcccaaagttgcgaaccgtgtggacccatccagagtcccaccgggactggacagcccccactggattatactggatatgtgggcatagagcttttgccaaattacctgacgagtcggcaggaattggtggacctaaacaaggtgctattggaattaaggaatag

SEQ ID NO: 6046 - DNA, 2316 bp, Homo sapiens; identical to SEQ ID NO: 1636
  SIMILAR (1717)..(2268): 261254mologous to Drosophila melanogaster eyelid,accession number AF053091,Smith-Waterman Score=81.

SEQ ID NO: 6047 - DNA, 232 bp, Homo sapiens
tgatttttaactactgggtttaggccaggcaggcccaggcctggttttgggcctggcgctgggctgcctgtctttggttttacttccttgttgttttttcttaaaacaggtactgagtatcaaacaatataaaacaatataagaaggtctctctcttccctcaattctagctgcaagttttgagcactagacagcagaaataaattcctaaaatgttgagttgagcaaatag

SEQ ID NO: 6048 - DNA, 2169 bp, Homo sapiens
  SIMILAR (133)..(1491): 481254mologous to Homo sapiens envelope protein,accession number M12140,Smith-Waterman Score=1102.
atgctaagtattcagtctacacatgcagagaaagaattagagaactttttccaaaacactgaagactggtatttccacacttcacatcacctttcttccctaagatttttctctgcgagggaatcaaactgctctatgaagctctatgaagaggcttatatggaaagatacagagactttctgccagcaaccatgtggtcagcccacacagaagtggatgttccaggccaggccacttggataaaacaaaaaagtgaaaaggatccagtccaccttcagaaaggaaaaaatggcccctcctgtaccaaaggacaatgtaaccccttagagctagtaataaccaatccccttgatccttgctggaaaaaagaggagcgtgtgaccttaggaattgatggggctggactggatcctcaagtacatatcttagttcgaggagaagtttacaaacactctcctgagccagtgtttcaaactttctgtgatgaactaaatgtgccagtaccagaaattccaggaaaaacaagaaatttgtttttgcaattagcctggcatgtagcccagtgtctcaatgtcacttcatgttatgtatgtggaagaactataataggagatcaatggccacaggaagcccaagaattagtacctacagacccagttcctgatgaattcctggctcaaaagaatcaccctgataatttctgggtcctaaaaccctcaattattggacaatattgcatagctagagaaggaaaagaattcactcaccccgtaggacgacttagttgtctgggacagaaactgtataatggtaccacagaaacagtcacttggtggagttcaaatcacatagagaggaatccatttagtaaattcccaaagttgcaaaccgtgtggacccacccggagtcccaccaggactggacagcccccactggattatactggatatgtgggcatagagcttacgccaaattacctgaccactgggcaggtagttgtgttattggcactattaaaccatctttcttccaactgcccataaaaacaggtgaactcctgggcttccctgtctatgcttcccgcaaaaagagaagcatagctatagaaaattggaaagatgatgaatggccgccccctgagagaatcatacaatattatgggcctgttacttgggcacaagacggcttgtggggataccagacccccatttacgtgctcaaccgaatcatacggttacaagctgccttagaaataatcactgataaaatcagcagagccttgactattctggcctggcaagaaactcagatgagaaatgctatctctcaaaatagattggctctcgactacttgctagcagctgaaggaggggtctatgggaaatttaaccttactaattgctgtctacacgtagatgatcaaggacaagtagttgaagatatagttagagataggacaaaactggcacatgtgcccgtgcaagtgtggcatgaatttgatcctggggccatgtttggaaaatggttcccagcactaggaggatttaaaactcttataataggagttttaatagtaataggaacctgcttactgctcccttgtttgctacctgtacttcttcaaatgataaaaagcttcatcgctaccttagttcaccaaaatgcttcagcccaagtgtactatgtgaatcactatcaatctattgcacaaaaagacataagtagcaaaaataagagtgagaactcccactaataaaaagtgagagtctcaaagggggaaaatgaggaaagagagcgaccctctcatattgttttatactcagtacctgtttaaagaaaaaaaacaaggacatgaaatcaaagacaggcagcctgatgccaggcccaaaaccaggcctgggcctgcctggcctaaacccagtagttaaaaatcaactcataacttagaaaccgatgttactcatagattcccaacattgtataaaaagacaattgtgcaactccctgccctgttctgtttctctgaccaccagtacatgggaggccctggtaccgtaccccctgctggctcaaatcaatcacgaccttttcatgtgaaatctttaggcgtgtgagcccttaaaagggacagaaattgtgtactcggggagctcagattttgaggcag

SEQ ID NO: 6049 - DNA, 448 bp, Homo sapiens
atatctcttggaattaatgttatttttaatgcagtaattataaatataaatacctgctgcgtttttggagggattggatatttaaactctccctatttattttgcttagggaactccaaattcagctaatacccaaggaaattcaacaccaaatcctcaggtaattttttttccatgtcgtgcttaccttaaaataagattgtaaaaattacagcagtggtataaaacaatttccatgtctccaaaaacaaaatgatttcatctacaagacacagtgcgttaaattgtctgccactgcaatgtaagaactcaactcctgaagaacattttaattcttttttagagagagaaaacgacacctgactttatttcttgttttccataatgaatcaatgacagaatcaaaatgacagactttatactctaagggctgggagcaaacattttg

SEQ ID NO: 6050 - DNA, 380 bp, Homo sapiens
  SIMILAR (82)..(219): 781254mologous to Mus musculus putative,accession number AK005978,Smith-Waterman Score=167.
cggacgcgtgggttttataattaagatgttaaagtcctgtggggtcatttcagaaaataatcaggactgtaatgatttttcagtctttccagtgtcagcctgcctttagctaagataattccaatagtaaacggacagatccattcagtttgcagtgaaacacctagtcattttgttcaggtaagaagaaagcttgggagtgttattaaaagcaaattatatttgtggtggtggtcatgtttgtctaacataaagttacattctctgctgagaggttttttcaaaaaatcacagaacttggaactacatgtagagtatggtagagtgtcccatgagagtaataacggaccatagcaaatgtgtaagtttggagtaccttt

SEQ ID NO: 6051 - DNA, 1986 bp, Homo sapiens
  SIMILAR (914)..(1189): 551254mologous to Homo sapiens PEX3 protein,accession number AJ131389,Smith-Waterman Score=193.
gaaacagtttcctggtgaagcagtccctcacccctagtcagcccacacccctagggcctaaagatgctgaggtctgtatggaattttctgaaacgccacaaaaagaaatgcatcttcctgggcacggtccttggaggagtatatattctggggaaatatggacagaagaaaatcagagaaatacaggaaagggaggctgcagaatacattgcccaagcacgacgacaatatcattttgaaagtaaccagaggacttgcaatatgacagtgctgtccatgcttccaacactgagagaggccttaatgcagcaactgaattccgagagcctcacagctctgctaaaaaacaggccttcaaacaagctagaaatatgggaggatctgaagataataagtttcacaagaagtactgtggctgtatacagtacctgtatgctggttgttcttttgcgggtccagttaaacataattggtggatatatttacctggataatgcagcagttggcaaaaatggcactacaattcttgctcccccagatgtccaacagcagtatttatcaagtattcagcacctacttggagatggcctgacagaattgatcactgtcattaaacaagctgtgcagaaggttttaggaagtgtttctcttaaacattctttgtcccttttggacttggagcaaaaactaaaagaaatcagaaatctcgttgagcagcataagtcttcttcttggattaataaagatggatccaaacctttattatgccattatatgatgccagatgaagaaactccattagcagtgcaggcctgtggactttctcctcgagacattaccactattaaacttttccataaaacagaagacatgttgggaagcccagattttagacagtttttgaatacctgttttaaaccgaggttttagtagacttctagacaatatggctgagttctttcgacctactgaacaggacctgcaacatggtaactctatgaatagtctttccagtgtcagccctgcctttagctaagataattccaatagtaaacggacagatccattcagtttgcagtgaaacaccctagtcattttgtttcaggatctgttggacatgggagcaagtgaaagactttgctgctaatgtgtatggaggcttttaggtacccctcagcaactggagaaatgatttttccttcaagaaaaactacagtgggattcatttactttttaaaatacactgggtaaatcacctatacttagagtaacagtttgttatcaaaatgcctgataaaatatattcttaataaaagtcttcatttcataatgaaatcaatttatttggcatcttaatatatttttttagattcatcaacagaccagtttttgtgggcatatatatatacacgtgcaaatatcagaattgttaataatttgttacacatggacatttgttccaaactgactaaaaatcaatatagatattttatatacatatatatatatataaatacaaaattcagtgtactttaccatattaatactgaggaaaaatctgttggagacataggtctaggatgtgtgaagtttggaaaaatatgctatttaattataatgttccctagactgctgtaaacagaagtgaatcagacttttctccagctacctttcaaaataataaattatttgtctcaaatataccttgatggaggacttttttattcttatggaaatggtgaattccaacaactatgatgaactatgttctttgctatttcttcactatattttttaaggttttattaaaaagccttagaaagttacatattggtttagaggctaaaattgtgttgatgctgtttactcacctaattacatagttttaatcatttgtacataattttaaaaacttactttgtattgattttgaatacagtgaaaatcttattgcaataaactattttagtaaaaaaaaaaaaaaaa

SEQ ID NO: 6052 - DNA, 867 bp, Homo sapiens
  SIMILAR (705)..(553): 801254mologous to Xenopus laevis unidentified open reading frame 2,accession number X02585,Smith-Waterman Score=217.
ttaatacagcagaaaccagtcactgagttccaccttttcccgttgccctcttccttcctccagccccgctgccaccttcccaagcacttgacctaggtgcatggtggggccatggtggaggtgcactgggtaactgaatggttccttctccatttggctgttccagcttggagccgtcggggccgaaggaggcacggggattggccaactggggctcttaaggcacattggcttgactgagtgcccttggtgtaacaaggagaaagtatgattatgaggtgcaaagggtatctctgactgtgagctgaatgcttgtgcccatagtagtggctgctggtcattgggtcccttgaccccttcctttctctggttccccacatctgactgtccgcaaatcctgtctggtccacactgtacatacacagggataagaccaacacttctacatgctccttcttctcctgcctgagcctcagtcggccttgcctggcttactgcagtttctcccacctgttcttctgtgtccacacctgctctgcagcccatccccactggcagtggagataccatgatcacgaaggtggttttcccagggcgaggcttatccatcgcactccggatatgctgacccctgcgattttcccaaatgtgggaaactcgactgcataatttgtggtagtgggggactgtgcttgcgctttcccctctgctggcatagtcaatgtacatctgtgttaacatggataagccagtccaatctggatgatcaactagatgcaggaaagttccagagtcgtcttgaactcttagcaacacccattgatcacaggctaacttgtattttctgtagaggtggggtttcgccat

SEQ ID NO: 6053 - DNA, 1332 bp, Homo sapiens
  SIMILAR (387)..(199): 821254mologous to Homo sapiens Human secreted protein, SEQ ID NO: 7284,accession number AAG03203,Smith-Waterman Score=270.
ttatttaggaagacatctttgtcttttttcagagcatgaggagcacagcagccgcaaggaaatggtcctggtggaggggctgtgctctgagcaggggcgccggggctgaacgctggctagttcctctgagaggaagcccttggagaatgaacgttgagccactatggagaggatcaagaaatgacgctcttggaaggagagaagcttgggcagtatgaccattttcacgatagtgattcttcctacccatgagcgtggaatgttcttccatttgtttgtatcctcttttattttgttgagcagtgttttgtagttctccttgaagaggtccttcacatcccttgtaagttggattcctaggtattttattctctcattggcccaggtgctgctctccctccggttgtctgctttcagccctgcctgggaaatcaggccggcgccctgatcttcctgactctcattttgtgaggaacctgaacggatgagccatcgctcttgtcccacacgttctgtccaaaaggtgccctcctctctgcttgctcgggggcctgccctctgagctctggcactcaggctgggatgccgcccagtacagaggctctgcagccctgcaggggtctgactgttccacaccagcaggataaaggccacagggcatgttccccttggcggctctggcagcagattggtcggttgagtggcagaaaggcagacggggactgggcaaggcactgtcggtgacatcacggacagggcgacttctatgtagatgaggcagcgcagaggctgctgcttcgccacttgctgcttcgccacgaaggagttcccgtgccctggcaggggagataccatgatcacgaaggtggttttcccagggcgaggcttatccattgcactccggatgtgctgaccccatatcatgttccctgagataggatggctgggggttgggggtgaacagtatttgggagggaaaatcagggactctgttttggacacaatccattggagttgcaggtagacgttccagtagagaagacaagtggctggctggctctctgagcctggagttgagggggtgatgtgggctggagattggactttggcatcatcagtgttggtgaggcagctacaatcatgactctggatgagctcattgatgggggcagcaagtgtggacagagaagcaggaggtctgaagactgaggtctgaggtgtttggggagaagaggaggaaccttcaaaactattgtatgatttcacaaacaggacactgacattgatagagtccagattcagaacatgtccgtcatcaccaaggtccctcat

SEQ ID NO: 6054 - DNA, 1024 bp, Homo sapiens
  SIMILAR (763)..(602): 851254mologous to Xenopus laevis unidentified open reading frame 2,accession number X02585,Smith-Waterman Score=246.
tgcctcctgcagcaaccaggccagggggaatctggattcctattacacttctgaggaaggtggtcagggagtgtggaggatgtgggtgggagggggtgaggttgagggcaggagtacactgtggtcttctgtcttctacctcattggcccaggtgctgctctccctccggttgtctgctttcagccctgcctgggaaatcaggccggcgccctgatcttcctgactctcattttgtgaggaacctgaacggatgagccatcgctcttgtcccacacgttctgtccaaaaggtgccctcctctctgcttgctcgggggcctgccctctgagctctggcactcaggctgggatgccgcccagtacagaggctctgcagccctgcaggggtctgactgttccacaccagcaggataaaggccacagggcatgctgtggtggaaggctctggcagcagattggtcggttgagtggcagaaaggcagacggggactgggcaaggcactgtcggtgacatcacggacagggcgacttctatgtagatgaggcagcgcagaggctgctgcttcgccacttgctgcttcgccacgaaggagttcccgtgccctgggagcggggataccatgatcacgaaggtggttttcccagggcgaggcttatccattgcactccggatgtgctgacccctgcgatttccccaaatgtgggaaactcgactgcataatttgtggtagtgggggactgcgttcgcgctttcccctgccttactggaagttgaaaggtagttgttattatgatcggtgctgggtctggtacgtgtggtgtttaaaacacgggctgctgggcagttcgctttcgttttcacgtttttgtgggggtagggcgattgcagctttttttctcaccccgcgggggatcctttagtaacgcgccaattatactgtgggtttatgttctccagggtattgtcgtgaaaacgtcacgatctcgtgctttctccaggccaaagccgcgtttttcctgcaag

SEQ ID NO: 6055 - DNA, 2489 bp, Homo sapiens
  SIMILAR (1243)..(1512): 1001254mologous to Mus musculus putative,accession number AK010687,Smith-Waterman Score=467.
atgactgtgccagagctggctggggagactgagcactgtcagtgcttgattaataatgtgctgatgtatggacagccgtatcgtgttaccttagagcttgagctgccagagtcccctgtgaatcaagatttgggcatgttcttggtcaccatttcctgctacaccagaggtggccgaatcatctccacttcttcgcgttcgtgtaatgtgtacaattctggccaacggcggaagctattgctgttcaagaccttctctcggaaagtggtggtggttgtccctaatgaggaagattggaagaagaggctggagttgaggaaggaagtagagggagatgatgtgcctgaatctataatgctggagatgaaagctccagttccatcccaggctccagccccagctgaagctgagctggtccaggtgaaagttgaagctattgtgatctctgatgaagagactgatgtgtcagatgaacagcctcagggtcctgagagagctttcccatctggaggagcagtgtatggggcacagccctcccagccagaggcttttgaagacccaggggcagcaggactggaggaggtggggccaagtgaccacttcctgccaacagaccctcatctaccctaccatctgctgccaggtgcagggcagtatcatcgaggactggtgacctcacctctgcctgcacccgcatccctgcatgagccactttacctgtcttctgagtacgaagcagctccaggaagctttggggtttttactgaggatgttcccacctgcaagacatgtgggaagaccttctcatgctcttacacactacggcgacatgccacggtgcacacacgtgagcgaccctatgagtgccgctactgcctgcggagctacacgcagtcaggggacctctaccgccacatccgcaaggctcacaatgaggacctggccaaacgcagcaaaccagatccagaagtgggaccccttctaggggttggactcttcacagaaattgggcccatgtcttgcttcatctctcgacatgatattgtgattcagcaggacgatgagatccgcttaaagattgtggggacccgtgtggacaagaatgacattcttcacttgctccttcacttcccagttccgcaagaaccgtgggcgacagttatggagaagcgtctgcaggaggctcagctgtacaaggaggaagggaaccagcgctaccgggaagggaagtaccgagatgctatctccctagagcacgaaatcctgctgcacccgcgctacttcggccccaacttgctcaacacggtgaagcagaagctcttcaccgaggtggaggggacctgcacagggaagtatggctttgtaattgctgtcaccaccattgacaatattggtgctggtgtgatccagccaggccgaggctttgtcctttatccagttaagtacaaggccattgttttccggccatttaaaggggaggtcgtggatgctgttgtcactcaggtcaacaagttccaggatccatgtgcaggatatgcaggctcactggctgatagttgcctggcggaccgctgtctctgggatcggctgcatgcccagcctcgtttgggcactgtccccaccttcgactggttctttggatacgacgaagtccaggggctcctactgccattgctgcaggaggcacaggctgccagtcctctgcgagtgctggatgtgggctgtgggacttccagcctatgtacaggcctctacaccaaatctccacacccagtggatgtgctgggggtggacttttctcctgtggctgtggcccacatgaatagcctcctggagggtggcccaggccaaacacctctatgccctggacaccctgcctcaagcctccacttcatgcacgccgatgctcagaacctgggggctgtggcttcttcaggctctttccaactactgctggacaaaggcacatgggatgctgttgcccggggagcccgaggacccgcccccgagttgcgattggcccgcggaaggccggggcggagccccgcggatccggcgctgagcggaagtacggaccgtgaactggagtggaatcgcgactatgggagctccggggggaaagatcaaccggccccgaacggtgactgtgtgggggccgcgactttgtttcctcaagcgttcctgagcccttttatctcgcacgagatgggatcagagctgaagaagaagctgttcaaacgccggcgggtgttgaatcgggagcggcgtctgaggcaccgggtggtcggggctgtgatagaccaagggctgatcacgcggcaccacctcaagaagcgggcgaaccaccagctgctgcatcccatggccaggggtggcgtccaggtggcagagcagctaggaacgcaaggcctgaacctggggccagacaccctgctctcccggccatggtcaacgaccctccagtacctgccttactgtgggcccaggag

SEQ ID NO: 6056 - DNA, 547 bp, Homo sapiens
  SIMILAR (469)..(347): 1001254mologous to Mus musculus putative,accession number AK010687,Smith-Waterman Score=223.
aatttctgtgaagagtccaacctgcaaggaggattgagaaacaggaagacactgtgtgtccaagagcctctaaagacatctgcaataaaagtcgctgagctcttgggggtagggtcggggagagcaaaaggacaagtagatagcacctctgctcccagagagcttaatgaccaaaagaagacagaacagagatcagtatgtgtaagaccaaatgctgttctggtaatttcacaataaatgtccaagaaggctggagtccttgaggcaacagatctcaatcttcgggatgcctgagaatcatcttcttaaaatgcagattctcaggtctgccccagacagtcttgattttccctgtgcaggtcccctccacctcggtgaagagcttctgcttcaccgtgttgagcaagttggggccgaagtagcgcgggtgcagcaggatttcgtgctctagggagatatggtagaacatcttcccagaccaggtaggcaggcagagtccacacctccgacagtccctgggaatccaccggaaacacttagacgccgc

SEQ ID NO: 6057 - DNA, 1750 bp, Homo sapiens
ttttttttttttcctggaaggaagcaaatttaattttcttttcctctttgacacctttcttccctgtccaaagggaggttcttaattgaagtctgtgaggggagcgctccatctctttatcaccaagtggcctcagtacacagaacgctcgctttttattgtagattataccttccttttcccccttggctctggaaaggataagtgattacaattttgttatcttctaaattaaaaagaaggtgaagttgactgggctggagccatctgcacagcagtttgacaactggggcgacacgataatactgggcaattttttgcacaattcaaaagctttttttctcttttttgccaaggaatcagtttaacaaacatcctactcttgctgaaaataatttcttttcccaactcttctaggaataaaacacttttaatgtatttgtcaggaatcgacacttcatttaataggatttaaaaagtgacaatttaaagagcaattgagaagagtcccacatccatcatgggcttgtgcttctaactaaaatcaaaggaatgaaagcagaaaaagcactgaggaaaatgggtaaaacgggtgtgtgtgtgtgtgtgtgtgtgtgtgtgagagggagagacggtgggggcggggggtggttcatagctgcttcaagtccaaagtgctcacaacggctcctgtgagactgcccctgctggggtgctggctgcacggacacagctgctgcccggcacacaccctacctgccctacagtctcagtccaccccaaatgaccctccccagagctgccagaaggtgactttgaaggcttttttccccaaaagctccaatgaagttgccttcctactctccaaaaaaaaaaaaataataataataataataataataataataataataataatgaaaagtgaagggtgggggtgctggccacctcccatttctttgcctgggtggtggtgaccacggcgcccttgtgtcctttccattggttactgaggaccattgccctcatgggcccaggccacaggcacccacctgtcagcctcacctgccacctctctccatgtgggrttgttgcccctggggctggcctggacatgggggagcttatctccccgacccaggggctgggccatgtctccttcacaacccccactccccgcggactgagcctccactctctgctgggctgagggctctgtggtgccccagaaccctcccacccagtgccaaccccaacccatcaatcaacaacttgcttttaacctttcaaagtgtttaggttgcctttggtcctggtggccccaggggaagaagtgctctgtaaggaccagccaggctctggggaactcccaggctgcccgggggactttctggtagccactcacttgtccctgttccctggagatgaggtccttgccctggtgtgtggtgtgacacaccttgacttggcctccaggcccagctggacacacgaaaagagttcctgccccagtcagaaggcccctcagggaagggcagtacccctccagcctgggaaaggaggtgaacccgtgtccttttggagtccagggcaggctcccagcaaagcgagggggaggcgagctggcagcgcggctgtgagggaatgagactttgccatcagtcctcaccaatgacatctactgttagtgccaccccacctcgtgccaagcttggcgtaatggtgatcaatcagtttcattgcgaccgtc

SEQ ID NO: 6058 - DNA, 433 bp, Homo sapiens
  SIMILAR (3)..(425): 761254mologous to Gallus gallus nuclear calmodulin-binding protein,accession number AF098788,Smith-Waterman Score=582.
attttcaagtgagcaaagaccgctatggagggcagccacttttctcagagaagttccccaccctttggtctggggcaaggagtacttacggagtgacaaagggaaaagtttgctttgaggcaaaggtaacccagaatctcccaatgaaagaaggctgcacagaggtctctctccttcgagttgggtggtctgttgatttttcccgtccacagcttggtgaagatgaattctcttacggtttcgatggacgaggactcaaggcagaaaatggacaatttgaggaatttggccagacttttggggagaatgatgttattggctgctttgctaattttgagactgaagaagtagaactttccttctccaagaacggagaagacctaggtgtggcattctggatcagcaaggattccctggcagatcggctatccgt

SEQ ID NO: 6059 - DNA, 681 bp, Homo sapiens
  SIMILAR (250)..(360): 1001254mologous to Mus musculus putative,accession number AK010687,Smith-Waterman Score=197.
tttcgtcaagcgcggaactggggttgcggcgtctaagtgtttccggtggattcccagggactgccggaggtgtggactctgcctgcctacctggtctgggaagatgttctaccatgtgagcagggctcagggtggcggcaagggctgggtggaaaggaagagcaaggccaggcgccggcgcgagactccccttgtcgtccaataacctgccagcgcctggcctggtcgccatcccacttttctccgcagatctccctagagcacgaaatcctgctgcacccgcgctacttcggccccaacttgctcaacacggtgaagcagaagctcttcaccgaggtggaggggacctgcacagggaagtgagtgtcgagctcaccgcaccgccagatcgttcgatgcgcacacggggcgctatacctgcaacccctccccaactcctactcgtcctgccacccactctggggacccctctcctctctcaggcagccagttgcttcctgctttgggttcccagggcgccctcttgcatgctggacaataagacttccttctctcagctgagatgggtcattcattgactcctcaaacattttaaaaacccttggtgtgtgccaggacccgtgttgggctcagaacaaggtagaatgggaacaagatagaatgaggacagcccctgtggag

SEQ ID NO: 6060 - DNA, 2539 bp, Homo sapiens
  SIMILAR (643)..(1245): 621254mologous to Gallus gallus nuclear calmodulin-binding protein,accession number AF098788,Smith-Waterman Score=633.
  misc_feature (1)...(2539): n = a,t,c or g
gcccagacagcatgctggacttttgcaaggcacattaggggtgcggccactgctttctggctgctgtggctgaatcggcctgaggggaaaatgaaagcaaaaacaagccccagttctactaggaaacccaaactgagcaacttcaggcttatccagctcctgggaagaccaggaagcaactgaggagcggtgcaccgagacggacagggtcgggggttaaccccctgccgctaatatttccgctccaaagggagcctctcctttcttggcaaaatgtagaaacctagattccctcgcaagatccacgcgaccagcgtcggccacgctgtgcttcctggggtccccttgtttagtgattcttcgttatggccgcccgtgtgccttcgactcaatcgggaggacaccgaaatccagatttcggggttgcagggcgcgggccccggcttggttagggcaggggcagccattttgagaccagaagagggcggaagggaccatattgagaacgccggttgcctgggggccgccattttaagagaagccctgtacggtaaactccgtgacgtgggggctgccatgttggtacggccatcttggaatgggagtggctgtgggcgcagccatcttaggtataaaatcggctccagtcgcggtgaagatgaattctcttacggtttcgatggacgaggactcaaggcagaaaatggacaatttgaggaatttggccagacttttggggagaatgatgttattggctgctttgctaattttgagactgaagaagtagaactttccttctccaagaatggagaagacctaggtgtggcattctggatcagcaaggattccctggcagaccgggcccttctaccccatgtcctctgcaaaaattgtgttgtagaattaaacttcggtcagaaggaggagcccttcttcccaccaccagaagagtttgtgttcattcatgctgtgcctgttgaggagcgtgtacgcactgcagtccctcccaagaccatagaggaatgtgaggtgattctgatggtgggactacccggatctggaaagacccagtgggcactgaaatatgcaaaagaaaaccctgagaaaagatacaatgtcctgggagctgagactgtgctcaatcaaatgaggccccgcagcaacactgtaaaagtccattgtcgccctcccatgaaggcaaactgttccaggctctcggtggattgtctcagttccgttgtcaaatggtccattaagtccgtgacagacagcacagctgccgagccatgcaaaacatccgcccccggagtgtcctcagaaaaggctttacacttccgccagctgcagcgggtactttttgaactggaactcttgggcaggaccgggttgcgcagcaatgtccttctcccgaatgacttgcaggactgggcatgcacctcccaccagcacagtcacaaacgcccatctgactctgcggcaaaggcatacttctcggtgctgtgcacttccaggtgcttcagctccttctccacactcatgggagaccagtgcaccgtctcccacgtttccactgggacccatccaagcagcaccactgccaccagatcctgtggtcaaggtccagcccatgctgaagtccgaggggagtgggtgaatgagcagaaagaacactcagggagccgtaggcagatctccctagagcacgaaatcctgctgcacccgcgctacttcggccccaacttgctcaacacggtgaagcagaagcttcttcaccgaggtgggaggggacctggcacagggaagtatgggctttgttaattgctgtcaccaccatttgacaatattgggtgctgggtgtgatcccagccagggccgaggcttttgttccttttattccagtttaagttacaaagggccattgttttccaggccattttaaaggggaggtcgtggactgctgttgttcattcaggttcaacaaggttgggactctttcacagaaattggggcccatgtcttggcttcaatcttctcggacattcccatccccttcagagatgggagtttgatccctaacttccaaccccaccatgtttacaagaccaatggatgaggatattgtggattcagcaggacggatgagatccgcttaaagattgtggggacccgtgtggacaagaaatgacatttttgcttatgggctccctgatggaacgattacttgggggctgtaaagctgagcctggtggccttcctacccttgggtcctattttaggaagtgtgattgtgcacacttatcgatgttgtccagaggtccagtctggctgctgttgtggaggcaaggaaggcaaactcatcccagaaggcatttggtggcttctggaggctgaactacggcctcttcattttccggaaggtgttctaagtttaaaaagtcctttggttctcatgaaaaaaataaaacacagaacctattgtttcntttttcccttttaaatttanntttttcaatttccttactcgagaattgttttttat

SEQ ID NO: 6061 - DNA, 939 bp, Homo sapiens; identical to SEQ ID NO: 1576
  SIMILAR (145)..(249): 771254mologous to Homo sapiens Human secreted protein, SEQ ID NO: 5327,accession number AAG01246,Smith-Waterman Score=134.

SEQ ID NO: 6062 - DNA, 1026 bp, Homo sapiens; identical to SEQ ID NO: 1577
  SIMILAR (145)..(249): 771254mologous to Homo sapiens Human secreted protein, SEQ ID NO: 5327,accession number AAG01246,Smith-Waterman Score=134.

SEQ ID NO: 6063 - DNA, 1137 bp, Homo sapiens
  SIMILAR (2)..(292): 671254mologous to Homo sapiens Human myelin oligodendrocyte glycoprotein gene,accession number AAZ29204,Smith-Waterman Score= 328.
gagtttcactcttgttgcccaggctggagtgcaatggcacgatctcggctcactgcaacctccacctcccaggctcaagcaattctcctgtttcaacctcccaagtagctgggattacaggtgcccaccaccacgcctggccaatttttgtatttttaatagagacgggtttcaccatgttggccaggctggtctcaaactcctgacctcaagtgatccacccacctcggcctcccaaagtgctaggactacaggcatgagccaccacacccggcctagtatttttttttttaagagatggggtcttaccatgttaccaaggttggtctcaaactcctgagctcaagcgatccacctgcctcagcctcccaaagtgctgagattacagggcccgagccaccatgccggcccaacataacttttatatgcactgcaaaacaaaaaaatccctgtgactcactttattatgatattggctttattgtagtggtctggaacccaacccacagtatcttccaagtttgcctgtacattttagctatctattattaaacaacttagtggcttaaaactacaataattttatttatttgcttgtaattttgcaatgtgggctcaaatagcctttctttgcttcacacgcagtcacctgaggtggcttcagtgggctggagaatccacttttttaaatgggcttctttacgtggctggcaaaagttggtgttgactgctggctgggagttcaactgaggctgttggcccaaacctcagttcttcttcacatggttggttgggcttttcacaggcagtaagtctgagaagtcaaacttctaacacagcagctggcttcccccgaatgcaaaaacagaagctatcaggccttcttaaggcatagtcccaaactggcataacatcacttccaacgcattctactattgattaaagcaagttacaggcccaatcagactcaagagaagagaactcctaaaggtgcaaatattgggaagcctggttcatttggggccaccaaagtagcagtgtactgtaagatagtcaccctgccaagtgttctgtagctgtatatttgtaattacttataattgaattgagttttaaaagtaatctctaaaaaaaaat

SEQ ID NO: 6064 - DNA, 412 bp, Homo sapiens
cactgctcgagtttgccaatgtatataaattcagtaagcataaacccaggcttctgtgatattctcaaagcctttttcgcgcctcttgtataaaagtctttcgatgttaccactccaggccgtggtgaaatgttttccttctgtttatttccaggggatgcaggtatgttctgctactcctggtgcccgagcgtgtatcacttagtgtagtggtgatgactgcagacattttgggctgttgcggtaggctcttcacgttacctttgttttcacgtgccctttgtctgtttagagtttgtggcagtcatttctttacccaagaatcacctgctgcagagtcttgatggtgagcattctccagcccgccatccagttttagcagttctcccagtccccatcccatcattttggg

SEQ ID NO: 6065 - DNA, 750 bp, Homo sapiens
  SIMILAR (455)..(616): 1001254mologous to Homo sapiens adenosine 5'-diphosphosugar pyrophosphatase,accession number AF155832,Smith-Waterman Score=270.
cccccctcgagttttttttttttttttttgtggttaaaaggtaagtttttatatgttctgtatattttacataatacgcagattcatatctataaaaatatacatactatcgaatatgctttaaattttgctacttaacattatgtggagaacaataacttcatactgctcgagtttgacaatgtatataaattaagttagcagaaacccaggcttctgtgaaattctcaaagcctttttgacgcctcttgtataaaagtcttccgatgttaccactccaggccttgctgaaatgttttccttctgtttatttccaggggatggaggtatgttctgcaactcctggtggccgagcgtgtatgacttagtgtagtggtgatggctgcagacattttgggttgttttggtaggctcttgacgttagctttgttttcacttgcactttgtctgtttagagtttgtggaagtcatttctttacccaagaatgacctgctgcagagacttgatgctctggtagctgaagaacatctcacagtggacgccagggtctattcctacgctctagcgctgaaacatgcaaatgcaaagccatttgaagtgcccttcttgaaattttaagcccaaatatgacactggccatttttgtaaacgagaccaccaggccttcttcactaagactttgtattcaacttagtttaatgtagatttgccattagctttttcgtaaaataaaagcacagaacaaaaaa

SEQ ID NO: 6066 - DNA, 1131 bp, Homo sapiens
  SIMILAR (1)..(684): 651254mologous to Homo sapiens adenosine 5'-diphosphosugar pyrophosphatase,accession number AF155832,Smith-Waterman Score=643.
atggagagccaagaaccaacggaatcttctcagaatggcaaacagtatatcatttcagaggagttaatttcagaaggaaaatgggtcaagcttgaaaaaacaacgtacatggatcctactggtaaagctagaacttgggaatcagtgaaacgtacaaccaggaaagagcagactcgggatggtgtcgcggtcatccccgtgctgcagagaacacttcactatgagtgtatcgttctggtgaaacagttccgaccacccaatggggggctactgcatagagtcccctgccaggcctcaatagatgatggtgaaacccccagaaagcagctgctctcccgggagcttgaagaagaaactggcctacaaaggggaccattgcccgaatgttcctcccagcggtctgtatgggaccccaggcttgtccaaactgtacctatacacatcgtgacagtccacccattaacggagatgatgccgaaaacgcaaggccgaaacccaaagcccaggggatggagagtttgtggaaagtcatttctttaccccaagaatgacctgctgcagagacttgatgctctggtagctgaagaacatcctcacagtgggacgcccagggtctattccttacgctctagcgcttgaaacatgcaaatgcaaagccgatttgaagtgcccttcttgaaattttaagcccaaatatgacactggccattttttgtaaacgagaccaccaggcccttcttcactaagactttggtattcaacttagtttaatggtagatttgccagtgagctttttcgtaaaataaaagcacagaacagatgtggtggtggtatgtgaattgtaattacaggtaggttgtgaccttcctttaaatttgttataacttccagctaaaatttaacaaagaatataaatggcaagttatgtttactccaatttttttaaagctcaacagcagttaactacagctcagttacttttctagtccagtctggtagacaggggtatttgtatagagaaatagacctgagttctcaattaggtcatttccactctcaacccccaatataaaattctaagctgggtatgcaaataaccatgaactccgttagtgtttaaaacagcgttaa

SEQ ID NO: 6067 - DNA, 618 bp, Homo sapiens
  SIMILAR (2)..(136): 601254mologous to Homo sapiens Human ORFX ORF3056 polypeptide sequence SEQ ID NO:6112,accession number AAB43292,Smith-Waterman Score=147.
tagagatggagtctcactatgttgcccagagtggtctcaaactcttgagctcaagcaaagctcccaccttggccttccaaagtgcttggattacagatctgaaccacgacacctggccctgggctctacttttcataaagtttcacattttagactttaaatccaaacccagaaactatctcaacaagagttaataaatagactcaactctggggaatttttaagattacttttttgatacgtaaagtggcatagtcacacataggaaggcaaggaattttttttatttatactaaaaaataactaaaaaggcactatttccctaacatttttgaaactttgacttaaaagcacttctacagagatcaactgtaagtggtctgaatcataaaccaaaatgaaaagcacatacatcaaattgaaagcatataactttgatttacctatttttgaccatataatttgaaatgaccactctctctccctgctcagcctttgtcttaagtaattatgttaacatctcaagtctccttcaaactgtcaatatttttcccaaggaggaaatgctactgcatagctgatgatgcccaggcatcaggcttctgcattcctttcttt

SEQ ID NO: 6068 - DNA, 437 bp, Homo sapiens
tttgattttgaaaaatacatgcatttaatattttctgattacaaaagtatatgtgttcattagaaaaaatttaagtacagaatgaataagtaaaattctagaaagtcttagttcacaatacagagataatttaactgccttaaaataattgtgttcacctctatttaatttttatgcacacgtattacaaacaagcttccttttgacacagctgggaccatccttatatagttagttttaaaaatcttgctttttctgtttaatcagatgttatgattctctccctttgcccttattgttgaacaatttttttttcttgggaacggaatcttgctctgtcgcccaggctggagtgcggtggcttaatctcagctcaagtgcaacctctggcctcccgggttcaatcaattctcctgcctcagcctcctgagcagctg

SEQ ID NO: 6069 - DNA, 2145 bp, Homo sapiens
  SIMILAR (1)..(168): 1001254mologous to Homo sapiens RANBP8,accession number U77494,Smith-Waterman Score=285.
  misc_feature (1)...(2145): n = a,t,c or g
ccactcagcgaggatcagaggacagcactgcaggaggtgtacacactggcagagcaccgacggacggtggcagaggcaaagaagaagattgaacaacagggaggcttcacctttgaaaacaaaggagtcctctccgcatttaattttgggactgtgcccagcaacaactgaaggaaagaacatcagctgaccaaatgtcatcgctgcattttatttcacaagaggagtgtgaggggtcaaggggatgaaatgaggggctgcttttaggggcccctccctgctgtgcccagtacccatctggcattagggcagcacttttatcctactctttccccctttgacctttgtcaccctgaaatttatattttaaacagctactgtaagtatgaaatgaaagaaaaacaatcattggacggaaaaggacaaaccatatgttccaaaggctgaatgcccaaggttgttttagaggattggatagacttgcacgtctcaggtttttgccatgcagaatcaatggatttatgcggataacagtgccttctgttgtacatgaattatcagaaaaaaattttttggagtgcattgcaattttttttaaagcataaaacatatttctagatacaacataaaccttggttatatgtcaactattctgcattttactccgtgaatttattgttaggcagttactgcaagtcactctggtttcaaaatcttcacggctccctctgctcaccctgctgctggggggcttttttcaggggttgtacttataaaatatgcactggctgtggtttttcataagatgttttgtggctttttaaagaagtgtcttactccctcttctctcatttttttctgccttgaaaaggggtggtatttcttttgggggtcaacaaaatacacatatcagtttcactcctaacctggtaagttcaggactcattttcttggcagcaagtggcaggggctctttagtcactggagttaacagtaagtctgagtatattctgaataatgtaattatgcaattaattgataatcatacctaaagcacattgaacttctaagagacaggtgctacgtaagcacactgtctttcttggatggggacttgtattttaaataacttatcattccaagcatatgttggactagggtccaaaagcattttataatatttttttttaatctagggaaaaagacccaaacaaatctaacttcttgctttctcacctatttgaattttctcctacctaatttgtttgtgtctttattatagctcagtttgacttctcaaacttttcaagggttgggggcagctgcacttttagggttggcctataggaaaatattggcatatgggaggatttacagtggttttttcggacctagtttcaaggaccagaacatgggtcataaggtttttattcagcaaaatgaaaaccgtatcttcagaacttaaccaatattactggatgtgagatacagattttgctttctgtgggaattgaaaatttcacaaaaattcacagcttaatttccccatcagtgactggaggaattttttttcaggtgcttcctatattacccatccctccgtgcatattaaccctttaggaatttagggttaagtgatgccctataggaagttgccctggaaaacccatggagttttgggaagttccagtgaccccccctgcctttccctctgccccctccctttccccaagggcatttgaaggctggaatggtgnccaactgggcagtttaggaaggcgaaagatggcaattgggagccaattttagagagcttttcaaactcctttattcctccatgttcccacatggtcctaatttttaaccataaataataatggccttcacactgggattgtaaaaggccatgtgatttttgagattttattttgtgatgtattggtccttctgcagtattaaaagggaaagaggtattaatgtgcattaccctttcttgtttttgaagccagggtaagttgtatggattttgttacccagcagtgctaacctgaatgtgacctggttaccttggaaatgcaggaacttatatgaatgtactataaaataaaatgcggactgattcccaggaaaaaaaaaaaaaaaaaa

SEQ ID NO: 6070 - DNA, 549 bp, Homo sapiens
  SIMILAR (3)..(92): 1001254mologous to Homo sapiens HSPC007,accession number AF070663,Smith-Waterman Score=171.
gacggatctttcatattgtggagaatgatctgtacatagattttggtggaaagtttcattgtgtatgtagaagaccagaagtggatggagagagtcccatttcgtggtatgctgtttggaggagattttcacaagtgatgataacctgtttttcttccaactctgactttggaaaacatcgtaaaagataaagaagttgtaatacaacatggatgaaccctgaaaacattatgccaaatgaaagaagccattcacaaaagatcatatattgtatgattccatttatatgaaatgttcagaatagacaaatccacagagacagaaagtagattagtcatccccagagtctagaataggggagggggagagattgctaatgagtacagggtttcttttttggggtgatgaaaatgttctaaaattaggttatggtaaaagctgtacagctctgagaatatattcaaagtcactgaattatacactttgggtagattttatgatatgtgaattatatctcaataaagcttttaaaagttttagtaaaaaaaa

SEQ ID NO: 6071 - DNA, 906 bp, Homo sapiens
  SIMILAR (15)..(617): 541254mologous to Homo sapiens HSPC007,accession number AF070663,Smith-Waterman Score=364.
gaggtaaagaagtcatggcggcgctgtgtcggacccgtgctgtggctgccgagagccattttctgcgagtgtttctcttcttcaggccctttcggggtgtaggcactgagagtggatccgaaagtggtagttccaatgccaaggagcctaagacgcgcgcaggcggtttcgcgagcgcgtatggagcggcacgtcggagcttctacagaaggtggagcccctacagaaaggtggagcccgggcggggttctcccaaaaaatgtggaatcctttgcatctatgctgagaccattctccctcttaccacagatgggaccctgcaaacgactaaactggtccattggaccggatctttcatatttgtggagaatgatctggtacatagattttggtgggaaagtttcattgtagtatgtagaagaccagaaagtggattgaagagaaatacccagaaaggaaccagggtccggtttgcggctattagatcttgaacttacgtctaggttcctgggagcaacaacagattacaactgtactagaggctaaatgcagttctctttgggaatccaggaagaagtaaaagactcaagattcgaaaagaagaacatcatgaaaaaataaaatggaactttgcttaagtgggattgactccctttgctgaagtccagttaattccatccaagaatgccaatttagactaattgtgatataaatgattgaatgaagatataataaataaaagctataattatagataactcttattagaattttctttagcaatattcccaccccccaccccttgttttgctcttaatgtttttttcctttggtggggatagtatacactgtactaagaaattgtcattcaataaatacgttttgagtggggtccacaaaaaaaac

SEQ ID NO: 6072 - DNA, 756 bp, Homo sapiens
aacttttttgagaagatggggtttcaccatattgcccaggctgttcttgaactcttgggctcaagaaatctgtctgccttggccccccgcctgcctcgggattacaggcatgagccactgtgcccagtcaagttggctttttaaaaataactttaaatttctgtggtttcaaagagccagagaccataaaccatcccacagttagtttctcactcattagctatagacagatccttctgcctcttgggcttgggtgtttctctattccttacccgaagattatttaaaaacgaacacatggaacccttctgcgaacaggaaggaatcagtgtgtagactaaacttacatttgccacctgctttcatgttcaactaaacaacttaggaactcaaagaacccaccctccctaaagtacaaaaaggaaatatccagagcaatccccacacttttacccattattttccagacttttcctttatactcaaggaaaaggaatataccagaacaattgaacatacagaaaaaaattgactaacaaggtctctttttattttcctgtcagtaggaagactcacttttttttcaggccctgaggaaaaaaaaggtggttggctctgcagaagccttttgtcaggttgcaaaattcctaacagactcctaaagaggtaaaaaggagcaatgacatggaaggagggagtacaaagtgagtcagctagaataaagctggttgcttgggaaacatttttcttccagtt

SEQ ID NO: 6073 - DNA, 5949 bp, Homo sapiens
  SIMILAR (1393)..(1644): 791254mologous to Homo sapiens Human myelin oligodendrocyte glycoprotein gene,accession number AAZ29204,Smith-Waterman Score= 394.
ggaaggggacgaggacaacgagcgactgggcggcggaggacgaggaggaggaagaggaggccgagcaacaagatggcccctgctgcaggagcagcctcagcagcagcaggtgggaggccggagcggtgctggcggtggcggcggcagccgtgggcccggcggcctgggacagaatcagagtcaacggtggcctcggcggcggcggcggctgccgcggcggtggcgacggccgcggggactcggagctgagaggagctgctgctcggaccagcgcggtgagcgagcggcgggcggcgacttggggagcggggctgccgcggccggggcctcagtcgggaacaataggcagctgtggtcgggaagggtttgtcctcgcccgccctctgctcctccgcggcagcggcagcccggccggccccaggctcctcagggcccccgccggctgttctggggcttgtcagtggccggcgtcctttaggcctcaggcctctgcatgccgcctgtagggcctgtcggggtaggtaggccgagaggaggacgaagggaggctcggacgagagggagggggcgaaagggctacctggctcctgtggtactcccagggcctgggccaggcggggaatgcgcacgggaactgctttttggacccctagtctgtgggggtgggggagggcgaaggcgtctgtaaacaggcgccgcctcggcctcccagcacctcagggctgcttcctcccccagcccctgaagcgctccccttctttggccaagtggatttcacggtgtctgtttccctgaagtccctggagatctagcctggtagtcttctccctgctggcgatgggaaaattgtgtgtgtgcaggtgtctttaaaaaaaaaaaacaaaaaacttaaatgcaacaaaaacatataaaatgtggttatcggtaaaggatggagtggtaagggatgcgcctctctaaacatctctaagtatcagttctataaacatcagttatgcccgcatcccaggtgagagtggattgaaacaagggctcttttggaacagtaataacacaactcttgacataccagaatagcctatgaaactggaaacaaacactggcaacgcggagacaaactgtaatgtttaaagaggacttttattccagctaggcgttttgaattactaacatgcagtataagaagcaacattaactagcataaagtggacctcaggaagcacttcgaaaggagacaggtggttcatctccggccatagagcttcttgtgccttgtctcgtgtttcagtaatttttcctgaaattgttcaagaccagtcttttctctgagtttgaaatttgatttcgtttttgttttgttttgcgacggagtcttgctctgtcacccaggctggattgcagtggcacaatctcggctcactacagcctccacctcccggattcaagcgattctcctgcctcaccatccggagtagctgggattacaggcgcccgccaccatgcccggctgatttttgtatttttagtagagacggggtttcaccatgttggccaggctggtctggaactcctgacctcaagtcatctgccctcctccgcctcccaaagtgcttggattacaggcgtgagccacctcgctcagccttaaacttaatttttcaaggcttctaccacattttcttacaagtgagggaaaaggtagatttatttctaaagtactttctacctaggtatgcagaaatttatattaaaatcgcttggatacatccaaggagattgcttttcacttgttaacattcaactgcaaggcctaagggttataggttgtgttcttttcagcactgacctgtgctgaaaagatgccagttaatatctttcacctcttctaagggtaaatttctaagtagaattggtccaagtctgttctaattaaaaacattataagcagcactagtctagttcttagttcttccacaacaattgacactgaatagattagcaattgaataaacataaaggttgaattttcttgtttaggatttgaagtatagtgaatgaatatcaatactgaccttcattttatgcttagcataaataatgttggagatgttttgattttttgaatgatggagaaataacaactttctatggctcctgatgttgtgacttttttgcagatatttcagaaaggacaccgtttttcaggtgctcaaatctgtgatttttttttttttttctgtgctaattttgttaggtcagcacagattccaagtaaagtctgtgttataatgatacttaaatttatgtatggccctaaacctattagaacaattgtagtaatttataggttgtaagttttaagtggttcatgtgctgtgttatgaaaacaatctcaccgtgttatgtcaagggcagatttacctcatatttaatatcattttcctgaaaataaatatttttaagtggtaaggttttgtatttcagattggttattgacccagcaatttatgggcttagtctgggtccgtatttctgttcaataggaaaaaaaatttagggaattgtttttatttattttgtgtcaaaacagttttaagttttgacacaaactcaactgtcccttcttcagtatcaatacttattacttaagttcacattttctcaggtaataaaaatttacttctaagaagttttggaaccagagcttaagaattagatttatattttcttggtaatattaaaagttaatatatgcttgatttatttgaagaaataaaaaagggtaatttgtacacaacgcctttcagaacatatttgttgaatgaataaaaatatttaagcttcctcattatgctgcagtattagttctgttgtcctcattttttcatatgaagaatgtgaagctaagagtagctatgtaaccagcaaaaagatcacataattaataggtaaaagagcttactcagactcagatcttgtgacacaaattagattctttgccactaccacatgtgtcacagttaaactttgaagcatcttctgtgttgacagattcctttttttgcctgtgaacttaccctattatcattatttgtatcctgtcagatatctacttgtaagaccaagaaagtatttgttcatgtgaatcacaaaagaaacacttaaatttttgtttttagcatatctgaatgctataaaatataaaaactcatactgtttacataggacagatttatcatactgctgtaattgttttcatggttaatttgttacataggcaattactaaattgtgcctttgaaatactttataaatttttttaaataattaaagatattcaatgatgttaaagttgggtcagctaatatttgaagttcttaatttataattttttttctttaagccatagataatttagaattctgcagtatttttcatctccagatcttagggcttgaaatggattctgatgggtctaatcagtccactcttgcatatatcttgaaaatggtcagcatccaacaaagtgaagaataaactgataaatgatccctgtttggtgaacacctcagatcaggatgttccttggcagggtattctgacctggtttagctttggccccgtctgtgctcagggttcaggtattctgcaggattgggttcagagggattaaaattctcagattggcctgtatcaaaacagtcacagattttggtcagccttttcccagaaccgtctccaagattttttcttttgtgtaattctggaatctaggctggatttggactagctttagaggttatgataaaagattaattttgtcaggcatttatacaaaggaggttttcttactacagagtttcttaaggtagattccttctatttttgaagtgtgacatttaccaatctgaagtaatgttgccctacatcccccagacacttaactttagcatatttatttctgtccatttttggtcaggattgtgcctgtttacttatataatattcttgtttactttttgtttattagatacttcttattagtttatattgttttcctgattgaggcttggggaaagaattttcctcaaatttaaagtcaccttacttatttgcagatgtatgtcagagcaatattcttttgacagttatcaagcattttagcaatgctgtatgtatatattatgaatgaatgacagagtcactcatggtctgtcacccaggctggagtgcagtggcattatcatagctcacttcagcctcaaactccttggtttaagtgttattcccgccttacctggctactttttttaatttttattatttttatagagatagcattttgctgtgttgcccagggtggtctcaaactcctgggagcaaggtgatcctcccacttctgcctcccaaagtgctgagattacaggcataacaatgttttaaactgacactggtataccttcactgattattactgtgcacatgtggtaataatttaacttataagtgcattttatctaaaaaatttccaagatctaaatagcatttgaacatggtagcagttttttttttttttttttttttttttgagcaagaaaagagttctaaaggggtcagttttatctacagattaacataattttttttattgaggttaagtcacataacattaaccattttaaagtaaacagtttaggtggcactttatacattcacaatgttgttcaaccaccagctctaattccagaatgtgttcattaccccaaaaggaaacactgtacccattaagcagttactctgtattcccctcttccctaatccctagcaaacgccattctgctttctgtctctaatttgagccaacatcgaggaagagtactctgtacaattgaaattgcagaaaaaactttgggatgtgattgttaggaataaaaaaccacctaattctttgcatgcttctctaaggtacagtaggacatgctgccaggggactctttatgggaaggaaaagttgaggacttcataggaagtttggcagttttgtttaggatccaccccagagggtttttggctccaaactcttaggactcatttgtatttcttcattgggttataagaactaaaatttaatgttctatacaaatgtgaacaactaatacttggtctcctatctagaacttgtttgccttttaggttttcttaatgtatagaagaaactaggaatattcacaaaggatttatttgaagttacactgggaaacgatttttagaatttgaagctctttgatccctgtgaatctaactttatgactattttattcagctaatctttgagaatatttagagttttgatttgcgtggcactctgcttttaatcccttgttgaataagtgttagaaaccttgatcttggccctatacctgatcacctctaaaaacatgaacagtgttacaaaggcagttgtttagtaagcttttttggattgttttaattggctgactgagggagacaaaattagtttttttttttctttctagaataaagggtaataaacttggactttagagttactgctaagattgacatttccatttggggctttagaaatatattgttatcttaaattccaaaatgggtacctttatcctaattgaattgaaatccttaaaatttatgagaaacaaaagtcactttatgttcttagtaaatatttctaatggggttataggagatctaagtacaaaaaaaatttaaaattttgttattaatctcccctccttaaggaaaattttattaatatacataattataatttagttataagaacaacttaagttgagtacagtggctcaagcctgtagtcctagcactttgggaggccaaggcaggaggatctcatgaagccaggagttccagaccagcctgggcaatagagtgaaaccccacctc

SEQ ID NO: 6074 - DNA, 1137 bp, Homo sapiens
  SIMILAR (6)..(626): 661254mologous to Mus musculus putative,accession number AK019480,Smith-Waterman Score=645.
ggaatagtacaacaattatgagccgtcacagcctggtaagtatagaagaagaaggcctggatatggtgaacagagaaactgcacatgaaagggaaatgcaaacggcaatgcagataagccaatcatgggatgagagcttgagcctgagtgacagtgattttgacaagccggagaaattatattctcctaagagaattgacttcactccagtttctccagcaccttcacccaccaggggattcggaaagatgttccgtgagcagcagtggattgccaccaagtccagttcccagtccaagaccgattttcaagcaggagaagtcagagtccaagtcaagtgcattaagacccaagtgttcttgggtcctcttaaaaagaaaaaggtgaaatggagaccagaaagtcagccccaagagactctttccaaaggcactaccaatatgttatctccagatgccgcgcaactgtctgatctcagttcatgttcagatattttggatggcagtagtagcagcagtggcttatcctcagacccgctggctaaaggcagcgctaccgcagagtctccagtagcatgctccaattcatgctcttcgttcatcttgatggatgatctctcacccaagtgacttaaccatttctgattcaacgttttaactgctgtttcctacataaaatgtttagtggggaacgcagaggaacttggatccataatggaggattaaagttttacagatttcacacacttggaaggtaataataactctttggcatctctcttctcccaaagttcaattttgtgagcctagtgaccttactagtatctggttttgctgatctcattttggatttagtgattaaatctcaaatgctgatttttgattgcttagaggaatcttttttcttagtgcctcaaaaaacacctattttgagtctatacatttaagaaaggcactgatgtgtattgcctttaatggtccttttccgcagcagtgatatgacagatttgatcagaaattctcttgcttgagagatttttttttgtcctctgttgactacatagtttcaaatctctctttatttcatgatgatatataaattgcttttaattatattaaatttttatttttctgcatc

SEQ ID NO: 6075 - DNA, 347 bp, Homo sapiens
aaagaaaagggtagattttaaatgttctcacaacaacaaaaaatgataagtatgtaagattcttaaccacagttgatgtacctcacaggaagagcttctctttcaagatgtgtagctgcccgatgggttcttcctgcccactgcacaaaaaaatcagttcatggagaccatggcaaaatagtttccaaattcaggagaaatcaggcagagagaaacaaatatgctccaaattttgttcataggagtataataacttgttaaaagctgtcaatagctcaaaagaaaagtttcttgactcctgtggcaacaacagtgttctttgctcttatgtgatggatggacccgtc

SEQ ID NO: 6076 - DNA, 404 bp, Homo sapiens
taagctttagtgatttattgcatagaataatgactgtattaaataataatgcattgtatattttattttgttttgttatttattatttttgagacagagtctcacaatgttgtctaggctggtgtcaaacacctaggctcaagcgatcctctgggccccatcctcctgagtagctgggactacaggcatgtaccaccataccacaccatttgtatattttaaaattgcttgtgtacgatgctcacgatctggctgacaggatcattcactaccccaaacctcagcatcacacaatatacccatataggcaagcctgcacatataccccattaatctaaaggtaaaagttaaaaatactttttgcaaaataacaaaataaataaataaaattgctaaaagagtgg

SEQ ID NO: 6077 - DNA, 1166 bp, Homo sapiens
ggaaggggagagaaggagtacatcagataagaaggaatgagaagagaaggtgggagagacgcgagagggagagaggatcgtagagagaagggagaagagaatggaatgtcttaggaagtagtgaatagtcgtggaagatgtcagtgtaatacgatgtagtttaataaaatccagggaagtggggtggatggggaaagcggagaagttcatccaaagagtacaaagtttcagttagacaggaaaaataagctttcaccgatctattgcatagaataatgactgtattaaataataatgcattgtatattttattttgttttgttatttattatttttgagacagagtctcacaatgttgtccaggctggtgtcaaacacctaggctcaagcgatcctctggccccatcctcttgagtagctgcccgatgggttcttcctgcccactgcacaaaaaaaatcagttcatggagaccatggcactgcagtaaagaaagaggttaattgaccatgatgcccagcccacaccatgtgggacggcagagttattactcaaatcaaactcatctaaaggcttggaggttagggatttttcaaaggtaatttggtaggtagcaggctagggtatggggagtgctgattggttgggtcagagatgaaatcatagggtgtcgaagctgtcctctttctctgagtcgcttctgggtggggacacagaagccgttggctggtcccggtggagccatcggtcatcagacatgcaaaatcctgagaagatatctcagaaggccaatcctaggttctacaaaagtaacattatctgcaggggtaactgaggaagttgcatatcttgtggcttctggaataacgcctcacaattgtttttgtctacaccttagcagaatttaggctcctctcctcctcctagcctggtggtctctcagtattacaagggtggttgagtttcggggaagggttattataatttaaactatcaactaaatgactcccacatgtagcttggcttaaacccaggaataagtaaaagcagcttgaaagctaaaggcaagagggaggttggctagatcagctttctttcactgccattattttctcactgtgataatttttgcaaaggcggtttcagatgtgattggatttttggatac

SEQ ID NO: 6078 - DNA, 578 bp, Homo sapiens
  SIMILAR (143)..(3): 631254mologous to Homo sapiens Human secreted protein, SEQ ID NO: 4658,accession number AAG00577,Smith-Waterman Score=155.
cggcacgagggtcttgctgtctgaggggtggcagaggcagaagtattgcttgaacccaggaggcagaggttgcaatgagctgagatcgcatcactgcactcaagcctgggcaacagagcaagactgcgtctcaaaaaaaccaaaccaaaccaaaacaaaaatccatgaacaagtggacctgcccagttcaaatcattgttgttccaaggggtcaattgtatattattttcactggtaagttttgaaattccagaaatatgcttggaaaatccccgcttgaaatcttccttggttggaaaccagttccagtgggtgactggtcccagaatgatgtcttctcctcggtggaccccctgggcttgagcagcctgtgtttcctgcctcaacttcccttgaaccctcttgaactttctacacacatgtggggcactgggctttgatactgggcatttggaaaggggcacttggggaaattcaggaggaagttacccattattaagataaatgatgttttatcaatgaagcagacttttcatttctttttattgatcttcatgttttcacatcttgagatgcaa

SEQ ID NO: 6079 - DNA, 1257 bp, Homo sapiens; identical to SEQ ID NO: 303
  SIMILAR (430)..(1254): 991254mologous to Oryctolagus cuniculus elongation factor 1 alpha,accession number U09823,Smith-Waterman Score=1427.

SEQ ID NO: 6080 - DNA, 564 bp, Homo sapiens
  SIMILAR (129)..(7): 951254mologous to Mus musculus putative,accession number AK011522,Smith-Waterman Score=200.
tcaatatgtgaggccgatcagaacgcctatgctgccgtccaggtaccagaccgccgagtcatgcttgaacacttccgcgctcagaagaatggagaagcccatcacgccacccacgagggagttaaacccctgctctgccaccaggcaagctttaggagggggcagtggtccaggatgtctggaaagcctgtgatggtactggaagtttccagttccacagcgcaaatcttgaattgtagggtcctgtgaggggctttccatgcgctccttttgcatatagctctgggaggcttcatctcgggggagctctcgatggaccggagggccccgaggtccagctcctggaggactcgggtgggcttcctgaatcgccagcggcatcagcaccttgtcgccttgcgtataatatttgcccatggtgaaaacgggggcgaagaagttgtccatattggccacgtttaaatcaaaactggtaaactcacccagggattggcttggttggtttctgggctcctgcggcaactcgtagcgaaggctttgagagcacccacatgggccaggcat

SEQ ID NO: 6081 - DNA, 385 bp, Homo sapiens
  SIMILAR (59)..(274): 651254mologous to Mus musculus putative,accession number AK011522,Smith-Waterman Score=208.
ggattttgccgatttcggaaccaccatcaaacaggattttcgcctgctggggcaaaccagcgtggaccgcttgctgcaactctctcagggccaggcggtgaagggcaatcagctgttgcccgtctcactgttcgtaactctcttcgtgggtggcgtgaggggcttctccattcttctgagcgcggaagtgttcaagcatgactcggcggtctggtacctggacggcagcataggcgttctgatcggcctcaccatatttgcctatggggtcaaggaattcatgtccacggaacttggccagcttgatcagctgtggaagtttgatcagcttcccaaagggcacagtatggtgaattttaccagaggtcccaatgatggaagatga

SEQ ID NO: 6082 - DNA, 1443 bp, Homo sapiens
  SIMILAR (1)..(444): 961254mologous to Mus musculus putative,accession number AK011522,Smith-Waterman Score=714.
gcggccgctgtgcactctgcccatagggagtacatagcctgtgtcatcttgggggtgatattccttctgtcatccatatgtatagtggtcaaagccatccatgacctctcaactaggctgctcccagaagtggacgatttcctgttcagtgtctccattttaagtgggattctttgcagcatcctggccgtgttgaagttcatgctggggaaggttctgaccagtagagcactcataacagatgggtttaactccctcgtgggtggcgtgatgggcttctccattcttctgagcgcggaagtgttcaagcatgactcggcggtctggtacctggacggcagcataggcgttctgatcggcctcaccatatttgcctatggggtcaaactcctcatcgacatggtgccgagggtgaggcagacacgtcactacgagatgtttgagtgaagggggccagcatccgcatgagaccatcgagatgaggagtttccacataggcaaagggtgccaatatttaactgaacatctggtttctttttggaagttttctttcacatggtttgtcattacaagacaaggtctgcccagccaggtggatctaccttgcccccatcacctgccgcccccatcaaacatgttgggacaatgcccataggaatggacctccttccccgtctccagctgggactggcgttttttagtctctggagtatgatggttctcatgggtaggatgagatctttggcagaaaggtcttcggtggtgctctgagcctgcgctgcataggactgagcagacccacctcctccagcttgggtggccctgccactcctggttccaagtctctcccttcccccggcaggtccttaagggaagattgtacccccctcacccctttaacataccccagaatccatcagtatgtcacttccctaatttcctatcagtgtatcctcattatttccatactgtttttactaaatccctaagtctaaacaggatttggctcaaaaggaggaccatttctaattttttaaaagtacttaggtgatacacgtataagctttgcatggacgaattaaataagcacattgaccttttcttgtacattcagaacctgaacatccatgtgaaaactgggtccatttttgagagatgtgaaactacagtttattcgtaatacataaatataatctatccgtatatgcatatatctatatgctgtgttaagtggtaatgggtacattacagtctgtgagagatggatcgctccctctgtaaggaacaagacgttctcagctgatgtcacggtaggtttagattctgtagagtgttccccaacccgcaccgttctgtacctctcacaccactgcttgcccgggcagtagtggctgaccaataaagacctttacctgttttgtttggcaaaaaaaaaaaaaaaaa

SEQ ID NO: 6083 - DNA, 579 bp, Homo sapiens
  SIMILAR (546)..(578): 811254mologous to Homo sapiens Amino acid sequence of human intracellular signalling molecule INTRA39,accession number AAB64407,Smith-Waterman Score=46.
  misc_feature (1)...(579): n = a,t,c or g
cgatggatagcagcagatgccgctaatgcccttcttccagctaacagagctatggcctatctgaagattcagaaatatgaagaagctgaaaaagactgcacacaagccattttattagatggctcatattctaaagcttttgccagaagaggaactgcaagaacatttttgggaaagctaaatgaggcaaaacaagattttgaaactgttttacttctgggaacctgggaaataaggcaagcagtaactgaactctccaaaattaaaaagggaattaattgaggaaagggacactggggatgatgtctttcttgattccacacaaagacaaaatgtggtaaaacccattgataatccaccgcatcctggatcatctaatccactcaggaaggttattattgaagaaactggtaatttgatacagactattgatgtgccagatagcactactgctgctgctccagagaataatcctattaatctagcagatgtaatagcagccacaggcaccacaagtaagaagaattcaagccaagatgacctttttcccacaagtngatactccaagagcaaaagtat

SEQ ID NO: 6084 - DNA, 989 bp, Homo sapiens
  SIMILAR (3)..(632): 861254mologous to Homo sapiens Amino acid sequence of human intracellular signalling molecule INTRA39,accession number AAB64407,Smith-Waterman Score=902.
ggctggaagaattcgcggccaaaaaagattatgaaagagtattagaactagaaccaaataactttgaagcaacaaatgaactcaggaaaatcagtcaggctttagcatccaaagaaaactcatatccaaaggaagctgacatagtgattaagtcaacagaaggagagcgaaagcaaattgaagcacaacagaataagcagcaggccatttcagagaaagatcgggggaatggatttttcaaagaggggaaatatgaaagagcaattgaatgctatactcgagggatagcagcagatggtgctaatgcccttcttccagctaacagagctatggcctatctgaagattcagaaatatgaagaagctgaaaaagactgcacacaagccattttattagatggctcatattctaaagcttttgccagaagaggaactgcaagaacatttttgggaaagctaaatgaggcaaaacaagattttgaaactgttttacttctggaacctggaaataagcaagcagtaactgaactctccaaaattaaaaagaaaccactcaagaaggttattattgaagaaactggtaatttgatacagactattgatgtgccagatagcactactgctgctgctccagagaataatcctattaatctagcaaatgtaatagcagccacaggcaccacaagtaagaagaattcaagccaagatgacctttttcccacaagtgatactccaagagcaaaagtattgaaaatagaagaagtcagtgatacttcatccctgcaacctcaagccagtttgaagcaggatgtatgtcagtcttacagcgagaaaatgcccatagagatagaacaaaaacctgctcagtttgccacaactgttcttcctccaattcctgcaaactcgttccagctcgaatctgatttcagacaattgaaaagttctccagatatgttgtatcagtatttaaagcaaattgaaccatctttg

SEQ ID NO: 6085 - DNA, 318 bp, Homo sapiens
  SIMILAR (1)..(318): 1001254mologous to Homo sapiens immunoglobulin light chain,accession number X97551,Smith-Waterman Score=543.
gacatcgtgatgacccagtctccttccaccctgtctgcatctgtaggagacagagtcaccatcacttgccgggccagtcagagtattagtagctggttggcctggtatcagcagaaaccagggaaagcccctaagctcctgatctataaggcgtctagtttagaaagtggggtcccatcaaggttcagcggcagtggatctgggacagaattcgcactcaccatcagcagcctgcagcctgatgattttgcaacttattactgccaacaccgaggggcgttcggccaagggaccaaggtggaaatcaaacgtgcggcc

SEQ ID NO: 6086 - DNA, 397 bp, Homo sapiens
  SIMILAR (1)..(396): 931254mologous to synthetic construct 3D6 antibody light chain,accession number A21386,Smith-Waterman Score=630.
gtccccgctcagctcctggggctcctgctgctctggctcccaggtgccaaatgtgacatccagatgacccagtctccttccaccctgtctgcatctgtaggagacagagtcaccatcacttgccgggccagtcagagtattagtagctggttggcctggtatcagcagaaaccagggaaagcccctaagctcctgatctataaggcgtctagtttagaaagtggggtcccatcaaggttcagcggcagtggatctgggacagaattcactctcaccatcagcagcctgcagcctgatgattttgcaacttattactgccaacagtataatagttattctcggatcaccttcggccaagggacacgactggagattaaacgaactgtggctgcaccat

SEQ ID NO: 6087 - DNA, 444 bp, Homo sapiens
  misc_feature (1)...(444): n = a,t,c or g
attttgttttctagtcggtaacctctattgaagaacgaactaggccaattctctccaaaacattgaaaggtattttacataagggtatttactaatcannnnnnnnnnnnnnnnnnnnnttggngaaagtaatcagtgcttgttctagatttcctcttaatgccttgtatatggtcaggtaataattacttacaactttagacatattaatagaattaattgctcttttagtagaatattttaaaatctctaagaaatcaaatattactttgattaaagaggattggattttgatgtttttctagaccgtaatactctatagtttgtttacatgtgtattatcctttctggtgagttttttttgcttgcattaattatattttttctgttttagaattggggcttgttgatggacaagaactggcgcgtgctgatgtcaccact

SEQ ID NO: 6088 - DNA, 1608 bp, Homo sapiens
  SIMILAR (3)..(134): 931254mologous to Homo sapiens dJ329E20.1,accession number AL031005,Smith-Waterman Score=222.
  misc_feature (1)...(1608): n = a,t,c or g
acgggcggcacaccctgggggagaacatcgccgacaacgggggtctcaaggcggcctatcgggcttaccagaactgggtgaagaagaacggggctgagcactcgctccccaccctgggcctcaccaaaaaaaaagaaaagagaaacagctgtcacctcccgcaggacccaaatcctctctctgagcaccgtcatccaccacatggctgggcctggctcccaggaccagtccagtcctctagtgccttatctgaggctgcagccgctcagtctccaccccaaggcaggacagcccctgctcctaggatgcccttggcctccgcagtgcagcccccaggtgtcctgtactgaagcacaggtccatagccccatttccccggtgcctgcagggctaaacctccacgggagcccaggagctctggccggcaggtccatggcacagggcatcggaagactgcaaaactgctggacttaccctgggcttgcagtccattgtcggcccctgggttgaatcaagatagtacttgcagctagatgggatgcttttaagccagggggacattgttgagggggaagatttcttccacccagttcttggcctgtggtgtctgtctcctccctgagaccacagcttctccagtagcagactcatgggcgccaccaagtggaagcacctgggagcggcctctgccatccagtggggaagccaggccccgagacggaggtggggggcagcacgtgcccttccacagccaccgctttcccgccttcagcagcccagggcctcctggcccagccctgcctgggacagtgcttttcccttcacccggggaaagctggaatcctccttgncccgaggagggaagcagacgggcacagggacacccctgccaccttgggactctgccttcaagcttggtgcaagggtatcgagagtggattccagatggaggtcctggtcccagcacgcagcagtcctggtagctctgcagaggagacaggaacccgagaagtagctgaagcagaagccagccggcagtccccttgcccacatagaggcggggcttctcccagccatggtgtccccctctgcctccccctcccccgaccctccgtgccctttccgcgtggagggtggttggtccctgttagtgtcagcacccagcacccatgggccttggaacccccctcccctggacacaggcaggtgtcctaaaaanggagggggncttgggggtgccaagcccgagggaatggaaaaccacactcatgggctcagggttctgccggggccggcaggggggttggggaagaagagggctcagggcccagcaggggtggaagccccctgccccctgcccctacccgctccagagtctttaaggaaaatgaagtgagaccccctccccttaggccctggggagccatagggctggcttcctctgtgggtgcgtggaccgtggggttgggagtctgggaatcctattttttgtattatgtattgagctactgtacctcttacggggctctattgtaatggacatatcttaacttgtacggagagagcacaatatttggggccgcctgcttaaaaaaatccaggcttcct

SEQ ID NO: 6089 - DNA, 667 bp, Homo sapiens
  SIMILAR (127)..(261): 861254mologous to Homo sapiens myeloid DAP12-associating lectin,accession number AJ271684,Smith-Waterman Score=210.
gtgaagaaggaagaacgttgcttgtgcaaaaggagcatattctcaggagacggggcccctgcctgccacaccaagcattaggccaccaggaagacccccatctgcaagcaagcctagccttccagggagaaagagaagtttcttcaggacataactgatgctgagaagtattttattggcttaatttaccatcgtgaagagaaaaggtggcgttggatcaacaactctgtgttcaatggcaagtacgtgaacatgccacagtttcctggggatcttggtttgcttcaaaagaccaaacctgagattgctgggttcaccctggaatagctcaaacgctgacacttgactctgttctgctcttctcctttcttccaacccatctattccctatctgtctaccagtagcggtccttgcccatttgggaaactgagcttctttcttctgcactgggggactggatgctagccatctccaggagacaggatcagttttacggaaacaactcagttagtatagagatgaggtccgcttctgtagtactgagcatttctgactgatcaaaaaggcctagtctgttgacagggtttgttttattttagcctcagagtataccatactactagggagtaaccacacagcctcctgcaagaagtgggtgggaagttt

SEQ ID NO: 6090 - DNA, 1617 bp, Homo sapiens
  SIMILAR (459)..(1550): 791254mologous to Oryctolagus cuniculus elongation factor 1 alpha,accession number U09823,Smith-Waterman Score=1401.
  misc_feature (1)...(1617): n = a,t,c or g
gagaagccgctgattacgccaaggttggcacgaggggtttgccgccagaacacaggtgtcgtgaaaaactaacccctaaaagccaaaatgggaaaggaaaagactcatattcaacattgtcgtcattggacacagtagattcgggcaagtccaccactactggccatcatgatctataaatgccggtggcatcagacaaaagaaccattgaaaaatttgagaaggaggctgctgagatgggaaagggctccttcaagtatgcctgggtcttggataaactgaaagctgagcgttgaacgtggtatcaccattgatatctccttgtggaaatttgagacccagcaagtactatgtgacttatccatttgatgcccccaggacaccagagacttttatccaaaaacatggattacaggggacatcttcaggcttgactggtttggggggccccctttttgggggggttntcccctgattgttgctgctgggtgttggtgaatttgaagctgggtatctcccaagaaatggggcagaccccgagaggcatgccccttctggcttacacactggggtgtgaaacaactaaattgtccggtgttaacaaaaatgggattccactggagcccacccctacagcccagaagaagatattgaaggaaattgttaagggaaagtcagcacttacattaaggaaaattggctacaaccccgacacaagtagcattttgtgcccaatttctggttgggaatggtgacaacatgcctggagccaagtgcctaacatgccttggtttcaaggggatggaaaagtcacccgtaaggatggcaatgccagtggaaccacgctgcttgaggctctggactgcatcctaccaccaactcgtccaactgacaagcccttgggcctgcctctccaggatgtctacaaaattggtggtattggtactgttcctgttggccgagtggagactggtgttctcaaacccggtatggtggtcacctttggtccagtcaacgttacaacggaagtaaaatctgtcgaaatgcaccatgaagctttgggtgaagctcttcctggggacaatgtgggcttcaatgtcaagaatgtgtctgtcaaggatgttcgtcgtggcaacgttgctggtgacagcaaaaatgacccaccaatggaagcagctggcttccctgctcaggtgattatcctgaaccatccaggccaaataagcgccggctatgcccctgtattggattgccacacggctcacattgcatgcaagtttgctgagctgaaggaaaagattgatcgccgttctggtaaaaagctggaagatggccctaaattcttgaagtctggtgatgctgccattgttgatatggttcctggcaagcccatgtgtgttgagagcttctcagactatccacctttgggctgctttgctgttcgtgatatgagacagacagttgcggtgggtgtcatcaaagcagtggacaagaaggctgctggagctggcaaggtcaccaagtctgcccagaaagctcagaaggctaaatgaatattatccctaatacctgccacccaactcttaatcagtggtggaagaacggtctcagaactgt

SEQ ID NO: 6091 - DNA, 1191 bp, Homo sapiens
  SIMILAR (4)..(135): 931254mologous to Homo sapiens dJ774I24.1 (similar to PREGNANCY-ASSOCIATED PLASMA PROTEIN A PRECURSOR),accession number AL031290,Smith-Waterman Score=234.
ccacgcgtccgctgccactatgacgcgggagactgctgctcttccacactctcctccaagaaggtcattccatttgctgctgactgtgacctggatgagtgcacctgccgggaccccaaggcagaagaaaatcagtaactgtgggaacaagcccctccctccactgcctcagaggcagtaagaaagagaggccgacccaggaggaaacaaagggtgaatgaagaagaacaatcatgaaatggaagaaggaggaagagcatgaaggatcttataagaaatgcaagaggatattgataggtgtgaactagttcatcaagtagcccaagtaggagagaatcataggcaaaagtttctttaaagtggcagttgattaacatggaaggggaaatatgatagatatataaggaccctcctccctcatttatattctattaaatcctatcctcaactcttgccctgctctccgctccaccccctgccaactactcagtcccacccaacttgtaaaccaataccaaaatactagaggagaagttggcagggatactgttaatacccattttgaagtggattgccatctttcagagcttgtctgctctcaacttggctctttttctttttgtgtagtttcccttaaataatgaagttagttattaattctttataagtatttaaacataattatataaatatattatatatattatatttttgctgtttactaagctaaaaattattcattgttccacacatgctgctgtgaagttcacattcaagatgaatgttgagactttgaggacagaaaggcaacttattttcccatctttctatggatgcggattggcaggttggaatgggaagtacagaaggagaagagagtaattagatggaattctggatgctagcatgtaaagctaatcatctttttttttatgacctgggagctgggcccattttatgaccaaggagatggggagttggaatggtggtactaagaggcataggaagttgagtgtgaataccattggtgatgggtccaggagaactagactatggttcttgaatatctgtccacaaagaatatactaacttttgtcaacttctcagaactcccaactggagtcggtgagacctaggattttctgcacttccacacatgcctgttccaagtgtggctgtcagccagtcaac

SEQ ID NO: 6092 - DNA, 1797 bp, Homo sapiens
  SIMILAR (817)..(996): 451254mologous to Homo sapiens Human secreted protein, SEQ ID NO: 7871,accession number AAG03790,Smith-Waterman Score=101.
  misc_feature (1)...(1797): n = a,t,c or g
gttnccttgtaacactgtgaacatgaacatgaaaatgcctgttgttgcccccgggtgcctgcctggggtgcccaacngcacctcctcaactgaaatacgaatatccactgtgtgccagagaaaaacgggccaatcagggggataaacataacccttctcctgggctgggagacccatttcttgcgactttgctgcttgaattcactcattaaactgctcaaaggaaaagctctacccctgatttctgagagtctacagcaatatatgtaaccccaattatatatgaagactattgactaccaggacaatagcaccatgaacctttccttcaagagaattcaaccaagagaagagagtggttgccaataagctgggggccaaaaggaaggctctcaggaatattctctaccatccaaaatcaacagcaaaagccagaaaaggggcatgagctctaattcatttgaagagaacacccacaaaaacagtttaacaaagggatctctttcccaacacatgctccctctcccatgaggctcaaccgtcagttgcagggcttgcctgatgtggacaatgtggataccctcagccctgagttgaaacttggcatgccacctttgattccccatgctgcaaaaagaattggaacgctgttcaggtcctggcacagtggtaatggctatatcctatttcactcacacacgtccttttaaagtctcccttcctcaagctattaaatagaaccctctagggatcctgtatgcagtgagggtctgaactgatgatccatatgtcaatcagtagttggaggaggatgactttttttttttttttttgagatagggtcccactttgtcccccagactggagtgcagtggcacgatcatggctcactgcagcttcagtctcccaggttaaaggaatcctttcacctcagcctactgagtgtgcaccaccaggtccagctaattgtttttttaactttttttttttttttttttttcttggtagagacagggtctccctctggttgcccaggatggtttggaactcctgggctcaagcaatcctcccactttggcttcccaaagtgctgagattaccaggcatgagccactatgccccaacctgagcaggatgacttaaacctgaatcaatcctactcccaaaacagcaactatcattaagtcaggggtgtcaaggaggactctgtgaaggcaaagactagactgggatgtgtgcgagagtggggataagaaggcccatccctaggcagactgcagggagtgactctgggcataggaattcatgggccagccctaactaagtgtgatggggtgggcagggagggagggcatctgcttcaggtgtttcaaaccaaaatccttaacaagttctgggggttgggacctcttgttgttcactcctggaatcccaatgtaatccgttacctttacaagaaactggtgtggttctttgtctgctaagggcaagacctgttttctgaatttactttctgataataaagtaacaccatggaaaagaagaacctcagaaaaatatggggtcaccacatgggctttcccagtgctagctgcctgttttggaaagctgcaatgtaggctacagagggcagtctgaaaagagtccttctgctttcgcttcctggagcttaagaagaaaagaggaattaccaaggttgtggtgggttatttactctggaaatatcttggtcacactgtccgtggcaaaagcggaaagcctagcttatgtggatagttgaaggtgactgtgtgggcc

SEQ ID NO: 6093 - DNA, 1509 bp, Homo sapiens
  SIMILAR (15)..(347): 401254mologous to Schizosaccharomyces pombe Eso1,accession number AB039861,Smith-Waterman Score=166.
cccacgcgtccgaaacacttctcttcatttccaatgacaaaaaagtagttggctgcctaattgcggaacatatccaatggggctacagagttatagaagagaaacttccagttatcaggtcagaagaagaaaaagtcagatttgaaaggcaaaaagcctggtgctgctcaacattaccagagcctgcaatctgcgggatcagtcgaatatgggtattcagcatgatgcgtcggaagaaaattgcttctcgcatgattgaatgcctaaggagtaactttatatatggctcatatttgagcaaagaagaaattgctttctcagatcccactcctgatggaaagctgtttgcaacacagtactgtggcactggtcaatttctggtatataattttattaatggacagaatagcacgtaaaacaaattcttgcctacaccactagaagacatctattgaagagaatggattggttgctgactttaaccaggaactagggccatttttattacaatgaactcaggactggcaacaaccatatggttgttccattttcataaaattggaaacaatgcagtaatagcttattgttttgttttttaaagaagatattttattatcttttacagaaatttatgattgatgtattttatctatagttatttagacatgtttacatgcagcagataattgttcatagtggactgaaaactaatgcaaggactatggtctcagtgataagtatattttgaagttcttaatatggaaatataccagtgtagcttggtactgtatttttttatattgatctgctgataccagtgataggcttaaagattgtattttcacagagtgggaaaccaatttttttagttattgttcaaggaggggtgcaatattaagtgttttgggaattttgaaggctaatttttaaaagggcctgaactatactttggaagggaaccccctatagggaaaggggaagctccccgcctaaatagggaaggaattaggaatattggagctttttttttcctgatttttctctttcctatctttgatgggaaggagggaagtaggaaagtgggtaaaggaattgaggctttccttcttgggagagctgttaaatggacaagcattagggaaaggtaccctcctagattcattattctttcattctggcttcacttttaaaataaatggcaacttgggcacaccttaggctgttaacaaaatctcaaagaggtttataaaaacgtatagaatacttggaagcaaagtatggatgactcggtatctgctttgttattcctcagaaatactgcactgagtatatgccctcattactggacttcattttgatacttgtctatccttcatagtgccctctacttttaaagggtttatatgttgaaaaactgctgtggcccttttatgacctgtatataatgtagaataaaaataataaaatacttgatagctttttctcagtgaccaatgtactaactaaaaa

SEQ ID NO: 6094 - DNA, 411 bp, Homo sapiens
  SIMILAR (4)..(252): 841254mologous to Homo sapiens HSPC242,accession number AF151076,Smith-Waterman Score=351.
  misc_feature (1)...(411): n = a,t,c or g
ntgaactccagcttgcgcaagctctaccccaacagtgggaaagcccagttcctcctgaatcatactctggtacctggcctgtgcatcggcctcctgcttcatgtcaacctcctactcctgccagggaatgtggacacctggctccctggtgtccaaagaccctggcacctgggtgggtttgagctggacagaagcttagagacaaaggcttcaagaagcagtggctgcagggagtcacagaagggcaggacctgaacgctgtctgcttccctggaatccaagatgctgagtggaagtggaccctgggtggcccggccctgtctttttcaggagtgcagtaccagggacacctcaggacagattctctggccaggcccttccctgacccgaataaatcctgaagaggttgtt

SEQ ID NO: 6095 - DNA, 455 bp, Homo sapiens
  SIMILAR (3)..(122): 821254mologous to Homo sapiens HSPC242,accession number AF151076,Smith-Waterman Score=156.
ggaccaccaccgcgcttgggctgttgaccatccccatcattatccaccccattgacaggtcggtggatttcctcctggactccagcctgcgcaagctctacccaacagtggggaagcccagctcctcctgatcatactctggtacctggcctgtgcatcggcctcctgcttcatgtcaacctcctactcctgccagggaatgtggacacctggctccctggtgtccaaagaccctggcacctgggtgggtttgagctggacagaagcttagagacaaaggcttcaagaagcagtggctgcagggagtcacagaagggcaggacctgaacgctgtctgcttccctggaatccaagatgctgagtggaagtggaccctgggtgggcccggccctgtctttttcaggacagattctctggccaggcccttccctgacccaataaatcctgaaaaggtt

SEQ ID NO: 6096 - DNA, 1593 bp, Homo sapiens
  SIMILAR (151)..(522): 881254mologous to Homo sapiens HSPC242,accession number AF151076,Smith-Waterman Score=542.
atggtaacagtgactcagtgctcagtccgccctcagtggcccgagtccgaggtgggcatcatggcaccagtttacatctcggaaagggaggctcagagaggctatgccaatgaggtgggcgaggctttccgctctcttgtgccagcggcggtggtgtggctgagctatggcgtggccagctcctacgtgctggcggatgccattgacaaaggcaagaaggctggagaggtgcccagccctgaagcaggccgcagcgccagggtgactgtggctgtggtggacacctttgtatggcaggctctagcctctgtggccattccgggcttcaccatcaaccgcgtgtgtgctgcctctctctatgtcctgggcactgccacccgctggcccctggctgtccgcaagtggaccaccaccgcgcttgggctgttgaccatccccatcattatccaccccattgacagggatcatccactctccagtgatgagagtggatcatccagtctccaggtcggtggatttcctcctggactccagcctgcgcaagctctacccaacagtggggaagcccagctcctcctgatcatactctggtacctggcctgtgcatcggcctcctgcttcatgtcaacctcctactcctgccagggaatgtggacacctggctccctggtgtccaaagaccctggcacctggctcagagaggtagagaggtgggagcacagggctgaagcagacctgggcccctctcagccctgccccaagcaccaaatcagctcccaccaagaccctggccccatcccttgcagcccagtccctgccatacctggctatgaggtcttcactgccccattcaaagcttatggcttcatccaactggtgagggggctgttggaggctcacgaggacaaggctgccaagagccagggagtacccgggagattcgggggagaagagctggggtgtctgggctggaaagaagggtgcctggtgaacggcaagaacttccactcccacttcgtgccccaagaggtccccaagagactggagctctccttccaggccttcagctttactggtactcctgctgatgtcccatctgatgctaccaagaaggcctgttccttccacaggggcactcatggctggtatacctgcaccctctcccatgtgaacaacatggttctgggtaatgggggctgtcatccagtctcctccctgcccctgctggtgcacttcctgcctctgctggtgcactttctgcccctactggtatatttgctgcctctgctggggcgcttcctgcctcggctggtgtatctcctgcccctgctggtgcactttctgcccccgctgatgcacttcctgcctctgctggtgcacttcctggctctgctggcgcacttcctgcctctgctggtgcacttcctggctctgctggcgcacttcctgcccctgctggtgtatttcctgcccctgctggtgtacttccttcccctgctggtgcacttcctgcctctgctggcgcacttcttgcctctccaggccctacctagcctctccctcttatatatggaagtcttcccagttcactga

SEQ ID NO: 6097 - DNA, 595 bp, Homo sapiens
  SIMILAR (356)..(472): 691254mologous to Homo sapiens HSPC242,accession number AF151076,Smith-Waterman Score=120.
ggcacgaggcgattagcgccaacagctcagagaaaacgtgacgaaaaccagtctgtaaaacccgagcctgggagaggggcttcggtgcgcggggggaatttgcagacgctccctgctggcggagatttcctgacctgtccttcggcgcgggactttcggcgggtcccggccgggcagacccaagtgccggcggcggagactgcagtggagccagtaccggctgtagtggccggggcccgtggcgggagagtcatgtcagagccgcagccgcggggcgcagagcgcgatctctaccgggacacgtgggtgcgatacctgggctatgccaatgaaggtgggcgaggctttccgctctcttgtgccagcgcgggtggtgtggctgagctatggcgtggccagctcctacgtgctggcggatgccattgacaaaggcaaagaaggcttgagaggtgcccagcccttgaagcaagccgcagcgccagggtgactgtggctgtggtggacacctttgtatggcaggctctagcctctgtggccattccgggcttcaccatcaaccgcgtgtgtgctgcctctctctatgtcctgggcactg

SEQ ID NO: 6098 - DNA, 944 bp, Homo sapiens
  SIMILAR (305)..(532): 671254mologous to Homo sapiens HSPC242,accession number AF151076,Smith-Waterman Score=257.
cggcggagactgcagtggagccagtaccggctgtagtggccggggccgtggcgggagagtcatgtcagagccgcagccgcggggcgcagagcgcgatctctaccgggacacgtgggtgcgatacctgagctatgccaatgaggtgggcgaggctttccgctctcttgtgccagcggcggtggtgtggctgagctatggcgtggccagctcctacgtgctggcggatgccattgacaaaggcaagaaggctggagaggacggtggatttcctcctggactccagcctgcgcaagctctacccaacagatggggaagcccagctcctcctgatcatactctggtacctggcctgtgcatcggcctcctgcttcatgtcaacctcctactcctgccagggaatgtggacacctggctccctggtgtccaaagaccctggcaacctgggtgggtttgacgctggacaagaaaccttagaagacaaaggcttccaaagaaagcagtggcctgccagggaagtccacagaagggacaggaccctgaaacgctgttctgcttcccctggaatcccaagatgcctgagtggaagtggaccctgggtgggcccggccctgtctttttcagggaaaattaccatcctccccatgaaggatgagagactgaggctcagggagggcaaggaataggcccaagatcacttggcaagctgggcacccaggacccccaggtgcttgacagagtcaccccatggtggtatggctgaacaaggagcggcagacaactcagggagaaactcaggagtgcagtaccagggacaccttcaggacagattctctggccaggcccttcccttgacccaataaatcctgaagagcaaaaaaaagaaaaaaaaaaaaaaaaaaaaaaaaagtcgtatcgatgtcgagcgatcatgatgatgatgatgt

SEQ ID NO: 6099 - DNA, 550 bp, Homo sapiens
  SIMILAR (363)..(548): 831254mologous to Mus musculus XY body protein,accession number AF120206,Smith-Waterman Score=254.
gaggaggggaaagcgggggctgcgggagggggaggtggtagttgcggcgctggttcccgggagcagccgtcgagccacaactgcggaggaggagttcgggaaagcggccgtcgggactcctcccctccgtcgtctccgccccggttgagaggcgcctcggcgcatcggagggaccctcccccgcgcttcctcaggctgctgtcgccgctgctgggagatgggcctactcgcccgccaccctgcgctgccgccgctctgaggagttaaagaacatccatgatagcagtcttctgtaaatcgaacttttcaagaattctctgaaggaaccaagtaggatattcttacatcatgacttaatgtgaatgcaagaacaagaaataggttttatctctaaatataatgaagggctgtgtgtaaacactgaccctgtctcaattctaacaagcattttagacatgagtttacatcggcaaatgggttcagatcgagatcttcagtcctctgcttcatctgtgagcttgccttcagtcaaaaaggcacccaaaaaaaa

SEQ ID NO: 6100 - DNA, 623 bp, Homo sapiens
aaataaatgtgctcccccaccacggtgaaattctcacacccttgaaaggaccacgcggcttttttcacaatacccaagaggtggagacagccctcatccccttctatagatgaatggagaaatataatgtggtccagccacacagtggaatattatacagccatgaaaaggaacaagcagctttattcacaatagccaagaggtggagacagcccgtcgtaccatatctcatagatgaatggagaaatataatgtggtccagacacacagtggaatattatacagcccatgaaaaggaacaagcagcttttattcacaatagccaagaggtggagacagcccctcataccccccatctatagatgaatggagaaatataatgtgggtccagccacacggtggaatattacacagccatgaaaagggacaagcagctttattcacaatagcccagaggtgggagacagccctcatacccatcttatagatgaatggaaaaatataatgtccatccacacagtggaatattacacagccatgaaaaggaacaagcagctttattcacaatagccaagaggtggagacagccctcataccccatctatagatgaatggagaaatat

SEQ ID NO: 6101 - DNA, 408 bp, Homo sapiens
  SIMILAR (88)..(408): 531254mologous to Mus musculus putative,accession number AK005147,Smith-Waterman Score=281.
  misc_feature (1)...(408): n = a,t,c or g
cccacgcgtccgcccacgcgtccggactagttctagatcgcgagcggcgcccnnnnnnnnnnnnnnaaggcggcgggaaaaaggggggactttaaaacggagggggcttaccaaaggcagcggaccatttttaaaaacaaaaaaagggcccggcgggaaaaaacgggcagggaaaacctccgggggaattacaaaaacatgggccggggtttaaaaacccccaggggggctttggggggcccctacttggacaaaaaaggccctttaaggggaaaggggccctttcaggggggaacccttttnnnnnnnnnncccaaaataaaaatccaggggaccttgtgaatccgccgaaactattggccttacatccgaaggtacaaccgtttcaaaaagcgccaaaaaaacatg

SEQ ID NO: 6102 - DNA, 477 bp, Homo sapiens
  SIMILAR (16)..(258): 561254mologous to Homo sapiens PRO1902,accession number AF118082,Smith-Waterman Score=208.
tgagacaggttttgtgtcgccgaggctgaagtgcagaggtacgaccatagctcagttcagaagcctcgacctcccatgcttaagttatcctcctgcctcagcctcccaagtaactgggattatgagattacaggtgcaccaccacacccagctaatttcttaactttttgtagagacaagggtctcacactgtgttgcccgggctggtctcaaactcgtggcctccagtgatacttccacctcaacctcgcaaagtgctgggattttaagtgtgagccaccgcacctgggccaaatctttactctgttaagcaactgcagccaggggacttttgggttactgcagcataacccaacctgtttctgcccaattctgggtacatgagagaatgcaaggaagaaaaaaaggaggggaggcaggagaaaggagggaggagatgagagttgctgggctctctcggaggcctgctgtgaccat

SEQ ID NO: 6103 - DNA, 762 bp, Homo sapiens
gctttaatttactggcagaggaagataagcatatggccggctttgacccaggttgccatccagtatctaagttgccccatgtgtagttggcaatctgaatgtatctttactaaaaatagccactttcatccaaaacagatcatgagcctggactttgacaatatagaacaactgatgtttctgaaaatgaacttgaaaaatgttaactacgattattctacgttggttctgagctgggatcctgagcagaatgaagttgttcaaagcagtgaaaaagaaatactgccttaatttctttttctccatttaaaatgggcaactttttgctgtgttactgtatcttaatagctgtagttgttaaatataatcattatctttataaacacatctggggaaacctgaaatcacacaagggctgaaaattcctcagaggcaatataattttgataaaatgaagattaaagatttcatagctataactgtggcgctacgacttggaaaattttgcttataccaatgagagagaagatatttttaattaaaaaaaatatagtgcagcattgaaaggccttaggctttcttcctggtagattgaactagtaattggttttaagtaaaacttcccccaccatgggaaattttattgctctgaaatcaacgaaatgagaaaaaagtacactggctggcattcctcctgcccctgtttttctgtttccttaaaaaccctgatgcttaattacaacttggcaaaaagaaaacccg

SEQ ID NO: 6104 - DNA, 888 bp, Homo sapiens
  SIMILAR (343)..(621): 831254mologous to Homo sapiens herpesvirus associated ubiquitin-specific protease (HAUSP),accession number Z72499,Smith- Waterman Score=380.
atggatgacttcctacaaaaattgaggcagaagatcaaaatcggagtggtaggcggatcggactttgagaaagtgcaggagcaactgggaaatgatgcctttaagccccagtcagaccggtcttcatattgtccctctgacagcccccctcacctccccatcactgaaacagaatctccagcacaggaccccgaaaaaccagagaggcttattgaccccttcactggagagtctgacttgataggattgtatctccagagctattcgctgtacgacgtcaatgatgatgacgcgagcgcaactcgagtgatgcgatgtcaaactcgttacgatagcgtactgctgctagaaattgtaagctacaaaatcattggtgttcatcaagaagatgaactattagaatgtttatctcctgcaacgagccggacgtttcgaatagaggaaatccctttggaccaggtggacatagacaaagagaatgagatgcttgtcacagtggcgcatttccacaaagaggtcttcggaacgttcggaatcccgtttttgctgaggatacaccagtttaaaattgcaattgtaatgatggaccgacaccagtacataaatgaagacgagtatgaagtaaatttgaaagactttgagccacagcccgtctgctccgcaaaagaaacaggattatctgctcaactgtgcagcacaatgcaagtagaagttgcagcacgcaccggccggaaccgagctgcacagatgcagttagggcaagggatgcccctacctggatggagatctgtgacacacaagagccaaaggatcaacaccgagaatgcagggccccaatgccatgagaaacacaaacgactaaccaacaggctccacctccctcgttaa

SEQ ID NO: 6105 - DNA, 810 bp, Homo sapiens
  SIMILAR (47)..(172): 831254mologous to Homo sapiens herpesvirus associated ubiquitin-specific protease (HAUSP),accession number Z72499,Smith- Waterman Score=183.
ctgatatacagaaataacggaggagttttaattttttttcttttagtttaaatttgcaattgtaatgatgggccgacaccagtacataaatgaagacgagtatgaagtaaatttgaaagactttgagccacagcccggtaaggtatctccccccccccgggtctggtgtgggtttcagactaagaaaccagtggtctggggctgggaggggcagccccagggttcaagtgccagctcctctctctccactggccgacctgtggaaccaggagcaatagcattccataacctacgagttcttaacagatccttacatcctttgtaacctgtgagatcttcaaggagagaagcttggatatgtgtgcagggtgattgagactcagggttgtgagggcagtggctctgaggcgcagtcagggtgtgggcctccttagctccaggtgggcgtgtagctcaggtcctggcttccctgcgaacttaccccttggggagccacagggatgcatgcctcactggccaccaccccgctgaggggttccagggctgctctgtggcctcacttgcttttcttcatccccaccaggtaatatgtctcatcctcggccttggctagggctcgaccacttcaacaaagccccaaagaggagtcgctacacttaccttgaaaaggccattaaaatccataactgatttccaagctggtgtgttcaaggcgaggacggtgtgtgggtggccccttaacagcctagaactttggtgcacgtgccctctagccgaagtcttcagcaagaggattcgctgctggtgtaa

SEQ ID NO: 6106 - DNA, 4080 bp, Homo sapiens
  SIMILAR (200)..(3514): 941254mologous to Homo sapiens herpesvirus associated ubiquitin-specific protease (HAUSP),accession number Z72499,Smith- Waterman Score=5489.
  misc_feature (1)...(4080): n = a,t,c or g
gtacgtgcgcgtctccctgccgccgccgccgcccgccgcgggccgccccggggccgccgtcgccgacgacgcgcgggaggaggaggaggaggccgccccgccgccgccgccgccgccgccgccccggctcgccgccgcccgcccgccgggctcgcagccccggcccccggccgcaggcgaggcccaggccgcggccgacatgaaccaccagcagcagcagcagcagcagaaagcgggcgagcagcagttgagcgagcccgaggacatggagatggaagcgggagatacagatgacccaccaagaattactcagaaccctgtgatcaatgggaatgtggccctgagtgatggacacaacaccgcggaggaggacatggaggatgacaccagttggcgctccgaggcaacctttcagttcactgtggagcgcttcagcagactgagtgagtcggtccttagccctccgtgttttgtgcgaaatctgccatggaagattatggtgatgccacgcttttatccagacagaccacaccaaaaaagcgtaggattctttctccagtgcaatgctgaatctgattccacgtcatggtcttgccatgcacaagcagtgctgaagataataaattacagagatgatgaaaagtcgttcagtcgtcgtattagtcatttgttcttccataaagaaaatgattggggattttccaattttatggcctggagtgaagtgaccgatcctgagaaaggatttatagatgatgacaaagttacctttgaagtctttgtacaggcggatgctccccatggagttgcgtgggattcaaagaagcacacaggctacgtcggcttaaagaatcagggagcgacttgttacatgaacagcctgctacagacgttatttttcacgaatcagctacgaaaggctgtgtacatgatgccaaccgagggggatgattcgtctaaaagcgtccctttagcattacaaagagtgttctatgaattacagcatagtgataaacctgtaggaacaaaaaagttaacaaagtcatttgggtgggaaactttagatagcttcatgcaacatgatgttcaggagctttgtcgagtgttgctcgataatgtggaaaataagatgaaaggcacctgtgtagagggcaccatacccaaattattccgcggcaaaatggtgtcctatatccagtgtaaagaagtagactatcggtctgatagaagagaagattattatgatatccagctaagtatcaaaggaaagaaaaatatatttgaatcatttgtggattatgtggcagtagaacagctcgatggggacaataaatacgacgctggggaacatggcttacaggaagcagagaaaggtgtgaaattcctaacattgccaccagtgttacatctacaactgatgagatttatgtatgaccctcagacggaccaaaatatcaagatcaatgataggtttgaattcccagagcagttaccacttgatgaatttttgcaaaaaacagatcctaaggaccctgcaaattatattcttcatgcagtcctggttcatagtggagataatcatggtggacattatgtggtttatctaaaccccaaaggggatggcaaatggtgtaaatttgatgacgacgtggtgtcaaggtgtactaaagaggaagcaattgagcacaattatgggggtcacgatgacgacctgtctgttcgacactgcactaatgcttacatgttagtctacatcagggaatcaaaactgagtgaagttttacaggcggtcaccgaccatgatattcctcagcagttggtggagcgattacaagaagagaaaaggatcgaggctcagaagcggaaggagcggcaggaagcccatctctatatgcaagtgcagatagtcgcagaggaccagttttgtggccaccaagggaatgacatgtacgatgaagaaaaagtgaaatacactgtgttcaaagtattgaagaactcctcgcttgctgagtttgttcagagcctctctcagaccatgggatttccacaagatcaaattcgattgtggcccatgcaagcaaggagtaatggaacaaaacgaccagcaatgttagataatgaagccgacggcaataaaacaatgattgagctcagtgataatgaaaacccttggacaatattcctggaaacagttgatcccgagctggctgctagtggagcgaccttacccaagtttgataaagatcatgatgtaatgttatttttgaagatgtatgatcccaaaacgcggagcttgaattactgtgggcatatctacacaccaatatcctgtaaaatacgtgacttgctcccagttatgtgtgacagagcaggatttattcaagatactagccttatcctctatgaggaagttaaaccgaatttaacagagagaattcaggactatgacgtgtctcttgataaagcccttgatgaactaatggatggtgacatcatagtatttcagaaggatgaccctgaaaatgataacagtgaattacccaccgcaaaggagtatttccgagatctctaccaccgcgttgatgtcattttctgtgataaaacaatccctaatgatcctggatttgtggttacgttatcaaatagaatgaattattttcaggttgcaaagacagttgcacagaggctcaacacagatccaatgttgctgcagtttttcaagtctcaaggttatagggatggcccaggtaatcctcttagacataattatgaaggtactttaagagatcttctacagttcttcaagcctagacaacctaagaaactttactatcagcagcttaagatgaaaatcacagactttgagaacaggcgaagttttaaatgtatatggttaaacagccaatttagggaagaggaaataacactatatccagacaagcatgggtgtgtccgggacctgttagaagaatgtaaaaaggccgtggagcttggggagaaagcatcagggaaacttaggctgctagaaattgtaagctacaaaatcattggtgttcatcaagaagatgaactattagaatgtttatctcctgcaacgagccggacgtttcgaatagaggaaatccctttggaccaggtggacatagacaaagagaatgagatgcttgtcacagtggcgcatttccacaaagaggtcttcggaacgttcggaatccccgtttttgctgaggatacaccagggcgagcattttcgagaagtgatgaagcgaatccagagcctgctggacatcagggagaaggagttttgagaagtttaaatttgcaattgtaaatgatgggccgacaccagtacataaaatgaagaccgagtatgaaagtaaatttgaaagactttgagccacagccccgntaatatgtctcatcctcggccttggcttagggctcgaccacttcaacaaagccccaaaagatgagtcgctacacttaccttgaaaaggccattaaaatccataacttgatttccaagctggtgtgttcaaggccgaggacgggtgtgtggggtgggccccttaaacagcctaggaactttgggtgcacgtgccctctaggccgaagtctttcagcaagagggatttcgctgctgggtgtttaatttttatttttatttgagggctgtttcagttttggctttcttctgtatctatttgaacttgccctttttttgaggcaaaattgaaggatgtttttataaaagcttgggatgccaatgaggagttattttatgggtaaccacagtgtcaaggcaactgttcagcgcaatggggggagaagaggttagtgggatcggggggtccctggctcaaaggtctcctgggcctgtccctagtgggcacgagttggctcggctgccttcctggggggtcccgtgcaaccatccctgcagctagcaaagtcttgtgtttaaggctcgtctgacctatttccttcagttatacttttcaatgaccttttgtgcatctgttaaggcaaaacagagaaactcacaacctaataaatagcgctcttcccttcaaaaaaaaa

SEQ ID NO: 6107 - DNA, 840 bp, Homo sapiens
  SIMILAR (625)..(729): 801254mologous to Mus musculus inducible protein,accession number AF162472,Smith-Waterman Score=152.
ggaggcaggagaaacggaggaaagagggtgtaaagagaaggagagaagggggcgagaggtatagggggtgggtggagggaggggccacccccacgtctcagagtggccctggcttctcccaccacagtgtgctttcatgttgccagggcactgttggaaaagaggcacagtcacattcatatttccgcaatcccagcccaaaggccccccaaagccagcttcaaccgcagagtgtctgtgctgtcagagtgggtaggctggttttggaggttgcccaccttgctttttctgtgctcagattccatccctttgtagtcctagagaggctgtgttcccgcccctctcatattactggtaagtattatggaccaggtatctggaaaaggcctacagtttggatcctagatgaggctggcaccaaagaggaggaggaaggactgttccattaggcctgaagctcccacagtgttggacttagcaggctttcttgctgaggcggctgggataccatttggtgtcacccaagggagttgaccacgtgggctgagcaccaggagcagctaatgcctgttccacccaggcgcctgaggctgggaccctctccgaccccataattttctacccaggtggacgtgcacccagagcagcatcagcccccagtacaatatctgcgagcagatggttcagacctccgatgatctactccgcttcatcttccagcttgctcgctcatagaacagtgacgcgcagcacacctccacgtcgtgtaactatctcacatcatcgacgcgtaattaatcacgtgcccctcatacctccgcgttgtctcgcgcccgcacg

SEQ ID NO: 6108 - DNA, 2947 bp, Homo sapiens
  SIMILAR (1)..(798): 921254mologous to Mus musculus putative,accession number AK016683,Smith-Waterman Score=1275.
gggagactgaatgtgaaattgttgtataattcttcagtagaacagatctggatcacagttttacagtgcagagatttaagttggccctctagttatggagacactcctactgtttctataaaaggaatacttacattgcccaaaccagtgcatttcaaatcttcagccaaggaaggttccaacgctattgaatttatggaaacgtttgtatttgctattaaacttcaaaatctacaaactgtaagacttggatttaagattcaaacccagactcccaggaagaaaaccattggagaatgctcaatgtcactcagaacccttagcacacaggaaatggattactctttggatataacaccaccttcaaaaatttctgtttgccatgcagaacttgaattggggacttgttttcaagcagtaaatagcagaattcagttacaaattcttgaggcacggtaccttccaagctcatcaacacctctgactttgagttttttcgtgaaggtgggaatgtttagctcgggagagttgatttataagaaaaagacacgcttactgaaggcctccaatggaagagtcaagtggggagagactatgatttttccactcatacagagtgaaaaagaaattgtttttctcattaagctttacagtcgaagctctgtaagaagaaaacactttgtgggccagatttggataagtgaagacagtaataacattgaagcagtgaaccagtggaaagagacagtaataaatccagaaaaggttgttatcaggtggcacaaattaaatccatcttgaagacttcacacattaatttggtgaagaacttgacattcttttagaagacttatgatttcaatttgctaccaatgagaagaggcaaatcaacaaatttgtcaatttatgggggctataattatggtatataatgtatctgatagaaaatttgataagaaaatgtaatgaattttatcagatatccaaagtaaaggaaatgttttaaaactgcaacaagagacacagacagtaaaatcaaagtattattaggatgactaaataaattataaagtctgtgagaatatcaaccatagatagttctttctatattatgtttttgcttttgtattttaagctttacttaggatattcaaaacctgggtatatcaagtctctgttagtactattgggcatttaggaagactttaccattatttcagtgctagggcattattgattagggtcttgggctccactgtttacctcttgctatgtattttctcccggtaaaaatgaattgaaccatttcaactattttctatatttggagaaagtttgtgccctgtgttttataatttttttacccataagacatcacattatccctttgtaagctacttatctccaaaaaaacttcagaaatagaaaactacattttggcaggaataattgaaaacaccagaaggttgaagtttaattggaaacccagaatatacatactttgctgttttcttccctcaaatattttactatttgttttatttgggagttaaaataagagtatcatccatatgggtccatcctaattcacagaattaaatgagcttaaataggaaaattcagtattttatggataatcacttcgtttttagtttttaaaatttagattattctataatttaccgtgtttgagtattttccccattttttccataaccctacccgattatactgtgtagcaaatattttctattgcagttttctttccagtacttattagaactcagtatttggaaataatttcagcttaattgaccataaggaactgtgggccaaaaaggaacagttttttgggagagggcagatgacattatacctgattttaggaaaatctcacttttatttttggcttaataagtaggacttaaggtgctctgtgttctccaggtcttcccctttttttctggccccccattcttactttgtcccaggcatgcagagaaagatggtgatattttaggccaggagtataccttgctataacctaagcatgccttctttattccagctcctatgttctgtgtatatcattaacattttcccaaataaacacttaattctcttttccctaggtgccatctcctcaagctacaaaatgtccacatcttatatcgcctttgctggtactgctctgattttgtggtaccagtactctctgccactgaacattttgaaatatttttgttttagatttgcaaaaaatgacatataggtcagtactcacatggatttttaagataaatcacctgtgtgataatattttgaatctgagaccgaatacaacttttaaaaattgtttttaaaaatagactttttttttttagagccagttgtaggttaacagaaaaattgagaggaagatagagatttcctttctcccctgacaaagccctcaacagcctcccaggctatccagtatcctgcaccacaatggtacatttgttacaatcaatgaacctactctgaaacatcattatcatccaaagttcatgggtttacattagagtcccctcttggtgttatacatgctagaggacaaatatatgatgatatgtatgcatcattataatatagtatagtttcgctgccctaaacatcctctgcaaatgcaactattttaatgggtaccaaagaagtaaatgtatttactggcttttagataataaataacgggctttattgtttattttaaaagctacaatttgttttagctggtttctctgttctattaatgctttgaatttccaaatttaatatatgtagtcatgcatttaacttaatatttaattatttgatttatttaattttctatattcttacaatgtatgtatgatgtataatttaagggaaagctatgacttctcagtttcttagaatcctaggtaaa

SEQ ID NO: 6109 - DNA, 610 bp, Homo sapiens
  SIMILAR (5)..(457): 781254mologous to Mus musculus putative,accession number AK004757,Smith-Waterman Score=579.
cccacgcgtacgcccacgcgtccgctcattggctgctcttttggtcctgatactgcgaggcaatgagcttcggagcctgcatggcctaaagcaactgaggaatctgcggcacctggatttggcatacaacctgctggaaggacaccgggagctgtcaccactgtggctgctggctgagctccgcaagctctacctggaggggaaccctctttggttccaccttgagcaccgagcagccactgcccagtacttgtcaccccgggccagggatgctgctactggcttccttctcgatggcaaggtcttgtcactgacagattttcagactcacacatccttggggctcagccccatgggcccacctttgccctggccagtggggagtactcctgaaacctcaggtggccctgacctgagtgacagcctctcctcagggggtgttgtgacccagcctctgggtgctggccagtgaggtcccaaatgacccagggcttaagggagaggcgagagaatgatctggcctcaggggacaggccacctggtcaggaggaatatttttcctgcactttttctcaggtatcaataacgttgtttccaactcaaaaaaaaa

SEQ ID NO: 6110 - DNA, 454 bp, Homo sapiens
  misc_feature (1)...(454): n = a,t,c or g
ttggagaacaagcatgcactcacacatggggggcgcgcacacacatgcgcccacacatgtgcacacatactcacacaggcacatgcacgcacgcacatgcacgcacgcacatgcacacgtacacacatatgtgcacacacgcatggcttggtaggcttcacctgagagttatgaatgcaccattttccttggtgcattcataacactgtttgtgcctctcnnnnnnnnnnnnnnnnnnnnnnnnnnnnnnnnnnnnnnnnnnnnnnnnnnnnnnnnnnnnnnnnnnnnnnnnnnnnnnnnnnnnnnnnnnnnnnnnnnnnnnnnnnnnnnnnnnnnnnnnnnnnnnnnnnnnnnnnnnnnnnnnnnnnnnnnnnnnnnnnnnnnnnnnnnnnnnnnnnnnnnnnnnnnnnnnnnnnnnnnnnnnnnnnnnnnnnnnnnnnnnnnnnnnnnnnnn

SEQ ID NO: 6111 - DNA, 563 bp, Homo sapiens
  SIMILAR (400)..(495): 1001254mologous to Homo sapiens Ral guanine nucleotide exchange factor RalGPS1A,accession number AF221098,Smith-Waterman Score=176.
attgtgtgacacttgatagttattagaaagaggcagatcagggcaaaaacatttggaaaggatgatctcatctgtataaaagttctaagatgatacacaagaaatggtaattctgtagcttctagagagctttatgtatagtttgtacactgaataaatgtaattggccatccgtatgacaggaagacaagggttttggtcggcagccatctcaaggtgatccattgagacaaggtgccaagacctgaacaaggctgccgccgccccagcttgcattaggagaggaagagcatcctggcctcctccatactggtcacaccatgtgtgtctggggtccctcagtagctctgagggccgctctcttaagagcatagcacactgaagctcccctaccacacacaggaagccggagcagctccaggtccaacaggaactgacagccacgaggtggaccacctggagggcggtgcggggaaggaggcagggccctgtgcctgaagcctgggcaccatggtggccccagtcaggagcaacagtggtagccctgagtaaaacccattgtc

SEQ ID NO: 6112 - DNA, 386 bp, Homo sapiens
  SIMILAR (37)..(384): 771254mologous to Homo sapiens putative 38.3kDa protein,accession number AF164791,Smith-Waterman Score=466.
  misc_feature (1)...(386): n = a,t,c or g
tgctcctgagctggtgccgccgcgataggagagccaatggcctaacggggtgagggacacccaccctggagcgtggatgagcgggcggactccaccaacgtcaacaactggcactgtacggagagagatgcttcacattggtccacggataagctgaaaacactgttcctggcaatgcatgttcagaatgaagaacgcaacggtgaggcgactgaagtgagtaagcttgatggagaggcatccattaacaatcgcatagggaaacttatgttcttttatgaatggggcgtcanactggactggacaggtgcttcttagtctggtgtaccatacaaaggacatgtggagatcccctatttggctgatgaaaactgcgtggatgaagg

SEQ ID NO: 6113 - DNA, 1322 bp, Homo sapiens
  SIMILAR (153)..(497): 621254mologous to Homo sapiens Ral guanine nucleotide exchange factor RalGPS1A,accession number AF221098,Smith-Waterman Score=351.
agttgtttaataactgtatttgagtattatctttttcctttgtattttatacatttggaaacattattctgaggattgtccacaggcttaaccagacagccaaaggcaccatggccccaaaatggttacaagccatggtccaaagagaccactggagggagccctggaggctgctttctctgcatgttccagctcaccttggggccgaccttcccactttagttacccgtgtttacatttctctttatgccagtcaccagctgaccctcctacgtggccctcttcttaactcatggtttctctacccatcaggcaatgtttacaagtttcagactggttcccgatttcatgcaatactgtggcacaagcatttggatgatgcatgtaaaagcaacaggcctcaggaagccggagcagctccaggtccaacaggaactgacagccacgaggtggaccacctggagggcggtgcggggaaggaggcagggccctgtgccctgaaagcctgggcacccatggtggcccccagtcaggagcaacagtggtaaccctgagtaaaacccattgtcccctctttggaggagcggccagaggatgacagcagccccagcaggcagcagtgcctgggcaggctgatccagcagagcactaatgggtcagtttcatgtattggcagatgtggtgtagcatggcaaggctacaagttttaaggttttttgtctgattttcagacctggaggaggggatttttcttcctactttcccccttttttatttctaatttactttcaaccaaatattcccactatgtgctatatgtaataataaaaagttgacaacaactgaaatattcaacagcagaggatgatttaagtgaatcacagtacatccgtgtgatggaatgccaggagggtgtaagaaagagtgtgacagaaatgcatctattcacgaggaaacatcgcagtgactagagtgattttctgttctgtggaactgcatgtcctaaacttgtttttattaacactgaatacacttaaaccttatctataacatatgtataggtataaacaacagcaataaaaccccttattgcccccatgagcctaacagcagagcccccagggccttggaatgctgtccctccccatggccttttcctaattcggtttctctccctcccacctgtgccccagcccccctttcctgatttgtttgctgattattcctttaaaattgcaggtcacggacttgattccttcatgtgttgtttggggggcatttttaaacttttttataaatagaaccataaagatgaaaaaaaa

SEQ ID NO: 6114 - DNA, 1188 bp, Homo sapiens
  SIMILAR (205)..(612): 501254mologous to Homo sapiens p40,accession number U93567,Smith-Waterman Score=349.
atgaaggactggagacctaggaggaaaaaatggtttcctgggccaggtccagggccccattgctgtgaggaacctagggacttggtgtcctacatcctagctgctccagccatggctaaaaggggccaaggtagagctcgggttgtggtttcagagggtgcagcttggcagcttccacatggtgttgagcctgtgggtgcacagaagtcaagaaccaagctgaataacacagtacaagaatttcacaatgcaatcacaagtattaatagtagaataaaccaagctgaggaaagaatctcagaactcgaaaactggctttctgaaataagacagtcagacaaaaataaagaaaaaagaataaaaaggaatgaacaaaacctccaagaagtaggggattatgtaaagaagccaaatctacaaatcactgtcatccctgaaaggaagggggagaaagcaaacagtttggaaaacgtatttcaatatattgtccatgaaaacttccacaaccttgctagagaggacaacagtcaaatacaggaaatacagacaactcctgcaagattctacacaggaagatcatccccaagacacataattgtcagattttccaaggaccctgattctcttgaaggagacttacacaggctgagaattaaccttctctggcattctgccactcataagtacaggctgcacctgggcttcagttcagttggccttctggctgccagtgatgagggactttttaaaggcttccatggaggccctttgactctcacacttgggtttaaattggtggttaatagatttgatcctggcatctatacttagtgcatcaatggtgcttagcaataccctcccaattcaacaatctttcaagttacttttccacctgtactctcaaatactagatacatcacagaagttaatgcattcgcttctacttatatgctgtcctgggtcactacaagtaaaagtgttagcaatttcactgcaggagcacatctgagactatcttcagggaagagattctgatggaaccactggtgagtgagcaaactccagaatcccatcctcagactcaggtgtatataattactactgctatcaactgtcttagattgggctcttgcagctgaccctgagaattagattcctgtccaagtgattgcctgagggagtgctctc

SEQ ID NO: 6115 - DNA, 704 bp, Homo sapiens
  SIMILAR (5)..(400): 581254mologous to Homo sapiens unnamed protein product,accession number AK000010,Smith-Waterman Score=371.
caacatgcctacaaagttgcagaagttggacctgagtagttatccagaagcgacagaaaaaaacgtagaaaggattttgggattgttgcaaacctactttcgaaagtatcctgatactcctgtgtcctattttgagtttgtgattgatccaaactctttttctcgtactgtggagaatatattttatgtttcttttattgtaagagatggttttgcaagaataaggcttgatgaagacaggctgcccaatattagagccgatgaatgttaacccagatgggtgagggaaatgattcccagttgccatggcaggaaacagggagttatatctttgactttacaggagtggaaaaacattgtggcagcttttgaaatttctgaggctatgattacatactcctcatactaaagatttcttagtatagcatcctttttgtgtttttttttctgaagttagatggagagtaaaatgtaaactgaagcacatattgtatctcttgtaaagtgaaaaagtattttcaagaacatcagacattgttttactgtgcagcatatttttcttagtaatttataaggtcatgatcttctgttattaaaacaaattcactggcatatttatgggaacgttttattgaatgccctttaagactattaataaaaacaagttttggataccaaaaaaaaaaaaaaaaagggcggccgct

SEQ ID NO: 6116 - DNA, 425 bp, Homo sapiens
  SIMILAR (2)..(100): 1001254mologous to Mus musculus putative,accession number AK002983,Smith-Waterman Score=172.
  misc_feature (1)...(425): n = a,t,c or g
caaaggtttgcttgatgttacatgcaagactgttgccaatatgatcaaggggaaaactcctgaggagattcgcaagaccttcaatatcaaaaatgactttccctcttttttgtaaagcaatgtctgcctagtttattgtccagttaactttagtgaccttttaaaagttggcattgtaaataaaacaacttgcaaaaaagttttctggaatagaattaacaaaatattatctttattcatgagttggaaactggaaaaaggcttcttgaagtaaatgttctgagtggagctactaggatgtcttccagcctcctgcagtcaaggagtaccactgtattgattagcctgtatgtagcagggctcccttcattgcatctgaggactngntttctttttctttattnntaagtctcgtagttctaaaa

SEQ ID NO: 6117 - DNA, 985 bp, Homo sapiens
  SIMILAR (75)..(398): 741254mologous to Homo sapiens Human secreted protein, SEQ ID NO: 4841,accession number AAG00760,Smith-Waterman Score=392.
ttttcctcttccttcgctaacgcctcccggctctcgtcagcctcccgccggccgtctccttaacaccgaacaccatgccttcaattaagttgcagagttctgatggagagatatttgaagttgatgtggaaattgccaaacaatctgtgactattaagaccatgttggaagatttgggaatggatgatgaaggagatgatgacccagttcctctaccaaatgtgaatgcagcaatattaaaaaaggtcattcagtggtgcacccaccacaaggatgaccctccttcctcctgaagctgatgagaacaaagaaaagcgaacagatgatatccctgttggggaccaagaattcctgaaagttgaccaaggaacaccttttgaaactcattctggctgcaaactacttagacatcaaaggtttgcttgatgttacatgcaagactgttgcccaatatgatcaaggggagaaactcctgaggagattcgcaagaccttcaatatcaaaaatgactttactgaagaggaggaagcccacggtacccaaagagaaccacgtggtgtgaagagaagtgaaatgttgtgcctgacactgtaacacttgtaaggattgttccaaatactagttgcactgctctgtttataattgttaatattagacaaacagtagacaaatgcaggcagcaagtcaattgtattagcaagaatattgtcctcaattgcatgtgtagtttgaggcacagatccccaaaccttgacgggccaagtttcttcttaggtatggatggaaagtttctttttttctttgctctggaattaaaactggaactgtgggggttctctataagtggcattttgggctttccctctttttttgtaaagcaatgtctgcctagtttattgtccagttaactttagtgaccttttaaaagttggcattggtaaataaaacaacttgcaaaaaagttttctggaatagaattaaaaaa

SEQ ID NO: 6118 - DNA, 683 bp, Homo sapiens
  SIMILAR (512)..(637): 1001254mologous to Homo sapiens vimentin,accession number M25246,Smith-Waterman Score=215.
cccctgtagacccgcgctgcaggaattcggcacgagggaagctgctggaaggcgaggagagcaggatttctctgcctcttccaaacttttcctccctgaacctgaggggtaagcattttatttccctttaggaaaaacgtcagctgcttgtaaccactgtgtttatgtcaaagcattcattttttttaggatatctgaaaaaatgccatataagagaaaactctataaaacatctataattttcgaacccaagtacactcttgcattctatgctttaagttaaatgcaaactcctttttccttcttcctgctgcaagtactatctcatcctgatgctcaagagtgtcagggcctgggtttccaaacagagactaccctaaaattatttggggagtagtactttacacaattgcctctcccccacaaatcataattgtttcagtaaaatggttacttggtttttccaagaaaaaactcgtttttactcatttttggcctgtttgtttatttagaaactaatctggattcactccctctggttgatacccactcaaaaaggacacttctgattaagacggttgaaactagagatggacaggttatcaacgaaacttctcagcatcacgatgaccttgaataaaaattgcacacactcagtgcagcaatatattaccagcaagaat

SEQ ID NO: 6119 - DNA, 1949 bp, Homo sapiens
  SIMILAR (123)..(1385): 771254mologous to Homo sapiens vimentin,accession number X56134,Smith-Waterman Score=1431.
gggcgcgccagagacgcagccgcgctcccaccacccacacccaccgcgccctcgttcgcctcttctccgggagccagtccgcgccaccgccgccgcccaggccatcgccaccctccgcagccatgtccaccaggtccgtgtcctcgtcctcctaccgcaggatgttcggcggcccgggcaccgcgagccggccgagctccagccggagctacgtgactacgtccacccgcacctacagcctgggcagcgcgctgcgccccagcaccagccgcagcctctacgcctcgtccccgggcggcgtgtatgccacgcgctcctctgccgtgcgcctgcggagcagcgtgcccggggtgcggctcctgcaggactcggtggacttctcgctggccgacgccatcaacaccgagttcaagaacacccgcaccaacgagaaggtggagctgcaggagctgaatgaccgcttcgccaactacatcgacaaggtgcgcttcctggagcagcagaataagatcctgctggccgagctcgagcagctcaagggccaaggcaagtcgcgcctaggggacctctacgaggaggagatgcgggagctgcgccggcaggtggaccagctaaccaacgacaaagcccgcgtcgaggtggagcgcgacaacctggccgaggacatcatgcgcctccgggagaaattgcaggaggagatgcttcagagagaggaagccgaaaacaccctgcaatctttcagacaggatgttgacaatgcgtctctggcacgtcttgaccttgaacgcaaagtggaatctttgcaagaagagattgcctttttgaagaaactccacgaagaggaaatccaggagctgcaggctcagattcaggaacagcatgtccaaatcgatgtggatgtttccaagcctgacctcacggcttccctgcgtgacgtacgtcagcaatatgaaagtgtggctgcccaagaacctgcaggaggcagaagaatggtacaaatgtcaagtttgctgacctcttctgagggcttccaaccggaaccaatgagccccttcgccaggccaaagcaggagtcccactgagttaccggagaacagggtgcagtccctcacctgttgaagtggatgccctttaaaggaaaccaatgagctccctggaacgcccaattgcgtgaaatggaagagaacttttgccggtgaaagctgctaactacccaagaccactattggcccgcctgccaggatgagattcagaattattgacggagggaaatggcctcgctcaccttcgtggaataccaatgacctgctctaaatgttaagatggccccttgacatttgagatttgccaccctacaggaaagctgctgggaaggcgaggagagcggggatttcctctggcctccttcccaaacttttccctcccctgaaccctgaggggaaacctaatctgggattcactcccctctgggttgataccccactcaaaaagggacacctcctgatttaaggacggttggaaacttggagatgggacagggttatcaacggaaactttctcagcattcacggatgacctttgaataaacaattgcacaacactcagtggcaggcgatatattacccaggcaagaataaaaaagaaatccactatcattaaagaaacaggcttcaaagtgcctttactgcagtttttcagggagcgcacgatagatttggcctacggactcagctctagttctctaacaaccgacactcctacaagatttagaaaaaagtttacaacatacatcatacgtttacggcaaaatcttgtgctagaatactttttaaaaaggtattttgaattccattaaaacctgctttttttttttttccagtatagatctcaaccaacttggttctgcttcaataaatctttggaaaaactcaaaaaaaaaaaaaaaaaaa

SEQ ID NO: 6120 - DNA, 605 bp, Homo sapiens
  SIMILAR (6)..(215): 711254mologous to Homo sapiens PRO1902,accession number AF118082,Smith-Waterman Score=260.
cttttgaggcagaatcttactctgtcacccaggctggagtgcaatggcatgatctcagctcactgcaacctccgccccccaggatcaagcaactctcctacctcagcctccagagcagctgcgactacaggcacttgccaccgtgcccagccaacttttgtatttttagcagaaacggggcttcaccatgttggccatgctggtctcgaactcctgccagatggatccattgattccttcctgaacatgctttgaatagttacctcctgcatgttagtgccctacaaggcaggtaccatgtgcacacctctccatatctggaaatcatagccattctataaaccaaaccccttttcagatgctccatgaagccctgctgaccacactggaccttcctaaacgctctatagcacttacaacaatcacacatacacacatacacgcatcgttttactgacagtcctcttctgacatcaaattgataaatatcaacaaccaactacatacaaggcagtaagtatgcagaatacagaaaatgtgtaacacaaggactgtgcctcctccagaaagagccagtatcagtggtggttaataacaaaggttcc

SEQ ID NO: 6121 - DNA, 514 bp, Homo sapiens
  SIMILAR (258)..(380): 921254mologous to Homo sapiens GC-rich sequence DNA-binding factor candidate,accession number AF153208,Smith-Waterman Score= 221.
  misc_feature (1)...(514): n = a,t,c or g
cagttttggtcttcagttaaggagaaagtgatttttgagttccaaagtaaggtccatggtactcaacgaaatgcctgactaagccacaattaattttttcagcaagtagactacagtagtcctcccttcccagaagatttccttcccccctgaggaagtgatatttagatcattcgacctggagaaaaaatagaagttagccctgaggtgaaagagagcaggctacactggaggcgctgaagaaagcataggacagctggagtgagcaagtcataaaacccccattccagagagggtcctgccccatacccagaaggaaagaatgctgctcagagaggccaagaagaatctggacggacaggccttgtgttgtcttctcttgagcagtagatcatacctttttgtccagtcatgtttctgcangcctgtacatatttcgttaaacctaaacatagtagacaatttctcctccnnnnnnnnnnnnnnnnnnnnnnnnnnnnnnnnnnnnnnnnnn

SEQ ID NO: 6122 - DNA, 917 bp, Homo sapiens
ttctgatcatgatatgtttctctttttttttacttagtgtcttagaaaataaaaattctgggccttacttgttttttcaacgacagttttggtcttcagttaaggtacgtgtccatagactatctaaaagactcagatttcgtttgacttcatatattacattttttagagtgttttgttttttattaactccataggcttagatctatttatatctatacccaaaatctccattttacaaagtattttattccaaaagttcattcaagtttgatattttcacaggagaaagtgatttctgagttccaaagtaaggtccatcgtactcaacgaaatgcctgactaagccacaattaattttttcagcaagtagactacagtagtcctccctgtatccatggggtatatgttctaagatgcccagtggctacctgaaaccacagatagtaccgaaccctatatatactgttttttcctctacatacatacctatgataaagtttaacttataaattaggcacagtaagagattaacaataactaataatagaacagttattaataatatactgtggtaaaggttatatgaatgtagtttctctctcaaaatatgttattgtactgtgccacagctgactgaaaccacagataaggagtactgctgtagcagatactcttctgaggttcggggatatagcactgagtaagctagaagtggaatctttgtggagttcacagtccagcacagttgacaacaaataggtaatctcaggtgtgatgagttatgaaaggggacattcaaggtaatgtggaacatatgacaaggggcacagagaccttgactagctagtcccagaagatttccttccaccctgaggaagtgatatttagatcattcgaaatgaagaaaaaataga

SEQ ID NO: 6123 - DNA, 323 bp, Homo sapiens
  SIMILAR (196)..(321): 971254mologous to Homo sapiens similar to tumor suppressor p33ING1; similar to AF044076 (PID:g2829208),accession number AC004537,Smith-Waterman Score=234.
gcgcgagatggacctgcaggtgcacaatgcaatggatcaacttgaacaaagagtcagcgaattctttatgaatgcaaagaaaaatatacctgagtggagggaagagcaaatggcatccatcaaaaaagactactataaagctttggaagatgcagatgagaaggttcagttggcagaccagatatatgacttggatctttggaattagacactccttcacagccagtgaacaatcaccatgctcattcacatactccagcggaaaaaaggaaatataatccaacttctcaccatacgacaacagatcatattcctgaaaagaa

SEQ ID NO: 6124 - DNA, 2997 bp, Homo sapiens
  SIMILAR (1)..(2994): 1001254mologous to Homo sapiens general transcription factor 2-I; alternative splice product,accession number AF035737,Smith- Waterman Score=5169.
atggcccaagttgcaatgtccaccctccccgttgaagatgaggagtcctcggagagcaggatggtggtgacattcctcatgtcagctctcgagtccatgtgtaaagaactggccaagtccaaagccgaagtggcctgcattgcagtgtatgaaacagacgtgtttgtcgtcggaactgaaagaggacgtgcttttgtcaataccagaaaggattttcaaaaagattttgtaaaatattgtgttgaagaagaagaaaaagctgcagagatgcataaaatgaaatctacaacccaggcaaatcggatgagtgtagatgctgtagaaattgaaacactcagaaaaacagttgaggactatttctgcttttgctatgggaaagctttaggcaaatccacagtggtacctgtaccatatgagaagatgctgcgagaccagtcggctgtggtagtgcaggggcttccggaaggtgttgcctttaaacaccccgagaactatgatcttgcaaccctgaaatggattttggagaacaaagcagggatttcattcatcattaagagaccttttttagagccaaagaagcatgtaggtggtcgtgtgatggtaacagatgctgacaggtcaatactatctccaggtggaagttgtggccccatcaaagtgaaaactgaacccacagaagattctggcatttccctggaaatggcagctgtgacagtaaaggaagaatcagaagatcctgattattatcaatataacattcaagcaggcccttctgaaactgatgatgttgatgaaaaacagcccctatcgaagcctttgcaaggaagccaccattcttcagagggcaatgaaggcacagaaatggaagtaccagcagaagattctactcaacatgtcccttcagaaacaagtgaggaccctgaagttgaggtgactattgaagatgatgattattctccaccgtctaagagaccaaaggccaatgagctaccgcagccaccagtcccggaacccgccaatgctgggaagcggaaagtgagggagttcaacttcgagaaatggaatgctcgcatcactgatctacgtaaacaagttgaagaattgtttgaaaggaaatatgctcaagccataaaagccaaaggtccggtgacgatcccgtaccctcttttccagtctcatgttgaagatctttatgtagaaggacttcctgaaggaattccttttagaaggccatctacttacggaattcctcgcctggagaggatattacttgcaaaggaaaggattcgttttgtgattaagaaacatgagcttctgaattcaacacgtgaagatttacagcttgataagccagcttcaggagtaaaggaagaatggtatgccagaatcactaaattaagaaagatggtggatcagcttttctgcaaaaaatttgcggaagccttggggagcactgaagccaaggctgtaccgtaccaaaaatttgaggcacacccgaatgatctgtacgtggaaggactgccagaaaacattcctttccgaagtccctcatggtatggaatcccaaggctggaaaaaatcattcaagtgggcaatcgaattaaatttgttattaaaagaccagaacttctgactcacagtaccactgaagttactcagccaagaacgaatacaccagtcaaggaagattggaatgtcagaattaccaagctacggaagcaagtggaagagatttttaatttgaaatttgctcaagctcttggactcaccgaggcagtaaaagtaccatatcctgtgtttgaatcaaacccggagttcttgtatgtggaaggcttgccagaggggattcccttccgaagccctacctggtttggaattccacgacttgaaaggatcgtccgcgggagtaataaaatcaagttcgttgttaaaaaacctgaactagttatttcctacttgcctcctgggatggctagtaaaataaacactaaagctttgcagtcccccaaaagaccacgaagtcctgggagtaattcaaaggttcctgaaattgaggtcaccgtggaaggccctaataacaacaatcctcaaacctcagctgttcgaaccccgacccagactaacggttctaacgttcccttcaagccacgagggagagagttttcctttgaggcctggaatgccaaaatcacggacctaaaacagaaagttgaaaatctcttcaatgagaaatgtggggaagctcttggccttaaacaagctgtgaaggtgccgttcgcgttatttgagtctttcccggaagacttttatgtggaaggcttacctgagggtgtgccattccgaagaccatcgacttttggcattccgaggctggagaagatactcagaaacaaagccaaaattaagttcatcattaaaaagcccgaaatgtttgagacggcgattaaggagagcacctcctctaagagccctcccagaaaaataaattcatcacccaatgttaatactactgcatcaggtgttgaagaccttaacatcattcaggtgacaattccagatgatgataatgaaagactctcgaaagttgaaaaagctagacagctaagagaacaagtgaatgacctctttagtcggaaatttggtgaagctattggtatgggttttcctgtgaaagttccctacaggaaaatcacaattaaccctggctgtgtggtggttgatggcatgcccccgggggtgtccttcaaagcccccagctacctggaaatcagctccatgagaaggatcttagactctgccgagtttatcaaattcacggtcattagaccatttccaggacttgtgattaataaccagctggttgatcagagtgagtcagaaggccccgtgatacaagaatcagctgaaccaagccagttggaagttccagccacagaagaaataaaagagactgatggaagctctcagatcaagcaagaaccagaccccacgtggtag

SEQ ID NO: 6125 - DNA, 350 bp, Homo sapiens
  SIMILAR (135)..(239): 881254mologous to Homo sapiens SPIN protein,accession number Y14946,Smith-Waterman Score=159.
taaacttataaggtcacggataatacttctcattgtagtacgtagatgacgggggctagatatgagttgaataaacaggtatacctgtaaattcttacagagtgaaaataaattggtatactttacaatttgtttctctctttagaccatttccaggacttgtgattaataaccaactggctgatcagagtgagtcagaaggccccgtgatacaagaatcagctgaacccagccagttgggaagttccagccacagaagaaataaaagagactgatggaagctctcagatcaagcaagaaccagaccccacgtgggagacctctttccttctaggggaaatcagcttctg

SEQ ID NO: 6126 - DNA, 3199 bp, Homo sapiens
  SIMILAR (1)..(2934): 1001254mologous to Homo sapiens general transcription factor 2-I,accession number AF038967,Smith-Waterman Score=5065.
atggcccaagttgcaatgtccaccctccccgttgaagatgaggagtcctcggagagcaggatggtggtgacattcctcatgtcagctctcgagtccatgtgtaaagaactggccaagtccaaagccgaagtggcctgcattgcagtgtatgaaacagacgtgtttgtcgtcggaactgaaagaggacgtgcttttgtcaataccagaaaggattttcaaaaagattttgtaaaatattgtgttgaagaagaagaaaaagctgcagagatgcataaaatgaaatctacaacccaggcaaatcggatgagtgtagatgctgtagaaattgaaacactcagaaaaacagttgaggactatttctgcttttgctatgggaaagctttaggcaaatccacagtggtacctgtaccatatgagaagatgctgcgagaccagtcggctgtggtagtgcaggggcttccggaaggtgttgcctttaaacaccccgagaactatgatcttgcaaccctgaaatggattttggagaacaaagcagggatttcattcatcattaagagaccttttttagagccaaagaagcatgtaggtggtcgtgtgatggtaacagatgctgacaggtcaatactatctccaggtggaagttgtggccccatcaaagtgaaaactgaacccacagaagattctggcatttccctggaaatggcagctgtgacagtaaaggaagaatcagaagatcctgattattatcaatataacattcaaggaagccaccattcttcagagggcaatgaaggcacagaaatggaagtaccagcagaagattctactcaacatgtcccttcagaaacaagtgaggaccctgaagttgaggtgactattgaagatgatgattattctccaccgtctaagagaccaaaggccaatgagctaccgcagccaccagtcccggaacccgccaatgctgggaagcggaaagtgagggagttcaacttcgagaaatggaatgctcgcatcactgatctacgtaaacaagttgaagaattgtttgaaaggaaatatgctcaagccataaaagccaaaggtccggtgacgatcccgtaccctcttttccagtctcatgttgaagatctttatgtagaaggacttcctgaaggaattccttttagaaggccatctacttacggaattcctcgcctggagaggatattacttgcaaaggaaaggattcgttttgtgattaagaaacatgagcttctgaattcaacacgtgaagatttacagcttgataagccagcttcaggagtaaaggaagaatggtatgccagaatcactaaattaagaaagatggtggatcagcttttctgcaaaaaatttgcggaagccttggggagcactgaagccaaggctgtaccgtaccaaaaatttgaggcacacccgaatgatctgtacgtggaaggactgccagaaaacattcctttccgaagtccctcatggtatggaatcccaaggctggaaaaaatcattcaagtgggcaatcgaattaaatttgttattaaaagaccagaacttctgactcacagtaccactgaagttactcagccaagaacgaatacaccagtcaaggaagattggaatgtcagaattaccaagctacggaagcaagtggaagagatttttaatttgaaatttgctcaagctcttggactcaccgaggcagtaaaagtaccatatcctgtgtttgaatcaaacccggagttcttgtatgtggaaggcttgccagaggggattcccttccgaagccctacctggtttggaattccacgacttgaaaggatcgtccgcgggagtaataaaatcaagttcgttgttaaaaaacctgaactagttatttcctacttgcctcctgggatggctagtaaaataaacactaaagctttgcagtcccccaaaagaccacgaagtcctgggagtaattcaaaggttcctgaaattgaggtcaccgtggaaggccctaataacaacaatcctcaaacctcagctgttcgaaccccgacccagactaacggttctaacgttcccttcaagccacgagggagagagttttcctttgaggcctggaatgccaaaatcacggacctaaaacagaaagttgaaaatctcttcaatgagaaatgtggggaagctcttggccttaaacaagctgtgaaggtgccgttcgcgttatttgagtctttcccggaagacttttatgtggaaggcttacctgagggtgtgccattccgaagaccatcgacttttggcattccgaggctggagaagatactcagaaacaaagccaaaattaagttcatcattaaaaagcccgaaatgtttgagacggcgattaaggagagcacctcctctaagagccctcccagaaaaataaattcatcacccaatgttaatactactgcatcaggtgttgaagaccttaacatcattcaggtgacaattccagatgatgataatgaaagactctcgaaagttgaaaaagctagacagctaagagaacaagtgaatgacctctttagtcggaaatttggtgaagctattggtatgggttttcctgtgaaagttccctacaggaaaatcacaattaaccctggctgtgtggtggttgatggcatgcccccgggggtgtccttcaaagcccccagctacctggaaatcagctccatgagaaggatcttagactctgccgagtttatcaaattcacggtcattagaccatttccaggacttgtgattaataaccagctggttgatcagagtgagtcagaaggccccgtgatacaagaatcagctgaaccaagccagttggaagttccagccacagaagaaataaaagagactgatggaagctctcagatcaagcaagaaccagaccccacgtggtagacctcttccctcgctagcagagccttgagttacggtgtttattttccaatcaagtgaagatatctcctacttctcctactggaacatctcagcttctgcagtgaagaaaaattcctgtgatagttcagttctttagtttttctatttgaaaaaaaaaaatcatttaaatgatcctttgttcacggctctccttaatgactgagtgaacagttcctatctgtatatttgactaaaccttttcctaagctaaaaaaaaaaaaaa

SEQ ID NO: 6127 - DNA, 454 bp, Homo sapiens
  misc_feature (1)...(454): n = a,t,c or g
acctagataacctaagtgtgtcctttaaatgcatgtaagccagaagatgtatgttactttgaaaacataagtaacaaaattttgaatgtattgctaaagagatgtctctctgaagctcttttgatgtttggtgtcttgtccttcttattaaaccatatcttagtaaatagtttggtacgaatggatttatcactgagcaggtctgcaaaataattaatcggtaccgttttgtttctgttgatagaaataaaagagactgatggaagctctcagatcaagcaagaaccagaccccacgtggtagacctcttccctcctagggtaaatcagcttctgtgtcagggatgctgtgtgggcgtccatctggaaccccctggcatacgcgtagctaatgtgatctccccactttcacataagatgggtggccctgcctttcangggaatgttgggagcca

SEQ ID NO: 6128 - DNA, 3647 bp, Homo sapiens
  SIMILAR (1)..(2877): 961254mologous to Homo sapiens Bruton's tyrosine kinase- associated protein-135; BAP-135,accession number U77948,Smith- Waterman Score=4724.
atggcccaagttgcaatgtccaccctccccgttgaagatgaggagtcctcggagagcaggatggtggtgacattcctcatgtcagctctcgagtccatgtgtaaagaactggccaagtccaaagccgaagtggcctgcattgcagtgtatgaaacagacgtgtttgtcgtcggaactgaaagaggacgtgcttttgtcaataccagaaaggattttcaaaaagattttgtaaaatattgtgttgaagaagaagaaaaagctgcagagatgcataaaatgaaatctacaacccaggcaaatcggatgagtgtagatgctgtagaaattgaaacactcagaaaaacagttgaggactatttctgcttttgctatgggaaagctttaggcaaatccacagtggtacctgtaccatatgagaagatgctgagagaccagtcggctgtggtagtgcaggggcttccggaaggtgttgcctttaaacaccccgagaactatgatcttgcaaccctgaaatggattggggagaacaaaggagggatttcattcatcattaagagaccttttttagagccaaagaagcatgtaggtggtcgtgtgatggtaacagatgctgacaggtcaatactatctccaggtggaagttgtggccccatcaaagtgaaaactgaacccacagaagattctggcatttccctggaaatggcagctgtgacagtaaaggaagaatcagaagatcctgattattatcaatataacattcaaggaagccaccattcttcagagggcaatgaaggcacagaaatggaagtaccagcagaagatgatgattattctccaccgtctaagagaccaaaggccaatgagctaccgcagccaccagtcccggaacccgccaatgctgggaagcggaaagtgagggagttcaacttcgagaaatggaatgctcgcatcactgatctacgtaaacaagttgaagaattgtttgaaaggaaatatgctcaagccataaaagccaaaggtccggtgacgatcccgtaccctcttttccagtctcatgttgaagatctttatgtagaaggacttcctgaaggaattccttttagaaggccatctacttacggaattcctcgcctggagaggatattacttgcaaaggaaaggattcgttttgtgattaagaaacatgagcttctgaattcaacacgtgaagatttacagcttgataagccagcttcaggagtaaaggaagaatggtatgccagaatcactaaattaagaaagatggtggatcagcttttctgcaaaaaatttgcggaagccttggggagcactgaagccaaggctgtaccgtaccaaaaatttgaggcacacccgaatgatctgtacgtggaaggactgccagaaaacattcctttccgaagtccctcatggtatggaatcccaaggctggaaaaaatcattcaagtgggcaatcgaattaaatttgttattaaaagaccagaacttctgactcacagtaccactgaagttactcagccaagaacgaatacaccagtcaaagaagattggaatgtcagaattaccaagctacggaagcaagtggaagagatttttaatttgaaatttgctcaagctcttggactcaccgaggcagtaaaagtaccatatcctgtgtttgaatcaaacccggagttcttgtatgtggaaggcttgccagaggggattcccttccgaagccctacctggtttggaattccacgacttgaaaggatcgtccacgggagtaataaaatcaagttcgttgttaaaaaacctgaactagttatttcctacttgcctcctgggatggctagtaaaataaacactaaagctttgcagtcccccaaaagaccacgaagtcctgggagtaattcaaaggttcctgaaattgaggtcaccgtggaaggccctaataacaacaatcctcaaacctcagctgttcgaaccccgacccagactaacggttctaacgttcccttcaagccacgagggagagagttttcctttgaggcctggaatgccaaaatcacggacctaaaacagaaagttgaaaatctcttcaatgagaaatgtggggaagctcttggccttaaacaagctgtgaaggtgccgttcgcgttatttgagtctttcccggaagacttttatgtggaaggcttacctgagggtgtgccattccgaagaccatcgacttttggcattccgaggctggagaagatactcagaaacaaagccaaaattaagttcatcattaaaaagcccgaaatgtttgagacggcgattaaggagagcacctcctctaagagccctcccagaaaaataaattcatcacccaatgttaatactactgcatcaggtgttgaagaccttaacatcattcaggtgacaattccagatgatgataatgaaaggctcttcgaaagttgaaaaagctagccagcttaagaggaccaagttaatgacctctttagtcggaaattttggtgaagctatttggtatgggtttccctgtgaaagttccctacaggaaaatcacaattaaccctggctgtgtggtggttgatggcattgcccccgggggtgtccttcaaagcccccagctacctggaaatcagctccatgagaaggatcttagactctgccgagtttatcaaattcacggtcattagaccatttccaggacttgtgattaataaccagctggttgatcagagtgagtcaaaaggccccgtgatacaagaatcagctgaaccaagccagttggaagttccagccacagaagaaataaaagagactgatggaagctctcagatcaagcaagaaccagaccccacgtggtagacctcttccctcctagggtaaatcagcttctgtgtcaggggatgctgtgtggcgtccatctgaaccccctgcatacgcgtagctaatgtgatctccccactttcacataagatggtgggcctgccttcaggggaatgtgggagccaggtgggagccttgcccgatatttaagctagaagattctacagggaggattctccttgggatcaatattttgtctctcactcaaagatgtaaaagcacttttgccttaaaaagaatgttctgtttctaaatagagtcaacgttgtcctcctcattggaattcactatgagtcagaatcattagactgactttttttttttccatagtaatagtatttttgcagagtctcacagagctgcagatcttttgttcatcttggcagagttaacaagtctgatcctgttagtccagatttcttaaatttggccaggttataataggagcagtagcttgagacccgaattcaggaaactttgacaatggattttttttttttaatccagagacttgtactggaatttgccttaccctgtcagctcatggacttaaggtttcatcccgctttatgagtgcttcttgaatccaagtcattgttacctgaatttgcaaattaagtttgtgatattcgtgactgttaaattcctgtaattagattaacctctttgcttgcttggttgttttctctcctattttagcttaaagtatcagtggttgagaagagcttttcggacctgttactacc

SEQ ID NO: 6129 - DNA, 406 bp, Homo sapiens
  SIMILAR (37)..(333): 761254mologous to Mus musculus putative,accession number AK006290,Smith-Waterman Score=387.
  misc_feature (1)...(406): n = a,t,c or g
cccacgcgtccgcccacgcgtccgcccacgcgtccgctgttttctcctttggttaaagattgggctcccaaagcatttataatttcctttaagttggagactgaccccgccattgtaattaatcgagctcggaaggctttggaaatttatcagcatcaagtggggggggctaatatccttgagtcacgacagtcctttgtgtttattgtaaccaaagactcggaaaccaagttattgctatcagaggaagaaatagaaaaaggcgtagagatagaagagaagatagtggataatcttcagtctcgacacacagcttttataggtgacagaaactgaagtaaaaagcccttataggatcaaaaattgttccagggctcttagagatggtgaaaactacaaaaaaacn

SEQ ID NO: 6130 - DNA, 958 bp, Homo sapiens
  SIMILAR (3)..(440): 981254mologous to Homo sapiens Human PRO4397 protein sequence SEQ ID NO:42,accession number AAB24035,Smith-Waterman Score=792.
  misc_feature (1)...(958): n = a,t,c or g
acgtaattgtgcatgcgcggcccatccgcacgcgggctagcaagtactacatccccgaggccgtgtacggcctgcccgcctatccggcctacgcgggcggcggtggctttgtgctttccggggccacgctgcaccgcctggctggcgcctgtgcgcaggtcgagctcttccccatcgacgacgtctttctgggcatgtgtctgcagcgcctgcggctcacgcccgagcctcaccctgccttccgcacctttggcatcccccagccttcagccgcgccgcatttgagcaccttcgacccctgcttttaccgcgagctggttgtagtgcacgggctctcggccgctgacatctggcttatgtggcgcctgctgcacgggccgcatgggccaccctgtgcgcatccactgcctgtcgctgcaggccccttccaatgggactcctagctccccactacagccccaagctcctaactcagacccagaatggagccggtttcccagattattgccgtgtatgtggtttcttccctgatcaccagggtgcctgtctccaacaggaatccccagggaatgggggtttaagcttggctcctggggggttccaccctgctgggaaccagttgaaaacccgtgtaaatnggtgaacccttttgaaggcgagccaaggttggggtggtagatgaccatctcttgtccaacaggtcccagagcaggggatatgtctggtcctcctagtagcacagaggtgtgttctggtgtggtggcagggacttagggaatcctaccactctgctggatttggaaccccctaggctgacgcggacgtatgcagaggctctcaaggccaggccccacagggaggtggaggggctccggccgccacagcctgaattcatgaacctggcaggcactttgccatagctcatctgaaaacagatattatgcttcccacaacctct

SEQ ID NO: 6131 - DNA, 1010 bp, Homo sapiens
  SIMILAR (381)..(578): 891254mologous to Oryctolagus cuniculus chloride channel,accession number D26076,Smith-Waterman Score=305.
caaaaaaaaccacaaacaggtatcaccaatacaaaagtaagcagttgaagagacgagacgaacttgcctgtttacactctggggattgcataagaaaaaacaggtttctcccttaaagggagcctggtgccttctctgttctctttaaggaaccccaggctattataaactatttcagttccctcatgcagcagagggtgcaagagaaaggagagacagcagaagtaaatgaagaaaacagaattcagtcaactgagaagaaaaaccttgctcaaaagaatgacaagcctggaactcctggggtcaagcggtcttcccacctaagcctctccgtgctgggactccggacgcgctccacctcacgcagccgtattcctgctttcaaagcagatggaagagaacaaggacagggggacatccctacattttacacctatgaagaaggattatcccatctaacagcagaaggccaagccacactggagagattagaaggaatgctttctcagtctgtgagcagccagtataatatggctggggtcaggacagaagattcaataagagattatgaagggggctggagccctgggccaagggagacctgtgaccccaggtgccgccgggagaacttcagcccagaggggaaatcagctctccgtgacccagcacccctacccagcagcgcaacagatcctgagaggagctacaggatgattctagaaacagcgcacttcaggaatcatggttggttccgcggaggcacgagcatcctcatctcacacacgggaagcgaggttcggggagaggaacagctggctgggtcacggagctttgaaggggcagaaccagaaacgaacaccttctgcccatctcaggggctcccccttgtggccatcgtgggaggtggccctgcacacagccatcacactctaaatggtcatgcaactggagccttggatgatggccctttttgccagggacctttagataggcctctgagggagatctga
